United States Patent Application Publication US 2014/0057251 A1 - sequence listing, part 70

SEQ ID NO: 111670 - DNA, 2080 bp, Cannabis sativa
tttcttccctctctctgcaacttttgtcagacccattttagagctcaactcactagagttgcatgtttataaattgaacccattaccaatccattgattctccccaagcttttgaaatcttctcacttaacttgagcaaaagttttgatctttttgtaaagttttcaactttcaaaagtaaagatacttcttttttggaagttaaccaaaaaagtttgagttttagaagacgaaagcaatagagtcagacataagaaggaaaacaagctttttggtatctgggtcattttttcatccagttttggtgattttgggaggtgggttttgaaggttttggcttaaaaaacttcgatagatgattgttagctcaccttgtaatgcagggactaaatttttggtgagtttgtttttcttttcttttttttttttacagtctttgccttttgtatttatctttactgtttttttgttttctcctttcatctttgttactgtatatttgtactctagtccttcataacttcatacgttagaaaaaacatttccttttctcctaccttattgtcaacattgctacaagaaaatgttttatatatgaaaactgccttcttcaagtttcaacttttgatttgtttttatatgcatatatatataatataagcatatgctgtgtgtatgtgtgtgtgtgtattagtgtaaatgcatgtatgtcctttgttagcttgtaccagttaacatattattttgatattaaatgaaactgtggtgattgattttgttaaatgggtccaatatccaattcatttcatgcattcttgctagatttctaatctggacccaccaaatatagttctatattattgagtacattcataaaagatttgatatatatttggttaagaataataataatattaaaaccaaacaaatttcattcattcattcattcacacacacacacacacaaaaaccacttttaaattatactggtctggttggataattgatgtcagtggattttaataattattaaagatacatagatgatgatgatgttggtccatttccaaaggccttaatactagtgtaccaaatctatgcattaatttcttttttataataatattatatgacatgattatgtgtgtttgtgtgttatttttttggttgatttatggaccttttgtcctcttgtgagtctgcaattaccaataattggtgatattattttttaattacttagttgttggtgatattattgaagctgtaccatattatatggctatgcatattagagtatgaatttgtaagtgataaaacttaaatatggtcagtctgaccagaacagtggatgtcttttgtttatcttatgatttttagcatcatgtttggttgattataatatatatttttttaaggttcaagaggaattgcattcatctaggatgcttctttagtctcaatcagtttgtttggtcaaccatagtttaatggggactctattatttaatggcattggatgaaataaacattcaaacttgtgaagagtattattattaactaataaattcacttaatactttggttagtattgatcaatatgtttagaaatgccatactactttataactgcattctctatgatgtttggtttgttgtgttaaatgacttgttttcttcaaattgaccattactaattctctttgctatgtgaaaaaaaaaaatagggggaagaagccatagatgtaagaaagatgacagaacacaaacggagcccctgctatgttgaccaaagcagcttctcctcgtctcttgtatcgtcgaaaagacaaaagcccgatttatctatttctactaaggtattttgaaaagcatataaactatatttgcttcaactttgtaacatgaattgaaaatactattcttcaccttggttggtgtttcttaagagaattttgcatattatacaagtactgttattccatgtgaaggcatttcccccttgaggcttgtcccgaattcattcttgtgttgttcttatattgtcattgtatgtcattcaattgctttaaactcagtt

SEQ ID NO: 111671 - DNA, 7173 bp, Cannabis sativa
  modified_base (7015)..(7015): a, c, t, g, unknown or other
atgtgatccctcataaagtagccgtcactagccttattaatcacagcgtaatagctgcaaatgaggggttacgctgtcagacgtattgcttatggcatttccaatacgttttctcccatgcggcattaaatgtgaagaaaccattcaaatagagtccaatacctcccggagatttcttagcatactcttggtctccgggagtacgtggagccctctcacatcttctccgggagttatcttcatactgacactcgtgttgccaaagacttggtcgatttctttaacagttgagcctctcagctccacgtgtcgttgctatactggtccacgtattttgggcaaaatagagggcaacagaaccttttccttgttcttgtgttaatacaaataacgaggattaggctattaccgaactactcggggctgaacctctataaaatttatgtgtctttatattgctttattatatttcaatcgttatagactacttgttgcttactaaattacactcactttctttcgctaaaagcgaggtcaacatatacatgaaacaatcattaaataaatcatgtgaaccatgcaaaataaaatgcagtgtttgatctttattatttagtaaatctaattatatggaaatgggttttatttagggcacaaaacccgacacgtttcactttaaggaagaatattttgaaggaaatagttagtataaacctgggagaagttcctcacaaagaaaatgctcgaaagatatccctatcatcatgaaggataaatccctagatgtacaatcatggccacacgaccaggcaacgaccaaaaggcctaggtcgattaattccattaatagacttggaaaacaaaagagcctacataacaacatcaataagaagctgacagctgatacacacatcaccatagtgtgtagggctgaatttgaccctcttgtcgctctggttaagggtgtggctactgaaaagccaactaagtacggatttgatcaagagcggttttctcctctctcggattaaatcaaggctttggagatcccgtaaaagtttagaaattcagtgtggcattaatacactggcaaagaagaccctctctctcacatccacatctttgaagtacaaactaacctgcaaggcatttgagaaaattctagttattgagtctttctaagaatactatcaggaacaacacatcaatagtatcccaagcattccacaggatctattgattcctgaaagatgcttaaaaatgctttctaagactaattctctccttcaaggcacacaccactagagccaaaagattttgtctgcactaaataacaagaagacggacctctaatggattaccttcaaatattacaccattatagattttctagatagagttgacaattttatcaagctcaaagaagatgtcacgaaggttagaagaattgctcaagcagaagtaactgattacactgcttatttatttcatgagactcatatatacattgaccaagaaaagctcagaaaagttaactactaatacctcaactgaaccagattcctcttctatttcccaggatgaacttgagtaggaagatagtgatgagtcccctgcaatatctgaagaagatctcgagcatgaaagcagtgataggaatctcccccgacttcctaagataactaaggagacgggggcagtgacaaagattctccctctatttccaaaaatgattaggaataggggagaagcagtgaagatgtgtcctatcagtcttctaatggtattgaccaggaaagttacactacagactcccattgagagaatgatggaccatatatcataatagaagtgttagaaactaggacaaacgggttagagtttggtatgactacaacttgaatccattgccgttagcaaggtactcgaatggggagcatctaagattatataacagataaagcagcgactccttaaacaatttgcttcactatgagattgactttaccttgtgcaagtgaatcgatcacctcctaaaccaacaagatgggacaatgacatcttaaggaggtccatcgctaagttatggcccatacactattagtcgaacatggcattagtgtagtgcggatcacttcagctaagctttgatgaaaaacaaaattctacaactactacttgtttttctttcacttttgatcacaatgatgtaattgaatttaatatctaatgaataaaaccgcagagtaaagcttgttggtacattattgttattaatcaattgtagctcatagacttgacgatgccctcaagtgttgaataaagcttgtagaattggtcttgaggtaaataaaattatttctttggtgagttaaacactgcaaacccacgaatctctgaataagtggacaagttctctccaaacaagaaagcctaatggtatttgctatggcaagtgaccaagaaagacattacttcgatcgctcatgggccaataagagctaatatatgagagttgtgcatattacataagcactaataaaaaatcatggtacacgagagccatgtatgtcacatacactttgctatgttagagcaaggtgttaccctggtacatgaaagccaagggttgcagtggcagtcaagaatttcacacacctgagttagtattctacaatttaatgaaatgttggcgttgtttgtagtaactgagtttcttaatctaaagtgcaagtgtgagtgatggtaagttcatgaggttgaacaaccgcacatacagactatttgaacgccaattttaagcattattatgatataagtggttgaggtcacacaagaatataataactggggttatatatttaaagtgctagtgcaagtattcctccttagatcacaaaaatcaaaaagaaaagaaaagcgtcatcaattacagaatgttatttggaagaaggatgctgcatgcaatagatattttctaattgattgaagaaaacactgtgggagtgggaccctacacaagtttttgtattctttgagtcatgtcacttgtgataataaagcgaactcatgcttgagcaccaaggacacaagcaatatgcccttaccccttaacatttgtctatcttgatgacaacaaatagcttcaacatacaaacttcaatgtttttcacctcatttactaagagataaatattgggggaaagagaaataaagttcggacaatgttaacgaaatttcaaacataatggtgacaaaggtgatggttaatcatcaagcatcaccaaatattctaatcagaatagaccctgaaaagagtgggtcactccctaagagatccagggccatgcaagtagctcatgtatggttttaggtgagccaacattgctccctgtaacaaaatcaattcaccactatagtatgttatgttttcggtgctaatgcctctataaatattagaaggctttactaggagaatgtgaaaagataagatggaaagagtatgaatgctatctttaggcttcttcctaatctatttcaattcaattgaagatagaaatgagcttctcaaaggtggatatattttcttcaatataaggccggtagtgatgaagccatgggatcccactgttaatttcaagaaaggagatattcgggtgggtcaaatttgggtccatcttgatgaccttgacttgaaatattggggtgaaaaatccttattcaacaaaattgggcaagtaggcaagcctatcatggtggacgaatctactaagagaagggataaacttacctatccttgagttctgataaaagttgcaatgaatcaacaattctctcaggctatggattttgatgatgataatggtttcaacactatggtataagtttcatatgggtggagtccgattttatgtggccactattctaatatgggacacacaactattgattgcaagaaaaaaatggagaaaaataagtccgggctgtgaaacatgcaggaaaaaagactgagaagagggaaaaagaatatttgtagtagatggggatggtttctaatcaacttcaacgggatggaaacataaggaatctaatgttcccctgcctgccaaaaccaaaaattcattccaagcattgaatgagatattggaaactgattctttgatagaaaggacaaatgatttgtgtatggtaaaacaagttgaagatgttaacacaagagaaggggagctccctttcatgccaatggatagaataatgagctggaatgtctgagggatcaatagttaacaaaagcaactttcagttaagcaattgattggaaaacaaaaagtaaggcttgttggtctccttgagacgagagttaaggcttggaaccttggagcctcatatgttagaatgttttcgggatggtgcctcacctctaatagtgcatggtatgatgggggaaggattattgtgtgttggatcctcttacctttgctgtcaatacttaaaatgtacaagccaactcatccatctttttgttaaaaccagggacaagaaaacaactttctttgtcacttttgtttttggattcaaggatgaggattgaaggagaacattatggagtgatttgagagaccttgctattatggattcttgtattgtgcttagagattttaatgatattctaaacaaagatgagaggataggaaagtgatttaaattcaagaatttggaagactttaaggattgtgtggaaacatgtcaacttggagatgtaaaattcattggaaattttctatacatggactaacaagcaaatgggagatgataggatttactccaagattgacagggtgcttgcaaaccagaaatggctcaaattgcaccttgctgccaaagttgtgtttcataatgagggtctttttgaccacacaccagctattttaattatttgtgatggaataacaggtggaagaaagccttttaggtactttcggatgtggtttttgcaacctaattaagcccaaatggttgctaaaaccttgaatcaaaagtggatggtgcaaaaatgtatcaaatcctttctaaactgaagagcctcaagttgattttcaagaaaattaattagcaggcctttgttaatcttcaagtagttgtactacaagttagggaaaaattgaactcacatcaaaagcctctccatcttgatcctttgaactgtgaacttcagcaataggaaagggaagctggcggagaatatgaaaaaattcaggctgtttatctctctttttctccgacaaaaagccaaactaaattagataaaagagggagactctaattcatctttcttccacaacagtataagagctagaagacctcataatatagttctctccatcaataatgcattggcaacaacggtagatgaacctcaacaacttttatagattattacaacactcttttaggcacaatataaagataaaaaaatcggtcttgacctctgttatcaagcaagggcctgtggtctcaagttttcaagttgatgcactcctatctgagttctcttttaaagaaactaaagaagcaatttttgccattcctagaagtaaagccctaggccctgatcaatatagtagtttctttttcaaagacaatggggagctcattaggaatgatgtctatgatgctattgcctctttccttcaaactggccttcttttgaaagagttctactctacagttttgactctcattccaaaaaacaaatgtctaacctggttagtgattatcgaccaattgcttgctttaatgtactctaccagtctactacaaaagctgaactattcgaggcttaaatcagttcttcctggttgagttgctgaaaatcatggaggatttgtccaagggaggttcataggccataatatcatgatctgtcaagacctcatacgacactatggaaggaaaactaaaaacgcaaactctatgttcaaattggatctccataaaccatatggcaccataaaatgggattttatagaagagatgctctatgcttttcagtttccacccaaattgatcaagtttatcatggttttgtgttcgtactccatggatctccttgacattaaatggatccttacatggtgtcttcaaagctacaagagggttgagacatcgtgatcgaatgtccccccttctctttgtattaagcatgtattatgtagaaaattggaaagaggaaagactttaaattccatgagaggtgtggtgacttggagttaaatctcctgagctttgtagatgatgttctccttttttgaaatggagatttcaaaagcaaatatcttatgctccaagttctcaaaattttccctaaaacatcaagattatttactaatccctcaaaaagtactttttactttagtaatatgagtaattctgacattaaaagagtacttgatgctttgggtcttacaaaatatgaattaccttccaattactaaggaatacatatatatcttaaaagaatctctgcatctgaatgtaattctttatttgagaagatggtggctaggaaaagaacttggagctctcaaaatttgtccttttctaagagagtggttctcatcaactcagtgttgatggccattcagtacccaaaaaagttgtgtgtgaaattgaatccatttgtcatgcctacttgtggaacgataatcatatccttgcacatacgacagttgtttcctgaaacaccctgttatcctaatttttgaactttgacgtggcatcacatgaatggtgacacgtggaatccaactggagatctactcgggaagcatagttcgagcaggatgcctcgctggcatgcccagggcaaagtattcagcaattcacgtagagtgaccaacacttagcgaattcagctttcgcattgtgagtcatcagcacaatccctataactctgggaccaatttacgtggatatggcatacacacgatccaactatcagtgtattcagcctcantcccacgatccttgcattcagcatcgatcccactatctttctatttgtgcgcattgtaatgagaggggaaactcttcctcctcaagcttactagccctataaatagttatgcatattcactgggcaagaggtcaaaaaagtagttgagctaagactat

SEQ ID NO: 111672 - DNA, 5789 bp, Cannabis sativa
  modified_base (73)..(75): a, c, t, g, unknown or other
gaaaaaaaaataggccttttttttcaaaaaaaaaaatgggccttaaaaaaatgggggccttgtgcaatggccnnngctgcccaatgcttgggccggccctagtagagggtgagggtatattgagcaatcaactcacaaaagtaagtatattttaatgaaatatagtatgagagtaattttgatcaatagataaaaaaaatatatttctcaacttttctcaaattataaaatgaaataaatttgtatttactatcaaaagcccaaaaataggcctaagcccaaaaagccctgtctgccaacccaaacaccaaacaaagagaattaaatttggtatttctgcaactcataccagtccacaaagtctccagcagccacgtggcgagtcccttttcctgtcccactgcaggacccacggatgcagcatttgtctccagcgcctctccacttgcatgatataatcttctacaagttgatcaacaaaaattcatttacaattaatctactttaattttttattggtctattttattttcttatgcggacaaaacaaaaaaatcctactatagaatcctccaatatatagattagattttgaaaagcaacatagatggtaggccattaatgaaaaaaaaaaattatatatattatataatgaaagaatcattgtatacataaaattaagggagccagagccaatcatataatatggcaccgctcttgatctaacaccactgaggtaattaactaccgattccctataatttttattaaaagtaaaataagtttctcggtgtactaggcagtaaacaccataagtaccctttaacatctctcttaccataattatacccttgtcgaattcacgtaaatccttttaccaaatgcgggccaaaaatgcttataatttacattaccaatcatagttgattatttcttaacaagttactcatgcctttcaaagtatgctaattaatgtgaggaatttgcgaacgcaagacggtgccctaaacacaaagtgttaaattttcttgtgaatgaaaagtttagagtataatatcaaaataataactcaaatttcactgctgctagactccaagccgcataagaattgtggtataatcatcttgaaatggaacatcaaattccaatgtggtcaaactcaactaagaaccaagataaataaaccagctcaagaagaagacctctaagctctaagaacccacctcctactccgacaatgtatcgacctccacagaaggtggatccaatggatccacctctgtcgtagaatgtggaaccaacaaaagatccctaagctgctggggatccacctccgaaggtgcacgagtgagagcacattgagcagttgtcgtctttgggaaggctataacatccctgatggaattagcaccagccaacaacatcactagtctatccaatccataagctatgccccctgtaccagaacattgtacaattactataccatatttgctgtgatcatcagccaatgaccagagaaagagagagagagagagagagtgagaggtttccataccatgaggaggagcacccatgtccaatgcttcaagaagatagccaaatttagcttcagcctgtagataaaacagcatattaccacccccaataattattttttgtttagaagaacataaaattttatgccttaagagtcaaaagatgcaagtacttgtatagagtaagataactaaaagaaacttttaagccaaacgctagtagtgtcaaggcctaaccatatttacctcttcagcagatatgccaataatttccaaaactttttgctgaacctcccgtttgtaaattcttaaacttcctccaccaatctaacaaatatcaatcattgtgaggaatgatgacattgcgcttctgagctaaagtttaataaaatttacacagctaaaatggggtcaagatcaaataataatataactcacttacctctactccattgtaaaccatgtcataagctaaagcacgagcagatgaaagatcttccatgtcttcggggtttggggctgtgaagggatgatgcaaagcctgcaaatgaccattttaggcatataggtagagctttagccaccacaaaaaggaacaaccaggctgttgtaaaagtgaatgcaaaactaaatcaagaagacagacctcaagcctttgctccgagtcattccactcaaacattggaaaatcagtcacccatagaatcgaatgcttggactaaatgtcagcgccgaaagcaacagatggtgacagtcaaatttcaggaaactaggagtacaatatgtaactgacacttaaacaaatggttgcagaacttacactgtcaatcaaatcaaggtcatgtgctacgaacaacctaagtcgatcaagagttctgtttacagaagcctgctgaccgattgcaaataggataagatcatgtggtttggtagacaaacgcatcatgaactgatttatacatgttggatccatacaagataataatgcaggatttccctccatggatcctgcaaattttgaaaccatcaactgtgaaatacatgaaggaaccactccccttcaaataaaaaaaagatgaaacaagcatacaaacaattaatttttattaccatcatccttcaccttcaagaaagtaaagttctcggcaccagatgcaattgcttcattgtaaatataacctttccggagaacattatttgaatattttttagcagccgagggaatacaaagaactttgataatcccccctttattcaaggcatgtgaaaaaggtctgaatggggtatctgaaaatatatcagatacctacaacagaagaaacacgctttctaataagcattaaatagttacataattcccctaaaagactaaacgatgtgattataacataaaagaaggctagaagtttaaaagaaacatatgcaactatgcaagaataaaaagaaatgcataaattgaatgttaacattagtgaaggaagaaccaagggagagatatttacatccttcagttcaagatcaaatctaagatcaggcctgtctgaaccatatctactcatggcctcagcatatgtaagcctagggaagggattcggtagatgaacacctttaatctctaaaaaaacctgcaacacacaaagctttcagatcactcccaagaatgaaagtcagagagcaaaccttaataattcatttaccaaaggaaagcagtaggaccccctctagctactcaaaatttttagttattcatccacaaacattatcaatccaacatagctcaaaatccagtacagtttacatcaattaagctacttcattatatactgacctttcttatcaaatcttcattaagcctcagcatttcttccaaaggagtgaaagcaagttccatatcaagttgtgtgaattcgggttgtctgtctgctctcagatcttcatcgcgaaagcatcttcacataaaaaaagaaacaaattcataccgcaccaagcaatgagtttaacagtaacaaaagcagaaagctcgagcataagcaaatcaagtgaatcaaacataacctcaaactacaagataaagcaaaacttacttggctacttgatagtatttatcaaaaccagaaaccattagcatttgcttgaatagttgtgggctttgaggcaaagcataaaatgtccctggcttcaaacacagaaggtaaaatcagttctgaaagcaagaaggaggcaaatagcccgcagaagattgtaagattaaaaacatatttgccatgtacctgattgaataataatgttcaattatcagaaagtaatacctatattcatttcatcacgtttaaatatatcaaagaatgaaccaaagtttcaaaatttgaagcagaactagaggcatggctccccttgttgacacatttagaaaataattctacaactaagtaagagcaaagtagtaagaatttgtttataacaaaacaaagtaaagaaatcgcatcttaaaaacatagcacggaaaggattactcagcattttaacttaaattttcctgaattatctatagcaattaataggtacacaagtaaatgaacaaaaaatttataacttaatggctgctgaattgatattgtacctgaacccttgagggaaccaaataatctcgtgcaccttctggagtagatctagagagtattggagtctcaatctaccttataaccatgagcgggaatcagaatcaaagtgctaaatgaaccctctttcttttctattcaattatgggacataattcagaagatggtacctccacaaagccatgcacatcttcaaggtatcttcgaataagtttcatgacattgtggcgcagtaaaatgttggaattcatttgttggcgacgcagatcaaggcaccgatatctatgaaaacaaatctgagtacatttaacattaaatagtcccaacaaataccatatgtgtaaagacagtttttgaatcctatatgaaccacattttgtcgtgggaaaactatattgaactacattatgtcccacccaagtgattcacagaatcaaataccttaaccgaatttcctccttcacagaatcttttgcctcatccccagtagtatgaatcgaaaagggcagcttcaattttacatcgtttagtaattgaacatgctctgctgcaacctaacatacatagacaatacaaaactaagctacataaataaaaaagtgactacattaacaaatagaatatgaacaagacaagcaagtcaatagtagtttttacttctatatagccagttttcattttctcgttgattgaagcgcttggccgatgcctaacaataccttctactgcaattacatactcaattctcaagtccttaataatagaatgcacatcaggaaaatcatccttaggtgttgtgacctataacaaaaaaaagaaaaaatcaaattaaatttaaatacttgccggaaaacttttcaacaaaaggaactgaagacatcaaagaaagagccaaaactcgtacctgtacaacaccagtatggtctctaaggattaagaaagtctgcttggcatgaaaacgacgaagcgagacccacccgcataaccggacccgtttgcctacgtcgtccaccgaaagctcaccacaaagtccggtccgactaacccaatcgagggtttccttgactggaatcaaaggagattttggagtctcggtaagagcatcgttaggaggagttgagaaagcggaaacagagcaaaaggttcttctgtttccacaaagtgttttgggaattaaggatctgagaataatggtgtggaataagagagtgaatcgaggcttgacgctaaccgatatgagagggtacgctttgagaagtacggacatggcggataactttcaaagaagaagaaaattaaaagctttgggtttctctgaaatctgaactagtgaactctgaagatgagcttcgaagagggttttaggattttagtgataactagcttttgaacatgcgttgcacgtgtaacatatattattcgtattcagctctgatttatattttttttttactaaatgtagacatgaaatattaaattttttttatttaaaagaatacgttcaaataatttgattaatgcaatatgacaactaaaatgatcgaagtgtttagcttaaactatatagtatatataaataatgagaatgctaaatacacatttaaatttcacacatttattatttataataata

SEQ ID NO: 111673 - DNA, 2980 bp, Cannabis sativa
ttgattttctaagtatagaaaatcaaatttcccttattgttagtgttcaaataattagacttataagaaaataaaagtataataattaaaacaataaccctttaaaaaaaataaaaaccttaaaagcattataatctaaattaatggtaaaaacttaaaaataagacaaatatcaattgaatcaacattatatacaaacattcatctttaaaacagagataataataatacaaaaacgatcccttctgttttagctaaattccaatttgaatcttctattttaagaaattataaaaatgatccgctatttgttaaatagtaaaaattggtcccctgaacacaaatttagtcaaattttgttttagaaagactgaaataccctaaatatttgaatgaaacaaaaataaaacaaatgtaaaaaaaatatgttacacatgtatttttaagataatttatggtgtttttgagtttatcattcattcaaagtaaattatattagaattattattgtggactaatataatcataaacttaataccataaacataatcattaactgtgcctaatatttgtcaacaaccataatgggatggttaataattatttattatgtcgcacatgagaacacccatatataactataattggttcattaagttatagtacaccattaattacacttgattagtcctataaacaaaataaccccttagggttagaagggtatatacatatattaagtgttaaggatagttaatggtatcataaaagggaacaaaggttgctccacaaattgtctctattttattccatattcagattttcttggttaagtttggatagctcaaatggatgcacaaatgggaggtatgtgtttatattatttttgaatgctctaaataaaatatggatcttggtaaaagattatgagcattcatgatttgattattgtgtgtgtttaatgcttataatctatgataacaataacaattagtatcagaactagtatatttgattttagggcttttgtttggatgaaaactttgtttttacccaaacaaaaatcaaaaactttggtattttttttggattaatgtgtttataatgaataaatattaaatctattgcttgagatgggtttatatttattttttggatgctcttttttattttttccattggagaataacaagtttggagatgttcatcaatggtagaaacccattttcggatttgtgttttatgggtaatgttttttgtgaaaaatagatgaaatggatgttggaaattgatagagggttagaaatggaagaaaactcccataaaatccgatgaaaacagtggttggatgtgtcaatttcaggtggctctggtttcgggtcctgtcgacccagttcgttgacctgcgcgcccggttccaaggtcagggatgacccgtgccaaacgacgtgtagttcacgtctctaagggtctcgtcgttttttgctgaaacgacacgtcgttttacgaaaataacatgtcgttttctggacaaaaaaaaaatcaggggcacactttggaccctttttttctattttttcactaaaattttactactctataattacatactattttgcacaagattaacatatgggttttattttttttataattgtatttatatttaatcttttgtgaataaatttagttatttgttgacaataattatttcttatttttttgtccgtcttaagaataagcatgtaaattctttggtgatgaggaacatttaaatattaatttatttaaattttgtatcttcctccaaattttattaagatacttataagtaattagttattggttgcttaatatggtgaaaaaaatttattaaatattatgaattacaatttatctatcctttcgatagcaaattaacgtatttgattataatatttaatagattgttcttacctgtgcatgaattctattttgttattttgtctaagaactctagcatacatgatgatcatctgtaaattttgcgatcattcgtttatgaaaaaagagcacaaataacatgattttgttacaacatgcatttaatggttattgctcttgtttctcattcaactttaagcattccaagaacctctgccatgttgacgctgaatggaaccaaccacaagcagtgggttgaatctctcatgctgaatttgactcttatgagagtggacttggccttgagaatggatacaccgcctaaacccgctgatgatgccactgaaaagaacaagaagtcctatgagaattgggagcattccaatcgttgttgtttgatgcttatgaggtatcacatggatgaatccattcgtgatagtattcagacaaaaaatgcaaagaattttcttgcagccattaaggaaaagtataaaaagttctcaaagaatgagagaaatgagtgcttaactttgttctatcgtactaattatgttgatacgggtgatattagagctcacattgacaagctcatgagttgttaccaaaagtttaagggtatgggattggaccttggtgagaattacacgatgtggttcgtgatggaaaccattccttctcagtttgattcgatcagatcaagctacaatgctcaaaaggagtagtggaccattaaagagatgactgctattcttgccaaggaagaagaggacatgaacaaggaaagagcaagaagtatcttcatggtgacaaaagaaagttcacttccaacaactctagtgaccaaaggtttagaaagtcaccgttcctaagggaaatggacaagcaagctcttcttcaactggtcataagaatgagttttttaaatggaagtgtaacttttttcaatgctttgagcataagaaagctgattgccgaaagctcaaagctcacttagagaagaaaggtaattgtcttgtgatggtttgtttggaatccaatattattgatgtgccctcaa

SEQ ID NO: 111674 - DNA, 2222 bp, Cannabis sativa
caaaatatcggggcgttacatagcatctgctttagtaaatgttattattggttcccctacacgtggtattttaggtttcctttcttcgatggctaggattgtgtcattttgctcattatgtaaggccagagcatacttttctctagctttgcccaagtctctagggagatgtgggcccccaatgattacttgtaaatgcttgtccactagtataggcattagttggttctaattattatatgtctgggcggccctttgatcttgattggctttgacatatttttgtgagtactggttgttctttttgatcaaaaactcaatttcacacttcaaattattgcatccatttgtgtcgtggtcgtagttctcatgaagtgacaaaacttagttgtatctcttttgcttatttgcttcttcatgggagatggtttcttgtatggcaccatagactgggtggttgcataaattgtctctatgtcatccgtttgaactgagaaagtagtaaatttagaggcattttccctgggatgctatttggcattacctgtgaacttgcctgtctttccattaccctgtctactgctcttattagcacttttctgtttgaattcgaactattaggatattgtgagttctgggtagacaaactggctgctctagtatgttgttgatttttcttttgcccgacagtatccatacattgtactgcttcctcaagcttaatgaatccatttgctcaatctagaaattcagccactgatcccacagtttatcttttgatctccttccataaccctcctaaaggctcaattttaccctagtattgctgctaatcttccctcttcagccagccctttaacctttgttgcttcagtcataaacctgctaatgtaggccctgagaggatctcttaacatatgcttcacttctaccaggtcttccaagtgggatggaagctgacgggaggaagaaatctgtccgtgcaactccaaggagaaagcaatccatgaattaaactttcctacaggaaatttgaattaccattgttgggcggcccctacgattgtgtcaggaaagattatgcatggtacatttcctcttaccctttctagatccatctgcatttcaaaataatttaagtgttataaaggatcttcttttcctatgtacattttccatattggcattttgcactttggaggtaggtcaaggacatcgatttcaggtgataagggtgatccatgggcccggtcaagtttgaaatctgtgagtttttggtcggtcaggccttgtaccatgtttttaagttgatccggttgtgcttgcagaagcagatgaacttgtttagcctgttgaccgacctatgtcacattagcatctctttgaactgaatcttgggcgtgtgtatctgattggacagtcagtggaatgttttgtccattcagtgcccttctataatttaaattaattctgaggtcatgcatggtacctagcagattgaacaccgaagcaccaggtggtcttggtggctgacctgtttggcttagaggttttcttgagaccactgtattagtatagttgtttgaatgtgtgactcctcccaaaggatggtcttgtaaaatctagcagtctaccatttgggccaacgtttgaacctgtggccttagattagacggctgaccacaacgagtctatgcagtatttccaggtgcatatccttttgacccgctcagggggatactagattcagttattggttgttgactagtaacctggtaagcccttcttatcaacatggtggcctccctacaatgatcgtcaatggtcgcctgctgtgccctcgaaatttccatctcttggtccctccattccatgaattgacatctttgctcatcaaatgcaaggttaatggctactcagagatcttcctgatcatgatgcagattgttgttatggccttacatgagcccagtgcttctcacaaattctgaagttcagtgtcatctccagctggcctttgagaattattagtggacgggacctcggtgcttggagtggtctaattggtggtcgtactagtattcccagtccttgtacagctgttttgaaccaagctactagggaagtcactccatgtcctaccataggtggttatttattaacttgttcggggcttgtccctggtggtcctctcgtgtttccaggagtttgcacgtttggat

SEQ ID NO: 111675 - DNA, 3348 bp, Cannabis sativa
agaccctgaatgctatgttgagggcaatgatgatgtaagagacaaccaagatatagaggtccttgctgatgtagctttgaacttgactccactatcgtaccaaagaccactcaggccaccgacacggaaaaaaatgccccgtagaaaaaattgctaaacacctagtactaatagtagtcgtccaggcgaaaccagtaatgctaaaggaaccattgactgtacaggtcctaataatgctagagagactaatgatgctagtggtcctagtgatgctcgagggaccaatgtaaccggatttagcgatccattttcttcttcgacaagttacgatacatttagattgtacatattattgtagtaattactctttagattgtacatattatttacataaaaaccttatagttatcacacatttatcaccacaggtatgtgtgaactcaaaataagtataacatcttgtaggttgatcaatacttacatgaaaaacacacacacaaacatctaacattcctcatgagcaatctacacaagagaggttgttttggcgacatcatatttcaatcaatccatttagaatgagagacaaactttagactttggtcttaattttaattaaactaaatatactctacaaaatacatataaatttatgtgtatatataattcattatatattatggattctatacatatgcacatatatatatattttgtaaatcacatataatgcaatttctctcatctaaaagcctcaatatataaatttcaacaagaaaaaaatagttatttaataatatctatataggattcaaaccaaaattaaccacttttaatcaaatagaataagaagaatggtctgagggaccctgcgctgagcaaaagtggtatgaactgtttactatgactgatctatgaattttcatcggcctgatggtcgtaggcgcacaacaaaatgatgtaaaaaaattgtatctttgactagcaatttaggggtaacacaagaagaagcttgggaagagaatgaaaaggtagtgatgtcactttgtgggaagaatcatattgaagaaagatgttaacgataggcttttttctacaatctttagccgaatgtggaaaggaatatcagattggaatgttaagatttttgacgaggaaggacacaactcttatgtggggatctcattcaaatcaaaagtttatgccaattgttttagggaaacaactctgtgtgtttaaggaagttgtgctgctattagaagagtagtcagactctagataatggagtgatgcgaagcttgacaaaatttattgttgggttaaaatgaaaggtataccactgaaagtttttcgtttgaataatgtcaaacaattgggtgaaatggcagagaagttgaggatcttagatggtcgactgaatagtgtatgtttcttaatggatatgcaagggtgagaattgattttccattggacaaaagagtttttatgggtcgatatattcctagtgggaaaatgaaatattgggttcaatttaaatttgagaggctatcaatgctctgttttgggtgtgggatttggggtcatgaatagagagattatgctagtcaaataaaaatggagagagatgagaatgggaaagatgttcctaaatatggggcatggttaaaagaagaagatccaataccaaactatttcaatgcttttcgacaatcccaaatgcaagctcaggagccagcggtgaatcaattaaagaagaaagggaggttatactagggctaggagcaaatggaggaattgaactggagaaagatggtggtccgacggagatgaatgatggtgtaggcggtgatatgacggtggataaggaaatctcatcattgattatgctgagcaatttaggaataatgggaatcgtgggggatgaagcgggaagtggtatccaagaagttaggtgaagtgggttgacgattagggtttaattgggcccaaacatgagtggacaaaataccaatatgggcctaaaagggaatttaatgaaggataatggacttggggggttagagatgccacttttacaacaaactagttagaaaggaggcccaataactagaatgaatggaggacatcaaaatggggttagacctctgccagatggatttattgacagggaaagtgatttaaaaaagaggaagaacaatgacagagcttatgtagaggagactgcgagggaacctcgatctgttgacaaatggaagatgattgtctcgatatgtgaagagttagagatccttggaggttttacaccggggttaagtggagatggaaacaaagagatgaagccccacaagggcagagaagaaaggtatccactaaaaataaagcacgtaaacaagctatgtcacagttggccttgagtaccgaaggagctggggcaatgttgcaaaaggctcagggagaagacatagaaggaggagaagggagatgtaatttatttgagaaaactgggtatgctaaactttgggaaggtaactgtagattcaacaactgaggtgagtatttctaacacaattgaattatcatctcaaagttccttaagtgaagcaacgagccttgcaatgtaggaccgccgagcacaatgaaactcttgagttggaatgtccaaggaattggaaactcttggacattacgtgctttacagtcccatattcggatgaataatccgagcattgtgtttttttgcaaaaagtaaacttacaaggtatcaagcagagtgattgtgtactactctttagtttggagtaatttttggacagtagacacggtgggattgagtgggggcctattattaatgtggaaagatgaccttcatgtaagggtggattctagttcaccttgccatattgcagttgtaatggccagcaaaggttttctaccttggaatctgacttgcttttatggtcatctagatgcttctcaacataacttttcgtggaaacttcttagacatatcaacagggagacggagggagcttggctaagtgtgggcgactttaatgaaatagtgagtttggcaaaaaagagtaggggtatattgagagaatcaggtactatcgaagctttcaaagaggttctcgatgattatcaattgattgattttagtactattaaagatgaattcacgtggtgtaatgactatatcccgtcaacttatcaggaaacacctgcaaaaaggcagaacaaatatactatataataatatagtccataagcaagctataacattaaaattatggttttacccttctcgggtcaaattataaaaataccctggctcaccaacggggtctt

SEQ ID NO: 111676 - DNA, 11734 bp, Cannabis sativa
aaaaataccttgaaaattataggacaagctagctagagctgtatattaattcattagtgtttattagtatggatgtaagaagcatccttaattaacaacaataatagactagataccatatagcaatagtactgtagtcccttccatctcttacaaccatcctccaccagaaagataaactacccaagaaaaaaaatgtattcttcaagtttggtacttatttctcctacttcacctaagatattatctattggggattccctgcattcaatccacaagtagtgttcttccacatatttcttcatttttattctgtactggaccctttttattatttcaacctataaaagaacaaccattattaattatcactatataaattgactgtttcttcagtaagtccaatcttgaggaagaccgatctcgttctggtgcatggcctgcgctgtcctagagtactgtcccttcttttgtgaatttttcccatttttctttgagttattaataataatatctggaaaaaaaaaaaatacaaccaggaccaagttgttaattaaaaaaataaacgtagaagaattaaattaagaatagaatttgcacagaataagattctttttattttaaaatattgtattttttttttatttgtgtgtgtgattacgtaccgtgttgttggactgagaaaaaatcagtagtattttgtccagacatgttatccattcggtcaaagtgaactttcagtgcctgcattacttttgctggtattaaaactggtgaacatcctgatgagtttagtcaaaaaagaataaaacaaatggttagagtttcttcgaatcatgccactataaaaatttagaacacacacgccaaataaataaaataaaataaaatgtcaacccttttcttctctatatattggaacgggttttttttttttttaaaaaaaaaaaagaaaaagaatagttggttaactgaacaatttgcaaaaggaccaaactccacacaagagtgacaccattccattatcataggtaggaaaatgtagttaattagtaacttagtaccaaaagtttaggtttaaggaaatgagagattgagaggaataatattatttctataattagctacgaatacctatacaatcattcgatttaaattagatccaaggtcacaaaccaacaccaaaaagaattaaaaaaaatattacattacaaaccagtagtactgattatcagatatcaaagatgggattggtgatactccactttcagaccaaccaatcctaacgacttgggaaccgtaataaaatcaccccctttaacgactaatttaaaaaaatcaaaatcaaaatcataccctataattttaagaatataactactatgggatcgaaatatattcttgccaaaattcatatttctaccattaccattctcaaaaaaaaaaaaaaacaattgaaatgatgtgacataatataagtaagaaataggtgacacaccaaaattgggaatatgggatgggacaaagtaaattattttgttcgaacttggaatagggtataatagtgacctttttttttgcgagactgtgatgtttcgccaattacgccaggtaaaaatactccggtcccacttgacccacttgcagaacccgacccgccaagaaaaaccgctcgcatacccgaacccaatggttgctgctgctgttgttggggcttctggttaattaccggggaaacccaagggtgacgttttggtgttggtctgtccttcttcacgaatggaaggttgagattttgttcttgattttgtattattctctttcctgatgtgcttttctgctttggaatcagctcttgcttcaccttacgaaactgtagatatacacaaaaaaagaataatcataattataataatataatattattgaatcttcaatgaatatatgggttgtacttgcttacacgaatagcttgaatttgatctagagtttgaggttggttacggcgaaatcctgaagtttttagatttgaagtagctagtaagctctgattttgattattactagttgagtgtttgctgaagccttcgttactgcttattatatttaaatcttcaagctttgatgttatctcgaaactgctgtaatcccaagggagctgtcgtttttcgaccagtggcgtggccggcggcgttggctcatgagaagacctttctgggcttccataactcgaacctaacggagaccatgttccgacccgactcgaattcgaaccccatcctccgaaatcctttgtctgaaaacaacaataaatttctgaataacttgcacttttggtgaacaaaaaaaaaaagcagagtaattaataagcagtaactgaatatgagtacacaccttgttctgttttcctgggctactaattaagccagggaaacgacaccgtttatcatcatctggatcaaacaagccgtgagtcatctgatcacgagtcaactcggcaatgcaatagtcgtcgattttctgttcagtctccgattgatcggcggaagaactcaccggcgaggaaaacccattacttgaaaaatcatcatcaaaactactattatgttgccaaggctttgaagggtcgtcgaatcctaaaatttctgagaaactaaatccatcatcgttaatgtcagagaggtggaattgatcagaagaagagagtaataaatccccaccgcggtgtaggtcaacagccatcataataataacgaagcttgtttaaatttcaccaagaaaaacaaatacaagccgaaaagtcaggtggggttttgatgatgatgatgatgatgatgatgatcaccaaggcactagcagtactgctccgatatgagtgagtttttagagattataaagaagaaaagaaaagcttttattaaggttttgggtgaggaaaggaagaagaggcctaaaaaagttaatgtggggacaagaacagaggaaggggtgggtcccttagttatgtctggttttttgtatcacagatagttgggatagttgggatagttgggtttgggtggttggccgagaaactcaaagtgagatagtaaataacttacatacaatacaacacacaataataggacagtaattttcgtgtaatataattagtaatagccagataattgtaatgtcataaaactagctaggctagctaacagtatacgaataattgtttattgcttcttattgtttagatttgatgtaaattgtataataaggaaatttgttgtaaattttctttaatattgttgtatacgaatctagttatgtgtgatttctagatttttttttttttttttttgagatgaaaatcctaaaactttaccataaagagcattggctcttaaaaaggatgaagggggatcttattaaaaatttacaaagtaaatttagtaagattgtgggcaataacattaactctcttagagcaaatgagaaagacttacattattaaagagagctaaattacaataaatctcgtaaaactaagtctaacgacgattctaaaaaatattattgttaatcttacttactacattaagacaatcattctcatactaaatattatccagatcaaacaaatggtattggactccagcatgacgcaaaataagagcttcaacaacttcaaactaaaaatatccaaccatgtgtcaaatagccgagtatagacaaccccatgaatatcacggataactatactcatactagagaagcccctcgccacatctaacattggacaaacccaccatagaaggtacccaacgagacacgaggattgttatccgcattttcagcattggacaagtggaatccaagtcagcatctaaggcccattagtgggtctctcaacgaagataaagtgggccaagcccacttgtacatgtctttccaggaacatatcctagcttcgtgaccataaagtcttctgcccttggcgaaccatccccggaaacaattccggtaccacgagatcgaagggacgagacaacgtgttcctgaaacaccttccaatttccctttttattcctgcacataataaggaaactactgccaaatcgcaacagagcatcgtaccaggttaaatgaggaaacttcgtataacgaacattaagcaattaactcatagattaattgcccataatcaaagcacacggtgttgaccaaatcaagccaaatccaatccgcctagttagcaaatcgtctcccatgggttggacttcatgagacggatgaagtgtattaattactgtaaactccctaatagagggaaaaggaaaaatgaatgtaattctcaaactattataaatacccatcaaatcctacagattaaacttgagaacatatattctttgtattcctaaaggcttttacaagctaaataactactgaataatactgactcgtggactaaggctaattaacgccccaacgacgtaaaaaaatctttgtctctttttactccttctcttttaattatttgtttcttcagttctttatccatttttgaaaatctcagtaaactagcctgtgcagctagctgcaagaaagtacttggtctatataccacaggagtagtaaaaggagttcgaagggtccaacccgaagtgagtctgcgaagaagacccaaaaatcaagatacaccgagtatactagtctcatagatactcgagaaaatgagtacaatgcaacctgtaacatggtacattactggaagcctctgccaatgcataaatacagaaaacaaagaagtgattcaagcaagaagtgagaatatcatggggatatcgatcacaccacaaatgaatgtgactatttaaaagatgaaattgtgggattagtacggaatggacacttaaccaattgggtaaggatcccagtcatatatctaggacaggaagttgcacatggaaagcttttcattccaggatagcatggagccataaatcctcctcgggggtaagtcatccacaagttcctagaatacaagctccaaatgcacaagccattcaaggggcactgaatgctctagcagcagtagtcgctatagctcccagtcccataaatctgtaccttccaagagttgcattgccaatcttagatgatcatgtggcaactatctctggtggacctcatattgccggaagcactcaaaattcccaaaagagatacttgaataagttgaatcaaagtgaagcttgccacttggtacaatcaccttttcagcgtctaagacggatgaatttacaatgacttttacgaggatgacgccaagcatgtacattttccccacattgaccctctggtgaaagaagctcagatagcaaataaaagggtttccagaattcttgtggataatagaagccctgtaaacatcatttttaaaggagctttctaagtcgttgggcaagtgaaagccaatctactgccatgcctaattcaactacaagattttaatagagacacactgatccccatgggtgaaatataactccacatgagcatcaatggggaagtcctcggaagcaatacagtatcatcattcaagtataaaaaatttatgatagtcgatcgtctcactgtgtacaatgccattttgggaagacaattcttcatggattttaaagtagtaacattcatctagcatttgtgcttaaagttcccaagtgatactggaagcattaggaaaatcagaggagatcaaagaagcgcgtgtagttgctacagtgtttcaaccaaaactgtactcgtggtccaggaggggaatgactctgaagtcgaaacatcttccaagccagcactaggggtggtctagaaagagaacttgatccacgagctggcgtggaacatatcatagaaccaatggaggaagtggaagaagtatgcatagatgatggagatcccaccaaggttatccgagtagggaagaacctgccttcgacagtgaaggaaaagattatttccacagtcaaggaaaatagtgacatgttggcctatttcaataagccttgcatgattgcgtatggtggtaaatctgatccaatgtaccatctaagagctttcaacgagctaatgaagatgcaaaatgtgtcatgcaaggcaaggtgccaatgctttatggtcatacttaagggagttgcatataagtggttcaaaagccttgtgccaagaataattacatcctggaagaaatttttggaggaattccttcaacagcaccaggcagcaagtaattacgttatgcgtgtaacaagtatcaccaatgtgacgaaaggagaacaagaatccttacaaagctacatccaacgcttcaatgctagtcaccaaagtggggaatatgtctgaagatgaactcaagttcgccatagccgctagagtatgtcctccaagcacactatgggggaatatgctgaaaagggaattatttggcatagaaggcttctatgagagagcagagaagtacatccgtgtggaggaagaaaatagagtatttcaaacgaatactagccagtgttattcagaagctcatcagatctctacaaggtctattaggagatgcccctaacactcgtaagtcggtgcattcaggtgaagcttggctctacaacccgtaaaaattagatatccaagatgatcctcaaagtaaatttccattatgcaggaaagcattcctagcaatggcaagcttgcctttagtacattatactaaattaaaatgggaacctagtttgaccaccaaacataacatgtatttgagagatccaatgtctttcttattaatgaaatattaagttttcacctcatatatggcattcaacactctccgtcggtctgcttgacttgcttactatacttgtcaaccaatattttcaaattgaacgaagcagtgtaaaaaaaagagaaaaaaaaataaaaaagaggaatcagatatgactctaagagtgacgactctctaaaaggaatacgatcttctggcattcaacacgcactttaagtgccatgaatacaatgtaaggggtcgagcgctgcctaaaggccataagctcccttatatccaaggagtaatgattttcaagaattcaaaatgcacttttaatgacataaattcaatgtaagaggtcgagcgccacctaagggcgataagctccctcagtaaaattttgaatcttaataaaggttaagcgcgacccaagaggctaaatagctcccctaacatctaataacttgaaaaaggttgagcgcggcccaagagggtaaacaacttccttacaccctataagtagccggtaaaaggtcgagactgctcaaagagtctatactcccttcataataaggttacatcagaaaagaggttgacaaaagactccctcaaacaaaggatcttaaggcacaagtgcctaaagagacaactatagaactaagcagaagggatggcgcatgctaaacttagtctacaagagcacttaaaataatcttatagactaggggaaaaatgttaaccctaaaaattagcaaggcagattttcaagattagtaaacgattagtcttgagaagggaaagaaactgactttaaaagtcaatcaagtagggttgatggccactcaatcaaatgctagcttgagagccacatggccatgtgaagaccatggtcacttgaccatgatttcaacaagtcactcggccatgcacttgaggaagtcactcagccatgaactcggaaaagtcactcagccatgcacttggggaagtcactcggccatggacttgaggaagtcacttggccatgcacttgaggaagtcactcagccatccactcggggaagtcactcagccatgaacttgaggaagtcactcggccacacacttgaagaagtcactcagccatacttccaagaatgtcactcgacctgtagtttaggaagtcactcggacatgcttagccctaggtcacttggacatgaccattcaagagatcacttgtccaagatgaccttgaagtcacttagccaagccaagggggaatgtcactcggccatgcttggccctatgtcacttggccatgaccattcaaaagattacttagctaagatgaccttgaagtcacttagccaagccaatgaagatgatcacttggccatgttccaagctttcacataacccagccatgctcttgtcaatgacacaaccatgccaagtaggaactttcctaagtgttgaagatgaaggcaacgaaggtataattgcaaggacaaggcatgcatgcaaggtgggtacaaccatacctccaacaaattctgataccaaggagatacgagtagtggaggcaccacacctggaagtgatgacatccagaccaagagtgcacacaaccactaaccttgtaacttgggaccacctaacaccagacaaaggtacaaggcgcaagaccaccacctgcaacctgcaacctataggtcatggatatcaccatgtcccttacgaacactaatgtaccacatatcattagagcctataagtacccctcttgcagatataagaagggttaaaaattattgtaatacttcactccaagaaagcatttctcttactctatttttgctcgaaatatttctttaagtttttgaatttttatattttcgtcttcattttaagtcttgtgtctgagtttcaattttctggccttaagttagttgatgagtttttaccgtcaacaaatacccttaccatccttcataaaaggttctatatagtataattttgaattagggaaagaaagtttacctttgaaattggaccacaaattttttgatttatcaagaaattatgggttcaaacccacaacatgaacttcccattgaactacatcaataacataatcccttagtcgatccttatcaatgccaccatcatctctccttcaacctcaggtttatcagccacttcctttgcccacaatttcaaattacacattgcttaaaactcaacaatcacactcgtccatgggcctccagccagagtcatagcttgttccaaatctaatatctcacatcgatcatccaacaaactacttcaacaacaacacctatagaggggagctctatcgaagaaataggcttttgagacaacgacaagcgcctcgtcgtggaggtagttgtcctgccttgcatgccttttttcgagcatcctcgacctctcatcttgtcgttctatgttcttaaataaaaattttaggaactatgtcatttttgtttatataatatttgcacataaaattttagaggaattttatactgaactcttcaaaaatagatgcactgatgtatttatttatttaatttttttttttttgtatttttgagatccatataattctaatcttatttacatatatgacaatccatatcataattatttataggaattttttttgttttttttgagaaacttagaataattgaacgttctgaaaagaaattaactagtttgttatatgtgtgcttcttttattttataagcatttgagatagatttttttcgcgaggtgatagactatttgaatattattttttgtattacaatttatttaaatttctaaaaactttgtatgatgttttaagtaactacattatatatcatcatataaagataattgatattatgattatttagatatcgaaaatacaagaaagtaaattagtacactttttttaaattgcatcatagaaacaccttaaatattatatatttatcaatgataattaattggaaaacttataacaatatatactttatcaaacttttttacattatatgtgcaagaaaaacgtatttacaaaaaattatacatttctttaactatggtaaacaatattttttatttttatatacaaactatatatattaataaatttgtatatactaatttaatttagtaacattgttattaattgattaatcttgttataattatatcatgatttttattatgttattaatggattaatcttagtcatcattgttaaatattaatttttaattaaatcaattatattaagctttataatattattgcgacaacaaaaattaatcatttattttttatttctttattttaaattaaattacatataaatttttataataaattgtagaatgaataacaaatatttattctttaataaaaaaatatttataaatgcttaattttgtaaaaaattattctaactatataattaattttataaaattatttattttatttttttaatcggcatgctatattataaataataaagatgtatgttggtaaaaaaatataaattacttatagatataaaaaatatttataactagtaaaattatttgtacgtttgtttttttttcttcttaattttaattaattacttatgtaaattattaatatattattatttattattataattaaatattttttaaaataaacatatatatatttataataaaccatactaaagtggataataaacatttatactgtaattaaaaaaaatagtatgttctattatattaaactgtttattatttattttattttattttaaaacatgcttatttattttaaaaaatctatatttataataaataaattataaaataaacataaatttataataaatcatactaaaatatatcataaatatttatattataataaaaaaatattaaaaagatttcaacttttatggtattacgattttagtttcatattatttaatttttttactaaaacatatttttaacataattgttaataatagtacaaatttaaaagattattttaataaagttccatatgaattttatatatatttctctttataattcttacttttatatcttattattttgtttaatttataataagtcataataaaacagataataaatatttattttataataaaaaaatatttagtatgcgtatttttgtaaaaatttattttaacttttaattaattttataaaattatttattttattttttataaacacgtaatattataaataatgtttaaaagaaatattgtcaaaaagaagactagtattactgtaaatattgattatagtaacataatatatatagcacacatttaaattttatttatttttgtatattttacttttaaataaatacacatttaaagtttatatacattaatgtttaaaattttgatattgtattttattagaaaaaattcttaaattataataattcatattaaatagataataaatatttattctttaataaaaaaacatttagtttgtttatttttataaaactatttattatttatttaattaattttacaaaatcatttatttttagttttaataaactttttttataatataaaaaaaatattttattattaataatttttgaaacattgatatagtaaacataagatattataaactaacattataaatattaaatatattaatctatttatagtaattagtttagtcattaatgctttatattattgaatgattaaaatatatgatttatgcaatgtatttttttttttatgaatcaatgagatttatattgatcaatgaaattccgtattttaatattcccagtttgattatttaattaagtgattaattaaatgcggaataaagaaactggtactgaaa

SEQ ID NO: 111677 - DNA, 2666 bp, Cannabis sativa
ctctctctctctcttacatattcaatccaaactaacaacaataacaacaaccctctctctctttttctttctctgttcttagtcatgatgcagatcggttcaatgtcgtcacaagccaccgctaacttaaaattatctcctctaaacccattaacaaggcgttcttcctctaacttaacacgggttcatctcgctaacctagaaaagcttctgcagaagcctcctctacctgaaaaacttagtagcacacaaactgttcgacaaaatgtttctgagaatattgattcaggatctaccgagaaaagggggaggaaccttttagagggtcttaacttggctagattatggcctgagatgagagtagccgacgaaatgtccccacgacatctcaatcggcttcagcaacttcttaacaagacgggtgagggtgagtattcgcccagaaacaatcttggccgtcggtggagagaatatcacggtcgtgatgattgggaaggattgattgatcctcttgatgagaatcttcgccgtgaggttgtacggtacggcgagttcgtacaagccgcttaccgtttctttcactccaacccagccatgcctctcgatgaggcacccaaggctcgacacgtggcgttgcctgataggtcttataaggtaaccaagagtctttatgcgacgtcgtctgttggtttgccgaaatgggtcgatgacgtggcacccgatctcggttggatgacccagagatcgagctgggtcgggtacgtcgcggtttgcgatgacaagagggaaatccaacggatgggaagaagggatattgtaatctcgcttcgtggaaccgccacgtgtctcgagtgggccgaaaatgtgagagctcagctgatccaaatgccagacgaagaaggtgaacaagaacaccaagcaaaagttgagtgcgggtttatgagtttgttcaaaacacgtggtgctcacgtgccgagtttggctgagtcagttgttgaagaagtcaaaagactcatggacttatataaaggtgaagagctaagcataactgtcactggccacagcctaggagctgctctggccttactagtgggcgatgagcttagctcgtgcgcagagggagtaccacctgttgcggtcttctctttcggaggccctcgggtgggaaaccgcagttttgctaacagaattaacgagaaaaatgttaaggtcttaagaattgtgaactcacaagacgtgatcactagagttccaggcgcgtttttaggcgaatgtaaacccgaaaaagagaaagcaaagaagacgggtgttgttggtggtatgcttgatatgttggaggacaacatgcccttagcatactcacatgttgggacagaacttagggtggacacaaaaatgtcaccttatcttaaacctaatgctgacatggcttgttgtcatgatttagaggcttacttgcatttagtggatggttttttggcctccaattgtccttttagatcaaatgctaagcgaagcttggctaggttgcttcaagaccaaggatccaatgtgaaaaagttgtacactagtaaagctaagtccttgagtttgaatcttgaaaggcctgggcagggaataatgcacttccctattagcttacctagtccatcttaaaataaatgaaaagtatagtataaatttcttgtatcttgattatatcaaagtgctttgacttaaatattattagagatactatatgttgcaccttggacgtatagttaaatttgtacaaagatgaagtatacatgtgtatgcatacataatcaatgcatatgcatgactcacccaatatgtgtaatgcaattacaaagttaaaatattatggtgttatatagcttttgtttatttactctttaccaaagatataataataacatgcacaacaacacaattaacctttttaatttcttgtgcacctcaaactttaaatatcaactaacttatttgtattaattcaacggtgggtggtgggcatgtcaagtgcgatgtagaagtgtagttaaaaaaaaaaaggtgagaaatgtatgaggtttcattttaaaattaataaacaatgtgtgaaatagttattaattttttatatgttattaatatgagattctctaatattttctcaagatagaactatttttagctgacaaatatgttagaggactacatcgatcacaagtgacttttaacttactatactatctcaaaattacaaatcatcactattttttctctaatttttcagtcaaatactcgttagaattttgtttgtatatcagttttgtgtaaaattaaattaatattattagttaatatattttagattaattaggatttggtcttgtaaattttggcatgtaccaaattatgttctcttaactttttaaattattaaaaaaagaattctcaaaattaagattgttaaattcaaggattttcgtccaattctgttcaattttactaatgcaactatatggtccatgtcctaaattacgcctcaaaactttgaaatctaccaaaatgtgcctccgaactttgacagggccagccctgagtataggcgggctaggcctgtgcctagggcccacctagctcaggggcccaaaaaaaatttgtccccttttaaaattaca

SEQ ID NO: 111678 - DNA, 1674 bp, Cannabis sativa
aaatcaaattctttcatcacatggctattaccaacacattaatttgtgtttaatgggataaaaatgttggacaagagagctggaaacatgctcaattaattttggtggaaggaaaatactgacaagacaaggtactgggcacttaagaattaggatgagatttgccaaccaaagcgatgtggtgggttaggtttaagaagatttaaagacatgaatattgcattactggttaaacttttttggctaatcttacagcaaaggaacaaactgtggatgaaggcattgttagacaaatattactctaaattggatccttggcaggtggataaacaaagcttcgattttcgaggttggaagagtttgttggaggtccggcaagtgtgtatgaaaggggctgggttcatcatagcaggatttaattacaatcgaactcatgctttttccaaagtggcttatctttttattgaaggtataagagagtgggatgtggatcttattcaagagtgttttgtggaagatatttccacgacaatcctgagtatcaagctactgctggagggtgacgatattctgttttggaaagcttcaaagtctagtgtattttcagttaaaagttcctactagattgaccaacaaaagagattttatgcgcctagccttggctagacaaaactctggaagcagaatttacaccagaaacaacttttctacttatggcgaatctttgcaaattgtatcccaacaaaggacaggttaggctttcttgatgatgatgaacgtttgtgtgtgttttttccatgctgagctagaaagcactttacatatattcggaagatgctagctgatctgtagcatctggtttatgagtaaatggggtatgcaggtcgatgggaacagttggaataatgtaagagacatggggaattgattgttcaaaaagacattatactctttggtgctcgtgtcctggaaatcatttggaaatggcaaaatgatattgtgcatggtcgcaagggccatgacgttcttgccatttttgaggaatgctgcagactggctaatgaatttggaaatgctcttgacataaatggtacgaaggagatggagacccctgttggtgcagatattaggactgatactgagtgcaactcgatggaaaagtttacaattcaagttgatgcatcagtgtctggttctcatgctggtttggctgctgtccaaaagaactggcagactaatggtgatgctgtcatggcgatggagtattctgtagtttgcaatgtcttgcaaggtgaattgaaggccactaaattggctttccgagttgcaaaggtgaacgactctgtagatgtggttattgaatcggactctgccttggcgacaagaggctttgaagtaggctgtgttccgtttgagtggggatcatatcatttgttccaagattgtgttaactgttttaaggagtttaggtttgtgtgtgtcgtggctatcccaagatctgcgaatcttgtggctgatgccctcgcccgttgggctagactagagaaactctgttcttctggttgtttaagggaagtggccccctttgtagtcactatgtttgcttagtttgttttcaataaaagtttctcttgaccaaaaaaaaaaaaattaaaactagattaaattttatat

SEQ ID NO: 111679 - DNA, 1519 bp, Cannabis sativa
aaaaagtacaataaaatttaatatttactaattaataaatatatattttaattaataattattttatttttatgtataattaacattaaatacatattcattcaaaaaaaaatattaaatagatataataaaaaatattttaattttaatttttttaaataatatataagattcctatactcaaccaaacagtgtaatttaattaacagtattacgattacatcaccctacacagccaaacacaatttacacattttcctttaaccatattctccttcataatatttcctataatcaaattattttgaacacctcatactaaacgctccctatatttttctgattaattcaatccaaattacaactaaaatcgaagacaatattcatagaagatacgaattcatggattccaaaaacttttgtacaagatcttttctagctttagttgcatttctaaaatctaaaaattgcaaatttcaaaccaaaacgacatgaaatcaatagtttgcgatgatcccacaaaaaccttttttcaagccaaaaacattaattacgaaaaacggtagtttgcgataatcttatcggaaaaagttttaggcaaaaaatgatgcaaaatgatggtttacacttgtccaaatgaagacttattttttaagaacaaaaacattgccgaaacgacaatttgcgatagtcttatagaaacgtcttttaagcaaacaatgaagctaattcaatggttagcgtttggtgctataaaaacttgattttggaggttgaaaatgatgctacatcaatgatgtgtgtttgatgcaatgaaaacttcccatgaaaatttcattttagaggctaaaaatgttatgccaaaaaaaaatgctgacatgaaagttaggttacgctattactatgatatatcatcaataagtttgcatcaaatttattaaaaactttgatgaggcatcacttttcacatcatcgttttggtagttatttttacaaaaataaataaatatccggactacactcattatgtacgctcgaaattttaaaaatctgaaaagaaaaaaaaaaatcaatataaaacataaggaaatattcaaaatttatgagttaagattttcttttggagggatttaggttttggactgaattttcaatcattataacataaattgttgctttagtggctcttagtgtcaatatggtcatagtttttaatcatattaaaaaaaaatcaagaaaccacatctatataatttgttaattaatgggtaaatacaattttggatcttgtgtgttgcaaaagttacttaccaattagattttctattttgttaatgacaaaatacaccctatattttttaaaatggtaaaaccataactctgaactcaattttcaataatttttttttttaatataaataactttaacacaatttctaacgcgaacatacagaaaatataacaagttttgttataacatctttagattagattggattagattattattaagttttat

SEQ ID NO: 111680 - DNA, 5926 bp, Cannabis sativa
  modified_base (1354)..(1357): a, c, t, g, unknown or other
aaaaaaaatggtaaaatgggaagttcatgtaatcaatggaattaatttgtacaaattagtggagggtataaattttgatatggggtattttattaagggcaaattatgaaatttcccttttagtatactgtttaatttttctaaggcgtcctttattcatacaaatcattcgaccaatatggctacacataaattagttctgcacacacttaaggtgaatggtgagctaatttggatggaggattttccatctcttttttatgatgtactcaatgctgattttttttcaatgaaagtttgttcattgttaaaaataaaaaaataaaaaatacttggtaagtttcaatatttgtggggtcctctctttctgtctttcgatttctgaataagcaatcttaagagcattgttattgggcactagtgatgtctaataccttctataggtagagctccacgattggttagggatattatctaataattatcttcttaagttacgttacatgggaccaatatttttttacaccaataataatattacaccaaaaaaatactaagtactagtaatatattttagcaattttccaatcttaatcaacatggtttcaaacaaatactcgtctagaaaagataaagcatgaactatacaattctttctttaacatattcttcttgagcaagaaaacgtctaaatctaataaataatcaaacccacacgaaaaataaaatcatttatcattaaacaaagacttttattccttttccaaaaaaagaaaacaaagacttttacttttatttaattatttttttatgaacaagaaagtcaataatataaaagaaaatatatttattcacaacatttctttaggcctttaataaaaaaaacacatttctttggcccgaagaaaaaagatgattctattccattacataactcgtaattgagttagctaacttagcccacaagtcactaacaccacaccgccggaggatacctaatcgccgttgacccaaaaattttgtacagaaaaaggtaacatctgaaatgactaacatacccctatacagatttacttgccgacgttgatttagccgaaagagtatagggctatataagtaatttcggttctacgatgggtatccatgaactccataaagccgacttcacgagcattcgaatattttgattctctcagttcatttaagcttccctcggctgcatttgactttgaactgtagaatccatatatcaatggcttcatatactgcaagcccaaattttgtagcttccaaagccatcaaatctatcaaatttcgtgctcccaagagctcttcatcatcatcatcatcatcnnnntcatcatcatcatcgtcatcatcgccgccaaggaatgtaaagctttataatcgaacgattgattctttctcagctcggttactgcttcagaaccatgctaatttcaagctcagtggagctcctgttcgatttatgttctacaaggttgggatgtggattgatttttctagagaaattgtggcttctctttgttcgtgctttctagaccggacttcggcgattgatatggtgattgaagggtcaaattaccattttgattttctcggtatgttgcagattcatttgggggctgggaatcagagatcgattgcttggattgatgagcaaggtaagtgtttcttccctaaacaatttatcggagatgaatttgagagctacgatgtagagaatgcgaatgtagaaattgagatcgaagtcaaagggagtttggagccgaaattgggtaaaaggatgagagaagaagagaagatggtggaacatcaggaggaggaggataaggaagtgagttcttcgtataggcatggagtaatgccaaaacggcattgtattaaggattccaagctggaaaatcctcgatggccgaacacgaaattgctgagagaagaagagaacgcttatacgattgtcaggagcatatttctgcgtgggattaggaagattcatcccggtgctatcatcgccgcgattcatcagtgctcgcgcatgcggccattggagaaagctcatcgcgaaattttttcaaagcaaattgaaattactaaggctgctcgggggacatcgaatatggtttatgcctggtttgggggatcagcacaagccattgcaggcgttttggcacatgggtttagtgtggctggaaagctttctggctccgatgctaacgcggccggtgtccgtctctcccccttggccaatccttttagaaggtgattacgttgttccttttcagtttgtttttgcttttattgcatactttgttatattatcaatgtaattctgacggttgtgagtggtggttcagtgctatgcaatcgaaggcggacgataatggcgaaaaacatatgatactttgccgagttatattgggtaacgttgaaaaagttgaggcaagttcccaacaatattatccatctagttcagagttcgatactggggctgatgatcccacgaatcccaactggtatgtcgtatggtccaccaatattagcaggcacattcttccggattgtgttgtgagcttcaaatcttctgcaaacaaacaaggtatgataagcccccttgtttatttacgtatacattgttgccttaattactgtttactgaaacctgttttctgttcttatctctcagctgatctgggagggtttgcactaactaagtacacatttgctgaactgtttagtaagataaagtgttcccttcctccggtgaaagttcaggaatgtataactttgtacaattcactaaaggtaacagccttccagtttggtcaacgtgttgattcattatctttgatatgtaaatgtttgatctggaaatagcatagaaatatcaaacttagaatcgaaatattttttcgcccttgtttgtgccttattacaggatggaaaaatttcaaaagacattttcatcaagcagttccggttggttgctggagagaaggttctattatctgcaattagggagatttgtggctcagaatgaggttgatttgagatttaaatacgtccatcttagtatagccaatcaatattaaccaatgtaatgtcctcctactacgttagaactaggatttagatagaaagggctacagtaaactgaatagcaaaatttgtttcttccttggattctccatgctacaaaattgtggcaccaagttcattcttttagcgttcattttaaagtcaatggtctgagttggcatatccatacttagactatgttgaagggtataccggtacaatacaaggaatcgttttatgtacacagatatcaatatacacgatcatgtttcttattaaatttaatggtggctgccatattaatatcactatctgatctttgttttttcttcccttgcacaaggtccttagaatggatattatttgttggaactcgatatttgaagttccaacaaatgattttaaaaaacaacagtgttgtgtagtttgatatatgtatttactctcgtcttttgtggcacagaaaaaagaaaagaataaggaaaagcctggaatccctttctaattttgtataacatgagacctttccacatacttagccatgtatatcctagtcaacatacatcaattataggagaacaatttcttaacaacttacattgaaggaagcttttacattaacagatgctattctgggttgtaattgaaggtatttttgcatgattgcatcctaacctaacctaatcctatctttgtttaacaagtgaacattcctctaaaaagttgtgcttagtgctttagaaatcaaactagttgtccactattcatgctacttttacgtttgttttctatagatgccgtccctgctaggtgtgcactttatatcttgtgtgaatctcattcctaaaactttccctcagtttgattccgatgttcattttaaagaatgaactaggaaagtcagtgttatgagtcttcttaaggggaatctttttattatcctggacttgttatattcttatgctaggaattgaatatgtaaaatagatgctgtatatttgagtacattgtatcgctcttctatttcattactctgttttccctttttatcttatttttcgtcctcaacaatgacagagtttggtaggagtcctgtcctgtcatttatcgatgtgtatttattttgggttttgattttcatatcaatgctattctgtgtttaggtttcattatgttacattacatgcaattgtttcatttttctaatttttcttttgggcacccctcataccccatagtgctatgtctttgataaaaaagacattttaaaaatgctccttgtggttttgatagcttgatttcgctgatattacgttcatgtgcacaaaattcccaaccagctgctgcagctgatacttaaaactatatttatattctccggcccattagtgatgtgtaaataatggttccttttagaaattaaaattccatcaccaacaactataactactgaagtttctgctgctgctatgtacttttaactaccaatatatttcatgttatctattaatgtgtaaaagaaaatggcaataagatatatgcctatacatttaaatggtactctaaccgtgtttcacttaaggagaattaaaaattcttttggctcaataagtctttctttgcataaatcaagtgaatttcagtgttgaaaatcttacaaataaagttctttcggcattggcttacgttcaattgaaccgtgtaaaaaatcttctttgttatttacgatttttgcatttatgtttcttctcttacaagttgatagatctgattgcttacctgattcatcagaacttcaatgggtaaggagatcactaaactcttagtgaagattttatgtattacttgtgttggtatcatgcctctctttgctttgcagaaggtgactcaatcacatgtttcttcttgctcaaaaattggtgaactattacatcaaaggtaaaatttgaacttaactcgtcaattaattatgataaattgtccaattaaagtaattattcattgcatgaactatttaatggttatggtgaggattataccaaaattatatcattaggtcaatcttctatgaaagcttaggaaaattttcaaacttaatctagtttgaaggtaatattgatgttaaaatatttaagcttgtcatgttgagcaagaagatgaccaaccacagcctgcaaggaggatagagataggagcacatgtgatgttaaccctttgaaatcaagtggctgcccaaaagctggagatggccgcataatgaaatactgtttaggcccaaaaaaatagtaaatgccatgaaagccactctcatagctcaaggtcaccaagtagacccttatggggtgtttggtgtaagaacttcatttggtgggttttagttgagagagttaagattaagggaatatcaaactcaagtatttaaagcgtttgagattacaccaaaattatacttaaaaataggacttaatcataatccttccactaatatgatccaaacttaggtttgctttacattcccattcccaagatcttaaactcgtcttagaatcttaaaccccataacaaacactccattaacctttggcgatgtctagggaatgtttggttggtccctttgtggtgcccatcatacacaacaacacattttgcaggaatcatcgctcttggaggacaaatcataatgttgaagtatccatgttgatgtgaccataagaaggtggcaacatgccaaatatattgtgttagaaaaataattacaatacaataataaactaataacacctgaggcgtgcaaacaagatactgtctttaaggatttacaaagtaa

SEQ ID NO: 111681 - DNA, 2504 bp, Cannabis sativa
tggtgagtttactacttgttacgatacgtgcacttgcgtgtgcaaaatatcacaacacatctgcaaaagcaagatgattcaatttaagttcagcacatctatcatgaaaacagaagtcttccttgtccccaactttccccatcagtcttgacaaatattctattccaattacaaagagtaatggagatatagggtccccttgccttaagcctctcttagattcaaagaaaccatgtaaagttccattgaacataagagaaaacctaggtgttgtgatgcattgcataatcaatttaacaaattggacaggttattgtagcccatatagtattttttctataaattctcattcaactatgtcataggccttttggatatccaatttgatcaaacaccctggtttgttggatttcctaccataatgttaccagattttggcaaatcatgatgttgtgccctataaagctacctttaataaaacctccttgtaagttagagataatattaggtaacactaatttgattctagcactcaaaagcttagttgtaattttgtaaataacattgcaacaagtaattagtctaaaatctttgactgtgttaggacattttacctttagaacaagggtgatcacagttgagttgatttcttgaggatcttgccaaaacccaactccttgactcaaaaccacaaccaattccaatgtgctccacaaccaaattgttaattttccattaatgatacaaagttcatgaatttttcttatcaaagatatgcatttttcatctttaatatcatgtatttttttattgttaaagcatttttcacttagttctttattatgcaaaagtataatactatttgattaaatttctttcattaaattgtttatatctaattcttagaatataagtgttatattttgcctacacatagtttcttaaattttgtgtagtttcattaaattgtaacacatttaatacttagaaattatatcttatttaagtgaaaaaaaattctacctttttgaaaataacttgtgcttaaatagaaaatataatttgatttattttaactatatatgaacttgggaatcagtatacttataaatactattgaagttgcattttgtggaatctaatctcttaataatcttattttacacatcttatttaaaaattatttttcatactcactcatttttaatcttaaatctttttattaattgtctttcatatttcgaaatcaaaatctcaccaaatatttggaactaggttagaatattcttgctttatttgaaaaagtttattttgatgttagtcaactcctatgggttcaacctcgtacttacatgaacattatattctgaaatgattcgtgcacttgcgagtataagtattcaaacattcacttttgggtacaaacacaaactcactgctcacgcaggcactcttatgcaaaattcaaaaccatgtacggaagtgttataggtgatctacacaatacctaacaatgacaaggcttgatatagcctttgcaagagagtgctaaggtatcttgctggcactttggatgctggtctcttcttcaaaccagccaaagtatttgatctacaaggttttgctggtgcagactgggttgggtgtcatgatgacaagagatcaacatctggttattgcatctttctgggaggaaatttaatcagtcggtgttctaaaaagcaaattattattgcccgatcaagtaccgagtcagagtatcgagctttgaccctgacaacctctaaactcatctggattcaatctattctcactgaattaagcataatcacctctcattatccaatcttgtggtgtgaaaaatcttggtgcaggctcattagcctctaatccagtctttcgctcgcacaaagcatgttgaagttgacattcattctgtccaagacagaatccttactcaacaactgatgtttgatatgttgcctctgaatattaatacaaatcttttaacaaagccacttccaactaccacttatgacaagttaacacttggtctagagtctagactagtgttacttgaggggggatcttagactaactgaattagagtgttaattaaagttagttaaatgattagttagaattttgttaattggtctgttagtctattataaattattgttgacctgttattgtaattaattggcatataaatagattggctaagccgaacgtgcaaggttgagcttcatttccaccattaaccttcttcatcattttatttctctcagttgacttttctctttctatttttctaatagaactttaaaattcagagttctcacacaatatttaatccacgcaagtgtaaattttaaaattttttaatctaattcaatttgcacaagtgcaaatatttgcactttgtaaattggataaaaccgatttgattggattaagtattttatagggaaatttacatggtatattaatttttgttattt

SEQ ID NO: 111682 - DNA, 2790 bp, Cannabis sativa
gattaaaactcaattaaaaatatactaaatttactctaaattactctaaaattaatactaaaaataacctaacacataacaaaacatgacactctcttctggcatctcaccatccatgaaaattacacaactaaattaggtaagcacttggcccaaacaattgcaaactcctcttaaccaacgtcctctaacacaagcaccctcactaactggtggaaatctctctagggatttcatgtcccttcaaagataaaacactttacatacaaactttattttgatactctccccattgttgttaacctccaccaccataaaattactccttcccatatctgctctcgttgcggtactagtcttgaaaccatacagcatgctatgtttgaatgtaagggtgttaagaaggtctggtcaggtatgctctttaaaccacttttaaataatgcggatagtagaaatatctttgacacaataattcaggtcattggaaccatgttccaaggaatttagaaaacataatttgttaaaaggaaagctaaagtctaagcataaagttgaaatcctaaggtttaagccatagaaactagaacctcaaggaacttggaaacaagactaacttaacaaattaattcattcaaacgataaaaaaaaatacttgataagtttaaatattaaatatgtaaagcaaaaacagtcacaatatttacatataaaaggccctgcggtaagggcataaatattatctccgctaagataaaaagggggacccttgtcccccaaagtaaaagttcaatagaaaaataaactatgaagcagtaaaagagatagatttaaggttgagctgtcaagtggttgagttaggctagatgttagctgaagcctcacttgctggagcattctctaaagctggaagggaagattcttctaggtttgcatcatccagaagaacaatctcagaatcttcttcaatagcctcatcgtcaactttctctgcagcatcaaattctaggagttgttgaagaagattttctctttcatccccttcccacatgttcagaacacctttgttgatcttccaaagataaaacaaagcaaccactagagacttcattaaattttcctgatgctccacctcagattaagccaatttctcttccaaaagagcattctcctattcaagcttctcaacagcatccttagccttaccaacatcttccttggctttgtcaacatcttccttagcctttttctaagaatcgttaagagatttctctgctttgtcaagcttggctaagaaattagtttcaaaagccttcagtatttccaaagaatcttgtttagaaacctctgcttgttgttgaagctcttgatggtgtttcactttcttctccaagttaacaacaacaacaatcttgtcatttaacatctcagtctggtgattgtactcttgggaagcagtgtatagctttaactcgagctccttaaccgtcttctcagcttcaacgactttctcttctagaataggaatgcaagagttttcttgggtatgtaactccttatacaactctacacgatccctctccctcttggcatctgcattgtagccagagtagcgttaggagaagctttcactctttgcctgaccaaaacatccacatgagctttggcatcgttaaaggctttgattgcctccactcttctttggtctgagttggcactctcagccttcaagatctctatctcgtaagttaggttagtcacgagataagagcacctctcagccatcagacccacctaagaaaagattgcattaagtcaaatacaagtaaaaatttactgggagtcataattgaaataaaggttagtgaacctaccgcaacaatttggcttttgaggctatcttccatgaagactagatctccgctcaccattgtagcgcatttattagaacctaatatgcttcaagttgcaacattttggtccaataagtctagcacaaaaaggagcgagatccaaacctactctggatcggagccttttagcaaccacttgatgatcaaagattggaggaagtggttcattccatctggcaacattaggaaaatcagcactctgcctggtggaaagcacattagatgctttcttcatgacatcgtactccatgttgaatctttccatgaagaatttttcagttacctccatatgagcatgttcttcttccgatagggaggaaggatgaataggcagaatgacattggaaggaggaagaggtggaagactggtcttgtcccttggcaactgggcagagggagaagtgatttttttttttttatgatggaggctgagaactgacaacctccttgctgaagcgagtggtccacctatttggcctctcatttttctaaatgtctactcctctttgtctggaagactccaaaccttacttcctagtagtaaccgattgctgaagcttgtctgtagccttagctcttatttatttactgtctccacctagtttagagctacgacttttcctttgaggtaacacgggtccctcaccatcatcctcctcttcaccgtccacgataattggtctctattggagaggatctatcgcccatgtaatttcctttactcattcccgcgaagaatccactgcagccaaagaaatttggggacaaatagctaggggtgttcattggatcacatccaatggatttggacccaacctaactgatccaatctaattatttattagatattgaattttgtcatccgatccaatccaat

SEQ ID NO: 111683 - DNA, 3856 bp, Cannabis sativa
  modified_base (28)..(48): a, c, t, g, unknown or other
atctatattaataagtaaatatgattannnnnnnnnnnnnnnnnnnnngggcataaaacccaacagatagcttcttccggctatacagttgtatgccttcccgatattgaccatgctagatggaacctcgcctggacgagttgtttgctatttactcgaaaggacggatggtttataggtttggcccaatgatgccaattgggccaattattgggcatgaagtatctgagctatatttattatttagactccatgtgtttcttgccgaaaatacggattacatttaccccccacatgtgttgcggaggcttgcttcatactgcatggataaatacatagaggttaaagataaaacctttaggaattctatattaactttataggtggctgacaactttttaatttttgaattaggaagatttgtggcatcactccaatagttcgtgggattaacatttatcgaggaggtggatggagtaggattattaattcgatagctatttttttacattaaatgcttgatcgatggcattctcggattgttagatttattttatttttcttaaaaataaatctaagcccttgatctgtacatcacgcaaattgcttctctaaggtataaatcctgtgaaatgctattgttcatcacttttacccaaattcaaatttctttcaaacttacagagaagagttgcacaaagaactaagcgatttggagcatgatatcaattattccattcatcttctacttcgaatcagagctcgtgaatatctagacgcaccacccccaatgcttatttgtatccccgaggcaattataaacgctagatcttaactttgagattgattctttgatcgaccaagcttttgctatgcaaaaatggcttgatcgtcccgagtgcccatccttggcagacttcaatttgaagtcatcatttgacatcaacaactattctccgaggccgcacctccttgcaagcccaaaatctacaacatgtgattttcttctctttaacttcttgaatcttgataaatacttcaaattagtattccatttagggactgcatgtgctttatctattgtttgatgagtagaacttaggccttcgactagattttgactgtttggtagaaataggacattttgggtactactctggacagatttagtatctagtgaaaactagatttttcattcgctttttttttggaaaatctaccttccagcaaaaacgctagccaaatttttattcctttgtccggaacccttattgttccagatgtaagttttatcttcgttttgtatgactctcgtttttcccaatctaatcgtccaaagtgattactccttgagagtttcgattctagatgtaagattcaatggggacctctccaagcagtatgttagaattaatggtatgaaccatacttgagtaatattctaatttttcacatggtttgttgtttattgcttccataatactaatatttgtatgtttcattttgcaaaaaatctacttactctccaaatgtgcttagttgacaatttcttagggagtatcgccaaaaaatcgactgagaaattaggtgggcagaccacacgttcaagaagggaaatctaggacccccagccttcgcaacaaaaataatcaactgcttcttcctcccagatgtcgagatagaagactaatcttccacctcttgtgcctctgcgagtgattttacccattcgtccttctacaatgtccaaacaagagcgtgcccagctggacactattgataaatttttaagcagaaggttcgatacagaagttgttgatgtacggaagcaggccaccgtactttcaaccagaaaaggtgttgagttcgcagacttggcaaagagtccaaatcctctacttcccatctttgactgtccagctatagttgaaaggtttcaaccaagagtgggttctgatcttgccccatttgtggcggacgtctcagaccaaactgctacaactttcagcagattgggttttaagagatgtgctacagtggctagtggagacccagcttttatatctgattgcttgaagcaccagactttcggagtaaacaccttgactttatgtgataataatttcaacaatttttgcttgtatctgattatgtttaatattttctctttcagacaaatctattggttgagaggtattctactttagtgaacaagctgactcttgaggtggaggtcatgaaggctgagagggcttactctgagcaaaaaggataagaggttgtcaaggccctaaacgaagccaaggctcaaacagatgagttggttaggcaaagggtcgagttgactttgaacattgttgtagccacctacaagacagatgccaagaaggagaaggattgtgctgaaaagtacaaggagctatacaccaaggctaactctcgagcttttaatctagaagagaaggctaaagagttaagatgaaagttgaggcccttgagcaacaattgagcaaagcttcccaagattatgatcatcaaactcaagtacttgatgagaagataattctcatctctactttggagagacaggttcagaaccatcaggaacttcaaaagaaggcaaaagagtttgaagctggagctttgaagaagctaaaagacttagaagttgacttttatgtgaagctcgcgaaggtggagccggctctttaggaattcgaggagaaagttaaggtagatgttaagaagcttgaagaagagaaaacttaactggaagagaggttgactgagactgaggcgaaaaagatagaggccttgaagcattcgttagtggtcacactttacgagctttggaagattgacaacaaggtcttagacattctcagagagtagaaagagatgttcttaaagcagattttggaactagatgcatcaacaaaagctgttgaggatgctgaagaggatgatcctgaatccacccttccagacagtgcaaatctagtaaactcttggcctcaaatgaagatccggcttccaaagttccatcaaatgatccggcgaagcataattcctctactgaaccagatgatccagctaagccttgaatctacatttatttatgcttttgaacttgcttttagggggacaagggtccccctgtttatttttgtagagacaatctttttatgcccttgctgcagggcttttcatatgtaaatactagattgctttttatttacactattgtttaaatccattaagtattcgctaaaatttgaatgaatttttagatgctaagttagtttacttccaggttccctaaggttctagttccaaaggcctagaccttaagagttcaactttatatgcttagatttaaacttttttcacaaattgtttacttatagattccttgagatcccggcgccaacaacctagacccaaaaaatttcaacaacttactttaaaaaaatttacaagtattacttgcttccaaatatctgagattctggatctaaagttttgagacttaaggtttcagttttaaatttaaaacctgacttttatctggaagcctaaacctctttgattttgattaatctaggattaattatttttcgaaacctgaacttctaaaatttggccaacctggattggcttagtaaatatgttaactttaaaatatggtaagacagttgcttacttccaattccctgagactccaattccaggctacgctttttactcccatactccatgttaactcattttcataattttggatggagatgataacatgttactgttgggttttatgccctaaataaaattctatttcaatgtaatccagattatt

SEQ ID NO: 111684 - DNA, 2045 bp, Cannabis sativa
acaatctcaatagttcgggggaaacttttaacgaccaaaaaagttcagggggcacgatttagtacatttcaaagttctgggggaaaaattactaattagcctataaattattgggttcaacaatagagaatagaagatagattttattaggagtagtccgaaaaggtcctttaatatctaatgttcatatcagaatattataggaagattacacggatgaagaggtaaaagttgtcccttttggaattctcgataacaaaatctcgaggccagatggttacaacagttatttttctaagataattgagaattcataggaggaaaggtatgtcaagcgatcaaatcattccttaattctagtaagctttttaagaaaattaattcaactacattaactttgatccccaaaagtaagtgttctgtctctgtcatggattttagactgattacgtgttataatgttatttataagattgtcaccaaaattatttactcgaggatggtattgtcgaatatcattgcccaaaattaaaatagttttgttcaggggcgatatatagcctataatataatagtttgtcaggatttggtatgggaggggaaatgcaaagtcacaatgtatgatcaagttaaacttgaagaaagcatatgacacaattaatagaattgaattttatcgaggagatgttatatgcttttaaattcctaggggagtttactcgtttagtcatgatctgtgttcaaacaccgagatttagtatcatgtttaatggtacgttatatggatacttaaaagctaaatgagatttgagataagggaattcatgtgtctttattattatttgtgcttggaatggaatatctttctaaacaatgatgagaattggtatgaaaaaatatttcaaattccatgatagatgttagaagttccaactaaatcacatgtgctttgcaaatgatgttttactattctgtcatgagaatttcaagtctatatatacttactttaagggctgaaactttttttccaagcttcaggcttacaaccaagtgaagaaaagacatccatttattgttgcaacatgaaaaaagaagaggtacaaagggtgatacatgtgtcgcggttcaagagaagcaatcttccttttaagtacctataaattcctatttgtccaaagagaataccatctgttgaatgtcaggtgattattgaaaagatggttcaaaaaattcgtgtttagagttctaggaacctctcctatgtgggaagagcaacacttgttatttcagttcttatagccatccactcctattgggcacagataatgataattcccaagaaggtcttgcatagagttaattctatttgtaggaactactaatgtcaaggaatggtagatattaatggttcgagaagtgtgacttgggatgacatgtgcagatcaaagagtgaaggggggctgggatttagaaacattactaaatggaatgaggcaaccataggcaaatatgtatgggcagttgcaacgaaacaggacacactttgagttcgatgggttcatgcaatatacattaacacagaggattcaaagccccaagtacaagcagttggtattagaaacaggttgtcaaagtaaaagaggaatacaagctacttaatatggtccattcattcgtataaaatcaaagatgggtactctcattttctcaactcatctaaaagtctattggtgtaaggaagtgtggaatataatttcaatgccgaagcatagatttattttatggctatcagtgctggacaaattacaagtaaaagagagattgcttcgctttaacatagttcaagatgatcaatgcttgttgtgtggtatgagcaaagaaacaagagaccacttgttctttgaatgtcaattgagtgatcttggttaaactaatataaaagaatagttgggatgaaaaaattcagccgacctctattgtaataccctggaattaggaaatggattagcaaaatcctaactagataattatgtataattgaggaa

SEQ ID NO: 111685 - DNA, 4821 bp, Cannabis sativa
aatcttaaaaagaccaaaatcttaaataaaactagcaatacgtggctcggcacgtacattcacctagtattatataaaatacatgaattgcttctctcattattaatggattttgaatttaaatgtgcatattgaatattaaattgctatttgaaatcttataagaataataataagaataatgtgaaactaacaacaaagtttatgatattttttttaaaaaaataaaaagtttatggttggattgatatattaaattaccccaccaatcactatacttatgttgaagtttaattatccattttctttattcttaaagcaaaaaaaaaattatagtttgtcgtttaaaggctgtctttattctccagctaggcctattagcctttttggggcttaggggtggattggtcagggttgtattttgctattttcatttgatttttgcttgttgcgattagttttctctttatgatatgattttgagtgttttactcttatctttgtgatataattttgagtattttagtcacatagttttaagtattttagtcttgtttgtgtgacatgattttaattattttagtcttatctatgtaacatgattttattttattttgtttctttgtttgttgtttttttttttcaatagcttaccattaaattattgttagtggttggaaataactaattttttgtgaatgaggggttattggtagtgcagttacataccttgcacaattgttaagtactcaagctacaaggttaaacctgctaaaagttaagtgtgatgctgcaatctttttcatctgattttattttaattttttgtgaaacgatttgaaaataagaccactgattatttaattagtttttcaaattctaatctcagtaatgtttccaacaatagaaatgtcagattgaattgtaagctattattttaactaattgttattaatgaaatttcataatttattcaaataataataataatatggataatgtactactttttttctctaaaaaaatatattcatattttataacaaaataaatttaacatgcttttattatggctgaaaattttcgaagttagttcttagcaataaataaattggctagagaataattaaacactctttaattctctatcgatctgaaagtatatgcctagcctagccctaaatttaataaaataagctagtgtacgagttgtttgatgaaactttaatttaatgacttttaatttcttttttttattattattttgaaatggttctaatttcttaatttagtgtactaaaattaacgattaagcaactccaatgattatcttttagttttaaatttactttttattataatattaaaagataatatcattataaaatcttttgatattatatttcttaaaattaatttcatcctacacctattcaaactgttattataatttcttttattttttaaatttagtgtgattttgttttttatttatactaccattctctcaccatataaaaaaattaaaaaaaaaatgaaaggcaactcttactcaactttaaatgacaatgatgatgattatgatagtaatgctcgtttgatttgctggatttgttggtctatgtttagtataattttgggtttgacattgtttttctatggcttggcggttccaatgccaagattacccgaaatcttaattgaagaaatatccacaatcattggcatagataattcgagtatagttgcaaatgtggatatagcttttgccataaaaaaccaagcaaagagtgtgattatcatcgaccaactcactatgtcattgtcagcagattcaaaaacaacaaactctttaatgtctttagaactcgatagaggggaaagtagaaccacttggttaagggtaaaaaacacaacattaaagacctatacatggccatatgtcacacctcgatatattcgagagatagatgttgttttacaaaaaccaccaccactagggtttttgtacgttgactttttgttgacttgtgatcttagatatagtgatgaaaagatcccgaaagagatgagatcaattagtggtgtgaaatttgagtgtggaattttgaatataccattgtcattgaattacaaacaaacttataagcctaattacaaccaaaaaaatggattagggctttgcttggttcttgataatcaagattggagaaatattgaaagtaactttatattccaaaagaacttaatttgttgtttaggcatggttatacttttaccgtttgtatatttcttgaaagagttcttgtttcccttatttagaactattcagtacttataactttttgggattgtaatagtactgtacgaatctatcatatatttaagattttatgttataagattttatattaaagattaataaaataaggtataagaaaaagttcttaaatcttttttcttcttctttcgagttttcaaatccaataaattgttataaaaggagatggcaccaactaaacttgatgagaaatttaacaacttgaagctagctcaagtggccataggtgtatgagagggtgcgcgtgtgtatggggattttggaatcgaaactcaagttgtgcaatataatgtatatataaatatttcaataataaataaaaaaacttgatgagaaatttagaagggcaccaaattgccaccaattatggcccaccaagccctacaaggcacaatattagccaccgagtatggcacaaaacagccatagaatatgacacataaaaaacctaaaaggcacaaaaaaggcccccaaatatgacacgtaaaaacctaaaagcacaaaaatagccaccaaagatgacacaaaagcctttagaaaacacataacatagccatagcaaaattgtgagtaacaaaaccattatatcatagattatctataccaaaacataaactctataaaactaaagtaggaattcaaacaaaagagttgaaatgcacgtaagatgtctaattcctgattttttgacaggagtttggccatacaaatgattgacggaagagagcttggccattaaatgtcgctaacggtaaacaacaggaagttttaccatcaacaaataactcaacgaaaatggtgaagaactttgattttttatgtattgaaaagaatagaattttgataaacataaaaataagaaagtaacacaaaaatggctatagtggtgcatattgaaaccctacttgatgacctaatgcatatgaacgacaaagacatatgagtgaaaacgacaataaacccaatatgggaaaataagaaatatttatagatgagacaaaacaacaaatgaataacgacaatgaagagggaacaccaacaaaatttaagcaaccagacaacaaatcaaccaaagacctaaaaacaaagcagactcactaaatcttaatagtaacttactaactgggttacatcctaaaagcctaaactataacataatgtaatctctcacctaagaagagaacataatagtccttcctgccctgatgaaatgaatcaaacaagcttctcaaattaaacaaatgaagaatatagatacctaataatagtaacataggactaaaagacacaagttaacaaatgattaaccaaagacaaccccctcaaactcggttactgtacttagaaaacttagcatatatttaatactatgtaaaaagatcaaccacaaaatcccaattgaactcaagtaacaaactttagaaaccaaataatgtaatttcaacaacaaagttcacctattcaatgttgagttgttttttctccctaaaaaaattcttattacaatcttcctcatatctctaatccaatgatttgcatcagcaactcataaaaatggaaattaagtctcatccaataatgaattctacaaagtctaaacaaaatcaatgaatccacaaatctaaaaaaaaattagccacttttctcagtttattatttattggcactgaacaataaaattacaagggcagaaaaatcatataccagacttgatgatcttcctcctagccaagaacctagcaatcggtggtgtaagcgcgaccgttatcggcactcgaatggggaacaatgccttgttacaaagcacagccaatgcaagagcaccaccactcgaagccgccagttccgccgtccgattcctcgtcgtcttttctttctctacaatcaccgtcgttgatgtcccgtttacattatcttcgagtacaaatttctcatcggatggattcgattcgacctggtctttggatgaaacgccgcccatgtgtaatttatcgagaagtgattcgacgtcgacgttgttgtttatggcgacatagagaccggaaatggaggcggcggatacagaaaagtgtactcccattgctaccttgccgtatttctttaaaagctcacggaatcgtcctccggtgaagaaagccatgggtgtcgagctttgatttggagatggttgaaggttgaagagggtttgatgaaaaagctagggttttgtctccatagtaatatttttcaagggttttgacccacctgaaattttggtctcagaagaagaatctggaattggaactgaggattacagttgatacttctcgaatttgggttttgctttggaaatttgagctccttttgggctactatgggccttgttgggttgggcctagtggactcatagttccatccttctaatagggataagttgaaaaatatctttttttgttggagtaagttaaaaaataccactcaattaatcaaatttacctcta

SEQ ID NO: 111686 - DNA, 3648 bp, Cannabis sativa
agcaaagaactatccaatcaacccaagttttaataaaaccaataaaagttaatgtaagcccaaataaaaagtctaacatatatcccatacaaaactttacaatttcataattccaatataaatcaaaactatagaagaaaactatatttcatgtaaattcttcatattctaaaccagataatcaaaatccttaattctgtgtataaaaatgataacaaatattataacatagcaaggaaaaaaattacaatgcctagggactaaaggagtaatctgacaaaatgttagtaagaatgtttattacactttaaattgctacaaatatacataatttaattataatatcaaactacaagcatgatgagtatcatcattctttctagtgtcatttaccccataactttcacttcaaactttgtcctaatccgtttaaagaaggaaatcactttgttgtcttgtgccccattctgtagaactttcttcagcctttgggtgatgccaagttatatcatcaaccaattcaaagaaggagttcacaaaatttatccatagtcatttttactttctcccttcttttccatgccacaattgtaatctcaaaggtcataaatctagaaatgaaccagagaccattgtagaaaatcagggtaagttataaatcataatcagttgaaggctgagtcttttaaacttgggaagaatatgttaaagcaggattgatgttttccattgcatttgacttaaacagaaaattcaccttcatatttctcataattgaaatgtgagtgatgatgatattatctagaagaatgatccttttgttgcatctctctccttagcaaatcgaattccgatttactctcccatggttataaaaccaattaatcaaaaaattatatgcagagtcagtctgcacaaattctcccactactattttcagtaacatgtcatatgcctcctccgtgacacctgctctagccagtccattgatgaagatagcaaaggaaacagcatcgggacgaatccctctgttttgcatctcataccacagattccaagccccgttcaggttccctgtccttaagtacccatctaaaagcactaggaaagcaagcttgttaataggaaaccccttttctgtcatgttacataaaagatctttcgcttcatttaagcaacccttcttgcacaaacccaatagcaaataaccacatgtggaagatgatggagttaaaccaaatctactcataatcaaataagcctcataggctttttcttccaaccctgccttactataagctgctataatagagttaaaagcaacaacactgagaggaaatcctttctcaagcatattttccacagatttcatggcttcatccgaccgtcctgcccaacataaacctgcaatcgaaacatcaaacaaagaactaaccggaaacacctctggtacagttaaatccctcaacaacatgtctccaatattctcccttccatacttgtagtgacctgcaatcaagatgttaaatgtcatgccatcgggattaatacctttgttcttcatctcctcataaagcttgtctgcctcaccggtatcccctgacttaacatacccatcgatcatgatattgtatgttaccgtatttggaaaaatacccacattaaggattccatcaaagaaacttctggctttcaccatgtctccctccttgcacatggcattgataactgtattaaaggtaacaacacttggctcgcatccatttgaaatcataaaatgcatccattcaagtgcatttgaaatctgccccatcatacaattcgcattgattacaatgttgtatccaaaaacatcaggctcacaaccaaatttcctcatcacatgtaacaagctctcaccagttgagagcaacccttttcgacagaacccgagaatcatcatattaaacgtatgagccgaaatgggaggccctttactaacaatatccctgaaaagcttccacacactaccataatcaccaactctaatcaataacttaaacagaattctagcagctgatgaacttggactcactcctacttccctcattttactcacaatctgcaaagcctcgtagcccatttcagcattcaagaagcctcgcataagggtattcaaaactgaaaaatgtgactcgtatctatagtgattttcccacatgaactcaaccaaatatctactcctaacagctccaattctctcaattacataagaaaccatgtcctgggccaaaaattggagatcctctgccgcgaaaaaaagtgcggcgaggccacaagacctcaagacactatcagaatggtctctaaaagaaaatttaaagaaagcaaaggccgtgtctcgagtttccaacattttcattatatttacaatagaacatgggcaaaactctctagagaagtcctcaagtatgtgaattttctgggttttgactattttcgacaacccaacagcgatttttcgccgttcgttcgggtttatgccattcaaagaatcctcggatatgggaaaatcaaaaggcaaaaactggttcagaaaatcaaaattcttcgaatgccttacaagtaaagttttaagggtttggggtcgtacctcgactgtgctgagaatacggcgcacgttagcgggcatcggccggtttgccggagattgtagccagtaccggtggagaagcgagttctttgtctggggttctagcggggtttagggagtgagaataataaacgttctgtgtgtgttgaaaaacctcgataatggaggcccaataattcagcatattgtggcccaatgtcatttaaacaattatattgtcgtttatttgtttttgactccttaaatttcgttgtcgtttataaaagccctgttgtttgaacctttcaggcctttttctttcaattaatatcgtttttttttacccggtgatcaaaatcacacatgattaaacaaagcatcaatccacaatcggtggagacatctcctcaaaccaggatagctcatcgtctaaccgaaggacatgctttgccaaaccatttgctgcagaattcttatcccgagccacatgcgacaaagctgcccccagaaatttagacaatcaagctatgtcttcaaaataacaccacatcacattgaaaaaatacctccccattattaataattgtctccagagctagcgaaactgaaaaaacaatgcaacaccaaaccaaaaatacagttatattagaatgacaatcttcaaaataaaaataaatatacaaactaagaaattaacacgcaactcataacactagctcaacattactaaaaaataaaaaacaacaaattactaagaataactagccaaaggtattaccctttggctagtaacaatatactaacacccaaatataaattgttgaaaattaaaataaaaaaattatatataaaattaatgttatgagtaaaatccctgttattgtaggccctccacaaaataacgtgcaaaaaacaaaaaataaaccctattaccacacaatatagtgaaaaaagataatgtgaaagaacaatgataaatcaatccatattaaatataaggacataaaattgaaatacttatctgtttaaagtgaaaa

SEQ ID NO: 111687 - DNA, 5529 bp, Cannabis sativa
tatatatatatataataagaaaataagtggccaatttgcttatcttattatggtcaccacaaaatacccataacaagatacttcaacttgaggtcctctattaaatgaaaccaacggggagagagaattagcaccaagaattgtgccaattatttgtgattggttattcttaattaaaaatcaattaattcttaccatatgtaaattaatttctgttaatgtttctaacaatattataaaaagaaaaagaaggaaaaaaaaattaaattaaacaaacgtagtggtccaaaatatgtaggttgttacataacacacaaaaatagagagaaatattttctattaaaataaacacatgcaataccttcatcaaataatgtacgtaaatttcttataataaattataatacatatgtatgtgtatacagtttattacatggacaatttaggttaccatttttttaattattcattttcaattttgaaaaagacaaattaccattttgtaatttttgtaattcatgtatgtgtagagatcatcatctctagttggctcctccaattttcttacacgagatttgccaatctctctctatttataaattgcatcttacccatcacagcttcaaattccatttcttttcttctttttgtattttttatatttaattaataatataagtggaataaccaagaaagaagatagaaaagagagagagagagggagagagaaactatgagcacgtcgtctgttgtcattacaaatattcctcttcatagatcttagtttccacaactttctcatctgggtcctcctctaatggtagttttttccttcctttgattctccaaagttttctctttgatcgatctctatctagattttaatgggtctgtctgatccacaaaaaaaaagaaaatttggctggttttgttaggaaatctgggtcttgttctgattggtgcacagaggatccgatgttcctagattgaatttgaacaaatcccacttcgttttttaatcggagcaccactgggttctgtctaaattttaagaaggtaatagattgtttgctcgattgatattatccacattttgattgttttgctttgcttgttatgatcaaaagcttgagtcttttatctgcgaagtattttgtttgatgattgcccacgtaattctgcaatctagattggttctgcagctgggaaaattctatccttctttgaattcttttgattgaattgtctactgtttttgttttgttttgttccaattgaattgaattatagttttctgtgaggcgtttttagtattggaatggaattggatcattgaatctcaatggttgatttcagaaagatggaatcagatcttggcaagctcttcattggtgggatttcatgggacacagatgaagaacgacttaaggaatattttgggaattatggtgaggtagtggaagctgtgatcatgagagatcgggctacaggtcgagctcggggctttggttttgttgtttttgcagatcctggtgttgcagaaagagttattatggataagcacataattgatggacgtacggttagtacattcattttaatcctatgccgggtactatgtattgattggattcatgtgaatttgattagaggttttagtttgaagtattaaaaaatgactagaagttatgttgttcagagatagacgatcttgtcaaatttaattcttagctaacaaatttttcttctctttctccagttttgaatcaatgaatttgaaacttaatgcagcatcagctgtttagaatctgcattggaaaaaaagactaaaacacttgctggttactgaaattaaagatgaagtcaattgtttaattcagttactactgtttccaatttaggttgaggcaaagaaagctgttcctaaggatgatcaacatattttgaacagaaatgttggcggaattcactgctctcccggtcctggtcgcacaagaaagatctttgttggaggtttggcttcaactgtcacagagagcgactttaagaagtattttgatcaatttggtatgattactgatgttgtagtcatgtatgatcacaacacccaaaggccaagaggttttggctttatcacttatgactcagaggaagctgttgacagagtgctgcataaaacgtttcatgaactcaatggcaaaatggttgaggtcaagagggcagttcccaaagagctttccccaggacctagccggagtcctctgataggatacaactatagtttgggtagggcaaatagcttcctaagcagttatgctcagggttataatcttagcccggttggaggttttggggtcaggatggatgacagatttagtccaatttctagcggtcgaagtgggttttctccatttagcaattctggttatggaatgggtatgaatttagagccagggttgagcccaagctatggtgcaacttccaactttaacaacagtcttggttatgcacggatgctaagcccatactacactggcaattcaaataggtacaatacccctattgggtataatgcgagtaatggcaggagtaactctgttataagctccgctgctcgaaatgtttggggaaatgggagcattaccaatgcgaccaaccctggtagcccaggggcttacctgagctctggaaatgggagttttggtgtttcatttggaaatagtggagcaaattggggacctgctcctgtttctactcaaggtggtggtagtggttctggttatagtggcaatagttacgggaatggagatagtagctttggattcggagaggggggttacggaagaaatggtagcacaggtgtgaccacaacgtcatcatacccaacatcaactgttggttatgagaggtcctacggggatctgtatcgtagtggttcagtttatggcgactcaacttggcgctccaccactcctgacctggatggttctagcacgtttggttatgggcttggcaacataacttcagatgttgcagccaagagttctgaggattatattgggagctacaatgtcactagtaggcagacaaatagaggtaaactcttttattttggtcttgttcttgattgtgtggttttattagtaaaagatggcaataacagaaacaagaatcccaaatttgaatataatcatttactgactggaaatgcattgtgtagtcataccaggttgtgtggctttcctaaaaagttagaatctgtcatcccttattgttcctaattcgtgacaatgaactatcatacaaatttagctattttatgagtttagggaaaagtttatcacgggtatatatgtaaagacctataacagtttcaaactggagctagataaaattattggtttacgtttttctaacttcatgtcgacctaaacttatctgtcttatccgattattaaaaactttcttcaactgtcgacatgggatgattatgcagagaaaatgctgtgtgtttacatttgtcaattcttctacattgtaaattctgatgttaaccacaatacaatgctatctcatggtatctcacttcttttgttttgttgtttgatacatatgtatatatttctttttcaggaactgctacataggagaattgttgtttggatacatggtgaggtgatagtaggtgcagagaaacaaaactgaagcttgtgaatttatacgtctctcttattaagatattcagcttatgaggaaactgatatagttctaacagggattccttgattcgaagtatacatattcagagtgaatgcagttacaagggattttgtgtaaggtttggtattttttttaataactttattgctcaagtttaggttcgtttctttaaattcgattgaggtgtaaaatcagattgcggaatatatactcaggaagttgcatgcctctccaggacaagccagccttagtctgttgaaaaagaaaaaaaaaagagataggatgttaatttctttttttttttaatttttttttttactttttaatgccttgcaaagttgctggcttctccccatatttcttctgggattttttctctcaaattgtatgtgaggtttttgatgttgctagtgtgaaacaatggaaggatgcccatatgggatccccatcaaataagttactaaaacactttgattctttttttttctctttcaatattatcattattggacagttatattaaacaagtttatacttcatttggtgtgaaactattgtttccatatgacactttcttctaattgatactttacattagcttgcctctcctcctcattgactaaatagtaggctgatttctcatactatacttttgatggagtcaactggagtacctgtttttcaccaaatccaaacttgtgtctcttgtgagttttcttctgctaatatattttctgcttctaaattctgatctgtagggctcttctgtgtggtcacattggctcttatcctttgtttagtaagattaggatacacattgttttggtttttgtccttttcatttaatgtatgtggtcctctctctctctctctctctcttcatacaagggtcagacaggaaatatggggttacgatggaatgttctttatattaagaaatttgttaatgagtgcatatcaactcaagaaatattggaataaatttgccacgcgcacttggtccatttcagaaatagtttaacaggaaaacaagtataggtaccatactgcttaataagatgatataggaaccagacattgcatgcatgtatatatgtatttgtgtatgaatttacacaaaccatgttacttataagatttgggttgatattttatggacctctttatcgtcatctgttacagataaataaatatagaatgagattaagtagtgaaataagccttctttatgagtaattagtttagtaccatgcgaggcgctcaatgttggggccagctgagcagagcaccgaattgtttttctttttttttttttttcttttttaaaaatagaattttcaccctttttaaaatatgttattgtgggtcctatcctatgcacatcattcaaggacttcatgccattttcacagtcgctgccaggtaaaaaggaaaacattttccttaatttatgcaagaaaatgtcgcatatatatatatggtttttttttaaaaaaaaattagtgttttatagatagaaaaactaaaagttagattttatggttattacaatttataaagtctaatataaaagagagatgaatcatgtgggtaatattattagtagatttccatttaattatattataagttgtaaaattacaaactcgaagaataaacgaaaaattacagcttaacataaaagtagaaaaatgtttacaataatccacatagttattaattctctaactagaataggatccttttagagtcttgatatttgtctcggagtcactcccaatcatcacaaaagggtgttgaaacgaaacg

SEQ ID NO: 111688 - DNA, 2247 bp, Cannabis sativa
tttttttaaacatactgattttttttttgcagcatgtctacgtttggggctctaggctctcagagagctcctgatgaatttgggaaagaggtcaatattgggtcgcattagcctcgctctatgtcattgacagaggttcaggcgtctaatagccaccaagatcctatttctctttttaagatcgagaatgtcagttcaggagacttaagataccattcttccgatgatgatgataacgctgttcaccatgttagaggttatggtgccatttttcgggcaaatgtcttaggagatgttgataataaagaggagattatttattatttatttgatgactcaacacaacaattgtgacccaaataaatttctaacaaaatgcaagatcttctaaaattttgttcttcattatttttcttttttggtcatggggcttattgaatgaagcaaccacctaaaaatcttctattctatctacacccccaatcctcttccaatctattgagaatagggaatttgacaaataaaataagaattaagagtaaaacagtttctgttcaaagtgtgctccgcacaagtaaataatattattaaatttaacattatataatttcaaattatctaaaataaaattcctattttttttagaaagcatacttgaagcaaaaatcaatataattgacctcatccaatcattttattatccatgtgcagcattttataagaaaattgtctaatgtcatatataatcacaatgaagaattgaatgtggaattcaaactgtgaaaaaaaaggattctctacgccacgatgttcagagaaacgtatggttactataagtggaatagaaattcaataatggtttcttttagtttttttagttattttatctttctagaattctttcactataattttcaatactacatatttctttttatttttgcaaacttcatattgtttctttaaattaacaaaacttaaaagaaaaagatttttttattttttaaaaaaaaaaaaccatcaacatgttgcacattataacttcacactattcttgcttaattttttatatgttttaccaacatttagagtttaatctttatttcttaaatctttacacaacatatattttgctgcaatcattcatttcaagtgaagttgtttccaattttctaaatgcatgttccatgaaggctataatttgaacttgtaattgagtagtggccagcttttataagtggattcattttgtttaccactatacatgtattggggaatgttaagtatgtcaatgaattatatccacaattagtgatttttgttgaatgatatttccgctgaaaatcatatcaaactagaaccaaaacaacaataaaactatgtcacacgatgaaatgttgaggtactttagcaaagccataggcaaaattaatgggtaatatttttttaatttttttcaccactacataagtacaagcatttattcataaaattcacgccttatgttgaaaaaaaagaaaattaagttaaaattctgacactcaaaatgtgtttggatccggtagagtgttatccgagaaaactaatgtggcatttgagatgcttcattaaatcaaaaaatacatcaattgagatgaagtgtggatggaactattggatgctataatgattagtgtattaacactatgaaatggagttatatttcaactttaattaatgtttagaatttgttatttttagggttcaattcgtgtttgttaatgttattaatgggactaataatcaggtcaaagtctttcttgataagggtttgagggcaagggtgtcccctgtcaccctaatagtgtctttcttatttgtgtaaaaaaagattgtaaagacggttggtgggggcagaaaatgatatgaagttgactgaattttcatgtgattggagtccaagagtcacccacttgctcttcgttgttgatagtgtggtcttttgcattagattgttgggatttaaactcatagatttagtaatttaactactttttttttctcaaaacgggggctgagcagtgggcgcttaaggcggccgcctcactcgtctcaccttaaggccggtcttggtcttttgtaattcttttagggaaatttgattttctatacttaaaaatgttcatttttttttaaagcaatatattttacactacaaaaaatatgacacttttttcaaaactccaaaaataccccctctatctactt

SEQ ID NO: 111689 - DNA, 1647 bp, Cannabis sativa
aatacttgtaatactgtttcattcattcaattcaataacacaattcattttcactctgttttactcctaatattaattgagttagaaatttatagtatgatgtacaaaataaatataatctagcaactataaaagtagtgtcggaattgcatgatttcattgtcaattataatttaaaataaattttaacaaagtctagtttttatatataaacatgtagtttctggccttggatcatctctgtaatagaaatccacactgtgtaagagaacacacaccaaattatcttggattcattaatctttatactcaatatagtgatcaacacagattgatccccatttgacaaataatattttagttttatcacttgtttaaaatacttaataagaaaatacataatgcattattttttattaatccaaaccatagaacattctattttaatgaaacgaaatcgaaggatcttcaaaaataaaataaaaaaagtaagcactactgttaaacactacaacaacaaaaaataatgtgaatataagattatatcagttaaattatttacttgttcatgtatttcttttgtcatcaatgttaattatgtcttgtaatttatgataaaaattaaggaaatgacaaagcatagaagaaaaaaaagaaaagtttcaatcatccctttctaatttatctcatgaatttcaccaaacataaaaagtaaacacataaatggtgaggcaaataaaaaaactttattttcttccatgccataattacaaattaggaatcatcatatataaagcaacgaaaattaagaacttaaataattattttgtaaaggagaagcaaatcacgtcatatttggagcaaggagggaaataaggaagcttttacaaaaactttgctatgtttgactatggtacctagtagctaccaatgacatcaaccatcaaattaactatgggatgacacattgaggtttgctaaggttgacaccctgccatcattaaataactatatacatgaaaaaattaactatgtatattaagggctgaaaaactttcaatcaagccaaataacacatttagacattttttttttctctgttacaataaatttatgctctgcctcatcatggagctataagattgaatttttttatctttttatttaacattaatttagcttctatatttatttgagcaacaacaacaaagcacaaaataaaaatgagtagatttcaactttttttgcaaacacaattgaccaaattaaaccactaaacatcaacaatgacaaaaccaataattattagaagaatgaaaacccattacctttctctttctcactttatgcatatgatctgcctttaatattttataatatcatatttctgacttgatattttgttcaagtttcattatcaaataatttcttatttagtttcttctcctaaacaaaattttaaagtccatatcaattataaatagtaagatttttttcccgaaattgtattaaaatatacacatattctatgaatattaatctatttcggaacttttagcaataagaagatgaagagatcaaaatgtgtttcattgaaaattgaatgaaatgaatgttagagattttataacaatggaagaaaatcaa

SEQ ID NO: 111690 - DNA, 12201 bp, Cannabis sativa
aataaataaatgtaatgtatttggcccctccacgtgtctatatttatgagttaataacggaagtggtagtaacgatgtaagagaattgtaacattagctatttaagcattaggtatttaagtgtataaaatgagaaacaaacattagatatttatactgcaatttatccaagattctaatatgacttgtaattagttctcctaaaattgataagtgagtggtctcaatgatataataatttaaacaaattaactcttacaaaaatatctttccacgcgggaagttagcgcgtgtatcttcacggtgttacgtaaacgccttgtattaataaataaattaaaaagttgaaatgcgcgtgagataagagaaaggtaatagatattttgatgtcatgtatgattggggaaaactagagatgaatccgtgaattacggatccaggtggggccagctgggagtttttaatagtaagagtttttgggtctgttaaaatcggtggtgaaaaacacgcccacgtggccgactgttcatctccctatttttattatattatttattttctctaattattattattttttcgaaaaatagttattaatattattaatattcggctggttcctcttttcgtactcttcctcagacatccactgtcaataaaatcatcttttattttaactgaccaatttgcccccatcaattctcaattttattatgattcacattaaaaattaaattctcaattattatcattatttattttattgaaaaaacattaaaaaaataaaaataatgtatctaataataataaagagtatatcaggttgccctctacacactacccaatctaaaattcaaaaaataaataaaaatgacaagaagacttgcctttgacaataagacttttcatttttgttcttcacatttatgtcataaatcttatttatgtatatttcaagccactaaaaatataaaaataattatgcttcatatatattaaatgtttaaagaatgtttgagaagcaaaatattacccatattatatttttaacttaagtattgaaattaatatgtccatcttgagtcaatccaattatataaccaaaattttaaaacattttttacatttatattaaataaaaaccacaactcatctaattttttaatatacatatttttcttcaatcaatactatttataaaaaaaaaattaaaatgattatagtttgctttgacaaattggccagttattaaatttgatttttgattaatttgatttgacaatccatccaatttaatctaaattgattatatatatttgttatgaatatttaagattaataaggttgatttaaatcctatattatggcatttacgtttgattttaaagaaatatttacttttttacttcttataatagttctaatgtgaattattgaagaaacgtgtaccctaatatttgactttttgaataatggtctaccacattagaagtaaaaaaaaaaaagtcaaaactgatgtcacaactatcaattttcaaacttaaaaaagacataaagagaatccaatctatataattgtttttctaatttcattattaaaaaaaatagaaaagaaaaagaaagcattatagatcattttgtatctagtcggccaaggaaaaaaacaaaacaaaagctaagtaagaaggcaatgacataataaagtaaactccatcatttgaaaatctaaaagaatgatgtgatagctaatatacacatcttaccttacttataattaaagtggcaactaacaaaaataaattaaatacaattgttatttttatagtaaaaaaaataattaaaatagctttaagataataatttattagtatattggtggtaatcctctaaagattatcaatttaccatttgggttggtctcacaaaaaatagaaattagactactattgatgttcaaactcaaatatatatatgtcatttattatgaaaagaaaaactcaaatatgggatgaattcaattttgatatatttataatgattggaaaaggtgtaccaattttgtttatgatacttatatttaggtcaaattttctcttttgatcctaatatactcagatactacgtgtcactttgttagtgaaagaaaaagatttttctttatattgaaaagctagctcaccaacttttattatactatgtaattaaacttatatgtctctatttaagtgagagttattcattattaaaaaaaggaattatttgttagttaaaggaattattttttttatatgtttctttattttagaaagaagactagagtcttcactcttcacacataactaattaaaccatgattaattctataattaattgcttaatgtgttagtggctattgttaattgttcaaagtggctaattttattgtaaaataatttaaaatctttagctaaagaatgtatgagatgacacccatttatattttattccaatttaacaatttaaaatggctaataaaattatcgttgaagatcttgtgttttttggtagaactgttgtaaaagaatttgaaaccaattacataattctttgaatatatttaattgcatagtggataacacataattagtgtttatgcctaatgagtcacactcctagatggattagaacaagtttctaaatagtttttatttaatcagaagaaattaacttatagttagttggcttatcttgttgggatcacatcaacgtaacacatattcatataataacatataatataacattatgttataattttttttatttaaatatgatttgatctataataaatatatatttattccatatctatacctaaccgcgtgattgtgctgtataaattaaagtaatttgcggtcaaactccttaaattttaaagtttggcacgattaatccctaagctgaaataattagggttaaattcctaaacttccactatcgttttgctttgtactccttccgtccactttagtatgttaagtgtcaaagtagactgccaatgtatatacaagtgtagacgtgccgaaattttattttggttcacctaatattaatatttaaatattataaaaattattttagaacttaaattcaaaattaaaaaaaaaagaaaaaaattaaaatatttttttctcttttatttttttccttcttcttcttcttctttctttttccttacccaaaaaccttcttcttcccaccaccaccatcataacacaaccactgaaaccaccacccactatcacttcaaattgtcaaccttcttcttcttcttcaatctatcaacaccaccatctacaaccaccgaaaccaccaccaccattgccgaaacattttctcagatcacaaaccccaaaaaataaaaaaaataaaaatccacaaaccctgcaaattgatttcagatttaaaatcacaaatatcacaaacaaaaatacaaaattgatcgagaaaaaaataaataaacatcaggcttggcgttgggattcatgagggggaatgtacctttgggttctatgagttctcaggttatgttgcctaaggtggcggtggtggtgaagctgtgacagcgagagcatcgagagggagaaagggaagctgggttcgagatttcgaggttttaggtttagagaaaagggattgaaggtccacctgagatttttgattttttaaattctaaaataatttttataatatttatattattaatattaggttgattaaaaaaaattggctacatgtatacttgtgtacattgtgacaactcactttagtacttaactgaccaaataagatggaatgagtataaagaacgattgtgaaggttaaatagtttagtcctaattatatcagtttaggaggttgatcgtgccaaactttaaaatttagagagtttgactgcaaattaccttataaatattataattttaacattttaaaattttatatatttgtttacaattttatatatttaaaacaaagacaaaattaaaaataaaaaaaattatctttataattttatatatatatatatttataaaaatcaaggcctttgtaaaaataaatagccaattaaactttttaatgaattataagttataattttagtttttagaaatatatctcaaatactaaatatattatattttttttaattttatttagtggaagtgtggtggagtggactagtgggaagaataagttcaagaacaaaagaagccatttttttttaaaaaataattattatataaataataaagtttgttcatacatctaatttttaaaatttaaaactaactaaaaactgttaattgaaagctaaaattataagtttgttccaattttatactttttcaaaaataaaacgaagaataaataataaaataacaaaattcatgttgaaaattttataaaaaatgaagacattttaaaaataaatagccaatcatgttgattttattttttaaaaatatacttcaaatataaaatcaattatcattgtttaattttattttcttattattatactggaatgaaagtgtggtggactagtgggaagtagttcaagaacaaaagaagccataattattttaaaaataataattattataagaataaaaaagtttgttcaagtaaggttaatattgtaatttcagaaccattaatgacagatctgctaaccgacaagtttgggtcggcaactgtcggccggtgaaccggggagacattaacggcgaaaattccacccctgattacaaaaaaaaaaacttatttatttatttttaaatttaaaataaataccctttattttaatactatttttaaataaataaataattttatatacattatattacaacccaactctcacagacagacagttaatattttaattttaaaatttccttttagtccctcaaataatctcgattttttcaactattttcctttaaccatttactatctcatcggagaaagagtgaaaaccccaacgaaggaaaaagcaaaggaaaaatcgccttcttcattctctctcttcgttttccgagaaattggcttattcagtttgagctttgaagtttggtaactgtaatgaaattggaatgtacagatcattgtagaagcgctaggttttcattgtgttcttggggatctgttttctaaatgttgattttatgaagcctccttggatttcttcgtttgttctggtacgttttttgtttcaaaccctagttctcgttctcccatttcttcttcttcttcttcgtgtgtgactgtttgttcagatgtgtatatgcaactggactgtgtttgagctgagtattgtttttatgggaagaatgtttggtttgttttgttttcggttttttttcgaaatttgtttcccggttaagttcgatttggcaccgtgtcctaatcgtgtatgggaagaatttggcgcgtttttttggttggaagttgccatttttagggtcattttattagtttttctgtttcaatatttggagttttgaacttctagaggtgatagttatctttgagatggccttttaggaaatttttggaacgcccaaatcagcttctgtttttcttttcccttcccattaccagtttaaataaatgcttagtctgattattatgatattataaatatttttcttcgtcttcttaaacattttaatttcaatttcttgaggattgtttaccatctggaatctggatcaactgtgcagtgtcgtctttgaagtttttatccttttacgagaattattttcttaaatattccagcttttcatttgattgctgggaaaatgttaagagaaatgacttattgttttcggctaagtttaattttaacaaaattgctccgccactgaattgggcgcgaaggaacttgttgatccagtgaagctccctttgaatttttgatccctaaactgtaatcattgcaatttgagaatgggttcaactcatcattttgcttttagtaactagttaagagggtatgccccttctattctttcagttctttacattattaacaagagcgttttgtaaggatttaaactatgggttgatcaggttgaataccaatctggtttatgccatttaaaattcgcgttacctgttgaacttttgactttaaggagattacggggctccttttgtctcctgtcgaatcgatataattttgttttgtcttttaatgcagacgttctaaacttgcacgacactttttcagtaggagctcaaaaaatggatatgaatgatgttgatgaaaatatgtttgctgctagtgatgctaaggtatgaaaatttgcacatattcaaatcttttgtacgatttgaaatattggcacaacagtatttcttgcacttcgcttttggtttgttgactgtgttgtgtgcgtgtgagaatatgtgttaatgtatctttatgctgcttgtagttacatgcagaaatgtgcaggaccctttcctcaatttattgcaaaatattgccaattttcccttcattggaagcttctcggcctagaagcaaatccgggattcaagctttatgttcattacatgtagcactcgagaaggccaagaatgttcttcaacattgttctgagtgtagtaaactttacttggtaggcttccttttctgtattctatacatggtcttttgcttgtacctttagatggtaaatccttgcattcagataacaatttagtaacaatctctggatggttaatccttacattcagagttaaaactagtttctgatgatgtttctatttttattctagaatgcacaacagctgaatatctcttaccatgcaggctataacaggagattctgtgcttacaaaattggagaaggcaagatgtgctcttgaagatagtcttaggcgtgttgaagacattgttccacaatctattggttgtcaggtcaggtttattttatttaggtgaattgtcatatgaatggttgattttgtgcaatagatgttctagtaaacattatgcatttttatcaagtagtatatgaaacatagcttgaaatttgagattctactgcagaaatgtgcgttggagacccaaaatcttttgttaataattccacttcttctttctcaatccctattattttattaaccaacccttgatggaagcttttcaattatgttttcctactctacccttcccatcacctatatattcgaggctttgactttcactgacgcattgatgcaattttgtttcagattcaagaaattgttggtgaacttgagggtactacattctcgcttgatcccttggagaaacaagtaggtgatgatataattgcactgcttcagcaggggagaaaatttgacaactgtaatgacagtaatgagttggaatcatttcatcaggctgctactaaacttggcattacctcttccagggcagctcttacagagagaagagctttgaaaaaactaatagaaagagctcgtgccgaggaagataaacggaaagagtctattgtggcttttcttttacatctcatgagaaaatactccaagttgtttagaagtgaattctcagatgacaatgattctcagggttctgccccatgttctcccacggtccagggttctatggatattatggggcctgggggaaatggtcacgtctttgatcgacagctatcaaaacttagctctttcaacttcaagccaaacaataggagatcgggacagatgcctcttccaccggaagaattgaggtgtccgatatctttgcagcttatgtatgatccagtaatcattgcttctggtcaaacatatgaaaggatttgcattgaaaaatggtttagtgatgggcacaatacctgcccaaagactcaacaaaagctttctcatctttctttaactcccaattactgtgtcaagggtcttgttgctagttggtgtgatcataatggagtgtgtgttcctgatggtcctccagagtctcttgatcttaactattggaggttagcactgtctgaggctgagaccactaattcgaagtctatgggtagtgtcaactcttgcaagtttaagggggttaaggtggttcctttggaagaaagtggtactttagttgaggctgatggaaatggaactgagaatgtttgtccactggaggaagagtctgagctcaatgtgcttgaaagttatcaggactttttgactgtcttgaatgacggagaagacatgaggataaagtgcaaagtggtggagaaattgaggttcttgctgaaggatgatgaagaagctaggatatatatgggagctaatgggtttgttgaagcactcatgcagtttcttaacatagctgtgcgggtaggaaatgatgttgctcaggaaagtggagcaatggcacttttcaacctcgctgtcaacaataacaggtgagttattttctaatggtccagcctcctggttctaaaggctccaaattgactaagtagtgaaatattgtactacaggactaatgagtgattctcttagttattttacacccttgccaactttaaaacaagaggtactaggtttgcaaacgcctgtctagttcatgccctagccaataatatttgaaattgaatatacttgtgttacaatttgtatataattaaataggtgcctatgagtttcaataccttgcccgtatctccgcttacacttagttttcaaccttttttttttattattttttttatttttatgttaaattcctcatgtggaaaaagactaggagacaaaaatatctttcaatttttaatgaccgtattgcatttattatttatataaactactgagatattcatttcaatcactccattaatttttatttttatttttcttatggcagaaacaaggaaatgatgctaggtggtggtataattccattactggaggaaatgatctcctctaccaattctcatggttttgccacagcactttatttgaatctttcatgccttgaagaagccaaagctatcattggatcatctcaggctgttccgtttttaacccaacttcttcaagctaatactgatgttcagtgcaagcttgatgccctccatgccctgtacaacctctctagtatgccctccaatattccaaatctactttcatctggcattatcagtaatcttgaattccttgcagcctctggtgacagcacatggacagaaaagtgcttggcagttttattaaatttggcttcaagtcaatcaggacaagatgaaatggtgtcggcgccaggccttatcagtgtacttgcaacgatgttggatgctggtgaacccagcgagcaagaacaagctgtatgctgtttgttacttttatgtaatgggaatgataaatgctgtcaaatggtcttacaagaaggtgtgataccaggacttgtttcgatttcagtcaatgggaccacgagagggaaagagaaggcacagaaacttctcatgttgtttcgtgaacaacgacagcgagaccaagttcaatcatctccagaggaggaggaggaggaggatttgccttccgaatgtagtgagatgtctatgccgcctgctcccgaatccaagccttattgtaaatccatttccagaagaaagatgggcaaagctttcagctttctatggaagaccaagagctactctgtttcccagtgttaaacctcacggtgctgtaaattgtagttgtatcaacttctttcttttgtcctcttcttatgggcgttactattttttgcttttcaaagagaagaatgtacaggcccctgtaatttatgagtttttgtttctttatgtcattttcttttcaggtaggaatacatgtattattatgaatgtcataattaaagctttagattacatgtgtattttgctttcaattactagtagccattagattgtaaaatatgtttttaacactaaaattactttccgttctgggtaccaaattattcaaaaaaggatacatcaagtaatagacatctcgaagtaaaagctgtttaaaaaaacttgctaaactggtcctaattcatctcaaagtggaccttttcttcttactactctttttctttgatttctcctaactcccttattcttgtccttgacaatttccatgctcatcttctttttcttctggttttcctttgacttcttcaccaagcttcatcatcttcttcttctggagagtttcaatgagtctaggtagaactatattcgggtcattgcttctcataatctcctctgcaacctcagcaggggtcacctcaacctcctcgatcaactcctcaacttttccaaataaatggtgattttttacttgaagatagttaaaagcaagagtcttaaacccagatggtgtgcagtaagacatgttgatatattcatgtccattcggcctggtctcaacaatgcagggtcaagtttggccttgtaattagttgtaaacactattattctctctcatctccacagcttgaccataacccatcaatgaaattaagcagcccagatagagtcagctgtcaaatttcagatatgattcaattaataaaaatcattaccaagtagtcatatatgaatatgatacagtgtagaatggaagaaagagacaagaatataagatctcttatctcacctggctgtcattttgaccataactaccttgattacatcccctgttttccaactgaacactgcaatcaatatcttcaatcacaagtatagatttattctcaatcgaaaccaacaatctcctaagatcagagtttctattcaaatgggtcagctccaaatcatagatattaaacttgaggtaattaaccatggcagctatcaagctagattttccaggttaagttgccagaattaatggcggatttccaccttgttgggtttcatttcggttgtcttccttagttgatcgttcgaagcttccgaaggtgtgttttctgattcgtgcggctgaagctttagaagaagaggtataattataattttgaggaaattatactctataaccactttattgcacctgttttaatttttaccttccttttaatattctttgattttctaagttttgttcccgttatagccttaggttagtgaaaagaaataaaattcaattacacctctaaataacacgataacctctgtcaccttctttctttttcgaacaattgacgattctggcccagtcttccgtcttttgtgggcgcacattttcacgttcatccctcagtcggcggctcaacccaatcctcaatgtatggtcgataaggtacccgaagaagagtttcgccatattagttataaaagtaaagcaaggtacttattggaaggatgtggtaatggataagcataaatgtaatgtgatgatgattggaatgacaaagataagaaaattcatttggatagtaggaattatatttttcttaatgcttgaatttgcttgctttattttttattgtagttatgattatagcgattgtggttgtaatcggtggtagagtaattggaggaacgctggcaatggtagactcgtggtggagctagcgtgagtttaatttctatggaggagtcggagtcgcctgcaattccattaatcaaagtcgtggggtatattagacagttcaattataaaaaagagtatattttaattaaatttattttgcagctatttttagtgaatgtaaaataaaaattggtaattatcaacttatccctataattttttatttgtagactgtataaatatttaatgagccgactcactggattttgataatatttttatctttattatatatacataaaaatgctctatatataagcacatataatattttcaaatttttaagcttgacagttttaccatgttatatatatagcgttctgttttcaaaaattgaaaaaaaatagtatacaatataccgtataaaaaaatagtaaaaaagtaattttttccttactacagtaaaattgaaataaaataggacaaaacagtatggtgtgtaagttcctctgttgtgcactcaagcaccaacaagaacacaatgcaagaataaaatggcttagaatgataaaccagaagatgtatcaaaccagataaataaaagacagcaagaaataa

SEQ ID NO: 111691 - DNA, 5110 bp, Cannabis sativa
aaaaaaaaaaaaaaaagttgtaaatatgactaccgagttcgtccaatttagtctcaaatttccctggttgtaagacatagggcaggttcgtgcaggtcgggtttaggccaagtattggctttgtactctttttcattttcaaaaattttctattttattttgtttaaataaaaaattaaaaacttgttaatttggattcaaattttaccgtcctttatgttataatatttaccgattcgataatttatatagctaggaagataacttaagattgaataatagtttactattgggttgactttcagatctaaaagttacaagtactcacgtcacaaacttcattagttcacaccatctactctagtcttgccacgtctttcgcttgtgaactgcagcaattgtaatattttagctttcaaacttaggaattttcagcttcaattctatgtcaagatcaacccattactagaagtatcttaaacaaatgagaagcctagtaataagcatttcctttctctttcaaagtttgaatttcaaactgtattttatctcgttcaacaaatttcctaccactatttttgtgggtaccttgacataacgaagttggaagtttaattaactgaaaaaccattcaagtaaatagttgatgtttcaacattcattacagcaaacaaagccactactaccactaacaactatagtttctcacaaccgcagagcagagcatactatatatatttatatgatatagttgtcttcatccagaatcacaattagcaaatctcaccagaggttactttcccaacatgcatctcacgaaagaacatgttttaacctatagaatgatcatctggccaacattaacaaccaaatggactctctgcaactcaattatcgactacgcctcgatccaggtggtgatatggatgttctaacccactcaccttgaggttcctcagcttcatatgcagatttcctatataacaagaacatgaaattataaacctatgataataagcacaaatcgtatggattaaattaaaacacaaaccaactgctcttcaacatctatgaagtataatacggtagagagtgagaatcatattgcttcactataaaggtctaagtgccagcgagatactcttatagtcctatccttacccatcgttagttggatttttctcagcaccactgtcataaccaggagaatatgacctgcgattgttatcaccatctcgctcccggggtggacctcttggtgatcgtgggggctcagcatctctccccggggaaacagagtagtcagccctgcgctttggagcaggagagcgagacctggcagggtttaaataaaaaccagttgagttgacacttcactactaacaaaagtaaggtgacacatgcaacaaagactacttaccttgaacggtatcgacctctagaacctgacggataacgaggaggagagcgcgagtgggatacagaacgagatcgcgaacgccctgaggtgcattaaaaaagagaacagacttttacttagcttattcaaaaggcaataaaaatatatttatcaaatacaaagttgtaatgatttataaatagccatgtaactattgagaagtaaaaatagttgttagtccagcattttgtctttgcgaccaataattttagcagtgaattggatgtccccgaatgatttgggtaatggattaaaattaagaaaacattaaaactaaataaaaaaaaatcaacactacatgaaggatgatacaagaatattaagtagacactcaccataataagaggaacgcctttcgccataacttgatggaggccctcggctgaaagagacaaattgtttagaatttcaaaacatatatacaaggaaaaaagtacaaatttttttttctttttatcttcttatgagagaagagaacaaattacctaaccctggttctttgacgcatctcctctggccttttcctggtctctgcagcaacaacaactgatatctcccttccagcaaaaattttcccattcatgtggtactgagcctctgaagcctcataagaatctacaaactggacaaatgcaaatcctcgaggttccctgcagacaaaaaggaacaaacttcattcaaagtaaagcaaaatattagtagatactgacacagaatggccaaatttcagcatacaattttacccacattatcattatggattataacttacagtcgtacacatctcacattagccttggagcacttccacataagtggatactgtatttatacaaagcaggtatattgaggcttagtagctgaccttttctttacagtcaagtatgaaaggtaacttcaaaagatccaaatgacttggaaagtcttcaaaatcttgtaattataagaaccacttgaaaccaacgtgtctcgaaactaaaaaatcttcaaatgtaggcttcaaaatgccaagtatcaaccttcttcctcatcaaacttctaatgatagtgtacttaaaaaatatctcttcataaatggaacatgcttcatttgagcattactctaacaagcttcatataccactatgttaggcaaagataaacagaaggccttcatcaaatgtagggcttgggcttgttttaacttcaaagttcaaaccaacacacccctgacaaaccagttcagaaatccactataaaagaagaaaataaagcctttatgagtagtttagaaaatttaaaaggaaatgccctactgtcgcaatccctaggtagtaggcgaatgtgatatggcatctgcaacgactaacaattcaatatatttgtcttatcaatcccaagaacttcagtcctaaggctacgcaaaaatggataaaacaaaaccaaaaaaagggtttaaactgctaattgcagttaacttcaaggaagtcggcatccttatgtaacttatctacaagcccagataagaataagtcatagcatgaaatctggttaagaggccttccacatgcactagcgcagaatctcaactctattgctacaattttaatatcaatactgtacaatcaaggaagcacaaaaaatgtaaagcaaatctagccacagcattcacaatgtttttggcaatttatgcaaagagactcaccctgtgtaatagtcctttgggatatagacatccctaacaactccaaatctctcaaatggtgcccgtaactcttctggtctgcagaaaggtattaaaagttgtcatgaaacattttagctacagaattaaattagacaagagcatagtatagacaaaaacctgcaatcaagaggaatattgcggactaaaaggcttccattctgatctttgcgccttccataaccgccaccaccacctccgccaccaccaccgccaccaccaccaccaccaccaccaccataaccccttctcggggggcttcttcctcgaccaccatagtctctcgagtctctccttggaggactatagtactgtggactgtacctcctcatcctactgcctaaaaatttagtatgattaacaatccctataaattctcttaaaagaacttaagtaaccaagtccagaacagatatcagaacactatatgcattttaagcctttatcaaaattgtaattgaaacaagtatcaaaaatttttcattcaagctgctccatgattttgtactatataaaagaccgtttatttcatctttaatcgttttctcggcaaaaagatacaggtgtatcgttaaaactccataaaatctcagctcaaaagaggggaaaaaactgtaaaattaaaaggagaataaaaatgtaatttttgggatcaaaagccaatgttggaatgaagagtggcagtcggtgaaaattccaaggactagatcttttgtttcgatttgttcttctcatgcgattttctcagtaaccaaacgtgaaatttcgtcggatcaaaatatatacataaaaacagaaaatattacctgtgcgacgacgtacgtcaacgggagagtgagttgttttgaggtaagcgatctttcccttagatctgaactgaagaattatcaagctgacgtcgctctctttttccttcttgatatatctaaccctaaaactcgttattgggcttacttgccttgttctcaatgggctcaactaggcccaactaattgcattacaaatagaaatatgggggttttacaaaaatactgagttttgtacaaatatttacaattttactgtcacacagcttacttttatacaatatcaagaacaatatctccatcttctacactcacgcatagaacaactacagcaacacaaacacacccgaaaaataaccattaattctaacgagatagagcaaaaccaataaattcgcacatcaaataaataattatggcaaaacaacattgaaacaactcaacaaaaaataaaaaaaaaaaaggattaaaaataactaaccatcttctacagatcctcaacaccatatgcaatagcggctatatttgcaaatccagtcctaaaaaattagaataaaaaaactactaaaacaaacctaacccaaaacaaaaacaaatgtaaaattataaaacagaataaccacttagaaaaatataaaagaaccacacacctcaaaatctttttgtcaatgagctcatcaaatgtatttataggagaatcgaagtaaaaaaactacaaaaacagacatagaaaaggaagaaaaatgtatttatagtcttgatcttctacacccacgaacagaaccaccacagtaacacaagcacccgaaaagcaaccattaattctgacgagatatagcaagaacagtgaaactgacatcaaataaataaatgatgacaaaaccgtaaaacaatactaaaacaaatagaaaaaaagattaaaaaaactaactatcttctacacagtctcaacatcatatgcaataaagactatatttgcaagcccagatctgaaaaatcgtaataaaaaaatcacattcttatttttcccaaaaacgtgagtgaaaatttcaaaaattaaagaaaaaaccgaaaagaagatgaagaagaagaattgaacaagaaatttaaaaaaaaaaaaaa

SEQ ID NO: 111692 - DNA, 4644 bp, Cannabis sativa
  modified_base (4306)..(4309): a, c, t, g, unknown or other
tctcataaaccaagaattctattatataggcacactttatatagaatagatatatgacaaaatgtatactgcagcctctgaaaatacattttggtaaatatttcggtattcagaagagtttttcaatcaatttttattataattgcatatgttatggttttctaagatcattgtaaatttttttgaaaatttcaaatagcttagaatactgaaaataaaattcaaacacttaattatttttacgtatatatatcataaaatagtcacacgtgctataaaatatttaaattttattttagcactattactatttaaaattttctaaaaaaattataagtaattctaaataaccgatcatgaaaaaaaatagactaaaaagttctattagatgccaaaatagatgaagaatgtaccgaaatctagggagtgtacgataaatttctcaatatagtaaaatctctatctaagaatatgcttgacaaactaattatattataattgaaaagctataactaaatagagatacattagtaaaaaaaaaagttaaaagaccaaaaaaacttcaagtgtaagaataataataacaataagggactcattgatcagattatttcagacactcaaagtgcttttatcccgtgttgtcttatctcggataatataatagttgccttcgaggtcatgcaatacctcaagcataaaaggattggaaagacgaaggacttcattgtcttaaactttatatgagcaaagcttacgactgtgttgagtgggattttctttgatgagctgttatggaccatatgggctttgctgagaaatggattgagctttgctgagaaatggattgagcttattatgacttgtgtatcttcagtacgatataaggtcgttcatggggccatgtgctgggccctatttgtccttctcatggtattcagaaccctctatgcatatatattttcataatctgtgctgaaggtttgtcttctttaatttagaaattcgaggccaatatggttattcaaggttgtcgtgtggctcaatgcgtctcgtcgattacgcatatgtttttttttatcaaagacagttttctcttttgtcaagcaactaggagcattgctgatggtattcacacatttcttatctgtttgaaactgcatctagctagaaggttaatagctccaaatcctctatttttttctgccccaatatactttcactcgttcttagatttgttcaatctttggcatgcttgaagttactgaaggtagcctttatcttggtcttcctaatattattgttcgtaatataaatacaatacttaattttatcaagaacaaggtcatctctcgtattaatatagctaggaagggaagtttctttctcgtgcaggtaaagaaatccccatcaaaactattctccaatctttgcctacatatgtcataagtgttttcctccttcccattgggacatgtaatgaaattgaaaagttaatggcaagcttttggtggaagataaactctagtaaagatcatgttatttggatgtcttgggatcgactggctgccctaaaggaagagggtggcatgggctttagacacttacatgattttaatcttgctatgcttgcaaagcaaggttggcgcttgttgtgtaaacctaattctcttgtgggaagagtatttaaagttaagtatattcctaattctgatttcctttcagctgacatttgacataacccaagctttgtttggcttagcatttggggtgctcaagacatggtttgtttaggtgttgtatgtatcattggcaatggtgctactactaatattcttggacaaccatggttaccaaattcagacaacagattcgttgcctccacacatcctggtctgtacaataacacagttagctctctgttttaagttgatgatcaaagatggaatcttgttgctgttaatgacctattctcggtacgagatattagtatgattttagggataccattatgtgattttgcaaaagctgactgctggtcttgggtagaggaacgatcgggactttttactgtccatagtgcttacttgctgctgtaatagcaaaaccaaaaaatctaggccccaacaacactagtttttggcaaaaattatggcacttgaagatcccacccaaagtcattaattttttatgacgtgccatctccgaatgtcttcctacatgtcttaatctcgtcactaaacatgtgcaagtttcagctaagtgtcctgtgtgtaatactcatgctgaaacaaccacacatgccctactcacttgtgattttgtcaaggcttgctggtatgtgttcgatgcacctctaaacattaatatctcagtgttgtttggtacctgatttgaggctctgctgcataccattgatactgacctgatttgtcgtgttgccatgctttgttggcagtgtggaaagcccgtaaccaagctgtttgggataaacaaacctctatcgtaacagataatattgctttagcatctgttacttttgatcattggaagaaggctcaggacaattctactctattatcattgttgattgaaaataatggtgatgggtctgagttttggattaaactaggtttgaatcaaatcaagattaatgttgatgttgctttttaaaatcaagagtgtccgtatggttttttttaggggcaagggataactgagggaagttaatagaagccaagacgttctttcaaggaggcatttatccagctgaggttgtggaagccttgagaattaaagaaactcttagctggattaagagcaagaattggcttaatgtagagattgaaactgatagtttactttctgtccaggccattcgatgtaaccaagccatgtcctccacttttggtttacttatttaggattgtcaatctttgttatcttctttacataatgtgcacttacgttttattagatgatcagcaaatcgagtagttcatgctattgctagacattctcgatttctctttggttgtagcatctttgagcataatgtcttagctgatttaaaagtccttttgtatttcaaaatgctaatatttcaataaagttgctatttcatcaacaaaaattaataaaaaattatatctctatattgatacatatcttacctattatataagtgcatatttaattttttttgttgcgtattattattgtgtcttttaacagaatattctcaattaaaaaattatttttaactattaattatattttaactgttgtattctcccacagaaaggggtgtaattaacaatgaccagagatacccattcgagacaacctttcatgctatcaaatcctgtgcaatttaaccaaaataagtcatcttaggttgttaaaaaataaaaaagaaaaagaaagaatacacaatttcacatgaacctatgaaaataagtaaatctcctccatcagttaaaattcttctcatgtaatggtaagaatatgaattgaaattcaaattaatcaatcattgagaactacacactaataattattctcttgtgaacaaataattttctcacgagaattttgaactttcaaaagataaaacgaaaggttaatttattacttttagaccattataataaaattaaaagaaaaaatataattcaaggaaataaatattacaaaaaattcataataaattagatgagagtaaaggaaaaaactaaacacgtgattttggattaattactcttggtatcgttagtttaagaatgaggttttgctctcaagtggattcgggtcgggtcgttctctgaagaatggctgcctgtttgccttgattgtatgcagaggcgatgatattttttccgtcgtcacagcacattgatgtcctctctctttcaaaaagaaaaaaaaagaccacctttggctgctacatacctctgcccctgtatgcaaatatatatgattgagattatttgatatattgagcagtatgcataatatcattttttttaatattatatgcaaagtacaccctacaaaatgataagtaatatttaaaaaattaaactcaaaataattttcaaaaattgctcctaatatttttttaaaaaaatttcttgtattattttgtattaatttcaatacttattttaattttatttttataatttattttaaatcatgtataattttttttatttttttctaataaaatttcacataattcttattttaatttttattataatatttataatataatttattttgtttgataggtatatttttnnnnaatataaattagaagaaaaaattttaaaaatataatatataattaaagatatatattttatgtaaataaaaaaaaataataaaatgagatattgtatttataaaattttagagatgaaaaaaattcgtaaaaataataatcaatgtggctgctattatagttatatctattctatataaattgtggctatataatagaatttttgattcagcaatattttttttggtttctacgctaattttaacagaatatccaattacttaatagaatattctttattaattttataataatattattatatatattttaaaataaaaattatatagatattt

SEQ ID NO: 111693 - DNA, 1214 bp, Cannabis sativa
aaatttggtgatagtgtaacaccaaatttagcaccaaaatcttagtcttaattagcaaaaagaaaaaccatgattacaaacattgattttattattttttttttactctttttaaataaaaccaacaagaaaaaaaagataaaggaaaaagcaagaggaattgatttgagttgggagagaaattattgtttgtgcaaagaaagggcaatagagtagataggtacttccgtaattctaacaaaatcatcatataattggaaaaataaaggtggtgggtcaatcgtgccgtgtgcgtgagagagagagagagttattaaggtgaatgaatgaagatatttaatcccagccgttgattttcccaaaagttttgttatgctttgctgtttcaagaatcaaatgtttatgtttagagctatgtctctctcaatctaatctcatctctggtctttcttcaatcttgaccatattatagacttcctgttcacacttctcacacgtgtattatagttatttattccactacataccacataattaatccactaaatctacataaaaattacccataatgatcacgatattttttaacccatcatatttattattattattaaaaaaaagtttatacgaaatgattcccttttgtcgaaatacaagcattcacacaatggtaaaaatggtgagaaatagtttgattttggtccacctatttgtaataaggtaataatacttaatatatatatttttttatcgttttgtttattgtgtttttaaaacataataaaagaaatgaaaacaaaaagatacacataatttttttagagtttctttctaatcttcatcgccataaataattgatacaccaaatatcaaaagtcaaaatcagtgaacaaaataaatacacaaaaaattgtagtacaaaccaaatttaattacaaaaatgtggataataccatttaacaaacaaaattaaaaaagaaaaattacaaggacatttatcttattacaaatatgtttgaccaaaattaaacctgtgagactattttttactgtttttaccaaacatagaggctttttttctttttctttttctttttataatcgaaaaagtagtctattttgtattgggaaatttgaaattctatgcttaaaataccatttaatttttctcctaaatgcatagttattaaaattggtcttatatgacaactttc

SEQ ID NO: 111694 - DNA, 2765 bp, Cannabis sativa
  modified_base (2578)..(2579): a, c, t, g, unknown or other
gagagagagagagagagagcctatagtgatgaaacaagaacataaatgaaaggaagaagaggtgggttgggagcattaaaacagaccaagaaaaccaattcagtaaagaagaaagaaagtgatgacgatgatgatgagaggggtgtttgaatggtcatccttgaattcttaaattctgcatttaatagtgaattcaagatgagttaatgaaggcaggtagatagactactaacttgaactcatcccttccttcctttcaagccctctttaatatatatatttatttttcccttagatttcttcgtattaattatcaccatttttcaaatttggtggctacaagacaaaaataccctctaattttggaaaatatttttttatatgtccagactcattttgactattagcgataaaatagtttgtggtatttaagtcattagctgtgtagtctattttagggtccctgccaatttatatatatttggttagagaaatgctaaaaagcaacgcacaccggtgcctaatataataacttcacctcaattaagcatcaagtgctaatgtgatagtttttaagaaatatagctaattaattataagcagtcaccgctagtaagtttagctctggtatagatagattggatctgtgcttagggactacctaacccaaaagtccaataaaaaaattctcttttaaaattaaacaattttttttttattaattttaaaaaatacttcattttcttttacataatggctaaattttttttgagaaaattagactctatatcttttttatattatccttttttatttttaccctcttttttaaagcctatcatttttacttctttttttaaacactttaccgattttaccctttaatatactctccatgtgactctcttatatcagggtattttaggtacaatacatataaaaagtggtatgtttcaattaaatataaaattagaggtagatttaattaattgataaataaaagaggtattttttaatataccctaatgcatatttcaagaccagccctgacctctaaaaggtgtggttagctacggaaccctcctaattaattcccatatgtataattgtattgaatattgatccttattatgtgcatgttagattatttaaacaataaaagaaatttattatatagagaaaccatggatcgactacagctttatttgttacttttttaattaattagctgattatataacattgaattgaagaaagctagctagcaatagcatcgtcgatctgtagtactacctgtggtaaattttttagttttaataaacaaaaaccatgaaaaagtgtggagtactacgtcatgtacgtaatttgaattattaaacattattattagtacgtggttaatatgatcattatttataataatgtatcaaattctaacacacactgatgatagtattaatatatatcaaatttaataagctacattaattaataccctttgaaaaacattttatcaaaaaagaaaatgagctatataattaataagcacatcatgtattcaaatttattatgttctgaagttcagaaaagcattaatttacacagcattaaattatcacaagtagaagtagtacgtactgaatttgatcacgcaaaagcatcaatacctatatgtttacgtcgactaacgtcgttttgttacttaaacaacaaggaattgtctaagtcaaatattaaaaattaatgtctgttttattgtttataatttctatgatgtatggtacatattatacgtcatgcgtaaacattttcagtcaagtcgtgacatatataagaacttagtgtgcgtatagtattactgtgtcagtgtaatttcatattttataagatgaaggtcttgaccagacctacaagaaggccctaataatatacatattatatatatatatatagagtgtggggggcatgagttttgctagtagtaataattaatggccgaggggggtgttgagagcaataaaagcacgtacgtatatacagatatatatagagaggtatatataaatatacatatattatacatattaattatatgatcatataattttcacagctctggtaattagatggatgtggtaattatggtttcgagagggggtgtgtgttgagtgctttaataagttttcttttcttcttttgatatatggtgtaatcaattgtgggaagttggagttattattgtgtgtagctaggcggatgcattcatggcctattcttcaactgtacagtctctccctcatttaatgaccaaatttttatatatatatatatctatatatttatataacacaatatctatgtgattactattttgatgtggtcagtataattcattaacagttttttattattaatttgaatttatagaattcaatgttaatttacaaccataaaaatatattaacttttattgtgttttacagttggaaccataaaatacctcttaatatttctatatctattggtacaattcaaatatcaagacttctcataaaattaaatatatatttatatatanntatatatatatataagaaagaatggcaccggtggcaaacaaattttcttttaatataaatatatatggaatacttcgtattacccatggttactaaataaatttaactataaatattaattttgaaaatatccaaccatcaaattttgatctaataacgaataatgaaaaattaagcataaaaact

SEQ ID NO: 111695 - DNA, 3873 bp, Cannabis sativa
aagttcgattaaaaactatatcgtctcctaagataatgaccaatagtttcaaacaatctatatttgtttaactgatatgtagatgtacttagggctgagttatattcctctcataattcctctgtaagggggagttgcttctttggggatatttcttttcttctaatatttacacaaaaataattattatttttacaaagacggagccatcatttcatttgattcatgcaaccgttaaccatactaaagcagaatcatttcaatatttaaccaaacgccaaaaactaattttgaggcctggccgattgatattgcagagatgcacgaaagagatcactcatcatatgaaagatgatgcttcatagagttgcacaggtgaggtgtgaggtggggtggttctaattcaaaatgccaatgttctggttcttacatcttttcattatgatttttatagctgaatgcatgcattatcagaattggaacattaccattatcagcagaatcatcaattatcaatgacatatatacacacatacatatgtaagtatatgaaaatgatgtgagattatagagaggggacccctcatccacctaaaggtactaaaatcattacaacgctaacgtgtcaaatatgaagcaaaaggagaaggaaggacatgctttccgaaaatggaatatggttttggctcatcaaggacaacaggaagacaattgtcaatataagaattctttcttcaagactggaccacaaccaacaaaacctaataaattttatccagcttcttaaactccagctactcttctagtactggccattatggagtaggaaattgggaaagggatatttatgaaaaaaaaaatatttattagaaataaataataccccggttgtacaattacgaggccatgtgtgatctctaacctgtgtaaatcattggttgtacaaatatacccgaggtggcatcatttatgaattgatacaattaaaaaaaattaggtacaagaggagagaagagattggggggaaaaacctatcatcactcgagaaaaagtcaagtagaggacgcagctcgatcagattctatcatggactttatgtaatattcacctgctttgtatgatgacctaaccataggaccagaggccacataacgaaatccctgtttcatcaaaccaaacaaattaatgttatcaatatgagatagatgctataactgtcagtatcaacaaatgtttcaaaatgatgagctgaggttttgatgcatgtgacaattatcacagcatatgattaaatagtaatagttgagaatttgattatgtcctgcatgatgaatgctgccacgttgcaaaactaacctaattcctttatcatgaccacatgagaaacaaagaaatatgtatctccatgatcgttaaaagtttaaaaactgtaaaggtgattggattaactgcttccaacatctgacaatgcagagcacacaatgccaaattgaacagaaaacaaatatgcaaccttgtttggggttaatattcatctgaaaaatcatcaattgtctgctgcagttgcagtaagagcggatatatacacatatgcatagagccgtagagaaactaatgcataaagatgttattagatttggaaaaagtactgttagcagaaccaaagcaccaaggacaagctagtcaacaaccaagtatataataaataaacaaatttagcggcgactagagtatatgttttcaattaaatttcaaactgaagaagtacaatttcagctacattgacaatctttcacaacaggaacaaaggaaaatgcatgaagcacaacggttccacgttccaaaacatgcacttgaagtggaaaggaattgaaagacaattaaatacttgcccattaaggagctgatgagatttatacaattaataaccaaattaagttcataattagcacaagtcacaaaaatatgccgtataccgtaaggtaccataagtaaatccaacaaaaaatgacatatattatatgacaaaaatgcatgtcacaaaacaaataaagccctgtaacataaaccgactgagataaagaaacaaaaaaggataaagccgtaccatatccatgccgaggatgcgatacttctcaaaagcctcaggagtaatatattcagatacaggcatatggcgcttagaaggtcgcatatattgaccaaatgtcatcacatcaacaccagcagctctcaccttctccattgtcttcacaacttgatcaggtgtttccccgcagcctaacattattgaagtctttgtaagcgttccagcaggagcttggtctttagccatcatgagaacttctagagattggtcaaaatttgcacgatgatcccgcactgccttctgaagctcctcaactgtttcaatgttgtgagcaaacacatctagcccggaccgtgcaactttctcaacacatgtgctgtctcctcgaaaatcaggaactacacaacacagaaaagcaaaacaatattagaaaaacacataaccaaactgaaaagaatgaacataaatcagataaaatagttgacgctgcagtaatccaaaccatatgaaaacagagttgccatacatgaatgctaaacggtgatgtaattcactaaaactaaaaagcattatagtatatatactaacatatacggtatcaggcattcagtccacaaaattaaaacttataagtcaaaaacctaaacaatatgaatatccatggggagaaaaaataaaataaaaaacccaagacatatatcagcgcatgaattgattaaattctcaaaacaaacaccataaagaaagcaaatgcaaacatacccaatgcctctatgagcatatttggtttcagttctttcagcttctgcaccgtctcggcaaaatgaccactcccttgatcaggtaaatcatcccggtccacactagtgatcaccacgtaatccaacccccatgatgcaatcgcctccgccacattggtgggctcattaggatcaggtggaggcggcgttcgtgaagtcttcacattgcagaacctgtaccaccaatttaatcacatcaaactgaggaaacttcccaagcacattccccaaaccaaagtaaatatcagctttgaaaaagaaaaaactcgcctgcaaccccgagtacaagtatcaccgagaatcataatcgtggcagtggcagtaccggtctcaccgccggaccagcattcgccgagattggggcatcgagcctcctcgcagacagtatggagattcaattccctgagctttttcttaatctggacgtatttctcgcctccggggacggcctccttcatccatttgggcttgggaaagaggattcttcttggtcccaacctcgacggaataggagctattggatttgagattgtcggcgaaatcagtgagtgagggggattccgcagccaatcgggctcggagacccgctagggtttgagggaattgggatgtggtggatgtggattgggtggaggatgagaagagcttctttgaggttgatttaagggttcggccaagggttgtgaagcgggagttcatgcttgcttctgtccctcggtctccgagtaagatcaggtggaagagaaggaggttggacccagaatcagaatgagaatgagataaggaagaggatgaagttagttggttggttggttggaccagacaattttggaacacatttagattatgatgggccttcaaaatgtgttcacctcatttgggcttcaattcacaactttttacgaaattttaaacatttttacgattttttgattttatttacataaaatacggtctttttatgttgaaattttgttcatttgt

SEQ ID NO: 111696 - DNA, 6487 bp, Cannabis sativa
ctaaaaggcagtctgtctctaaaatgacatttgacctattattcctttttatccaactaagtgcttctttgatactgagaacttctgcaatttcgggtcggcatctgacagaaggaatagttgaaaacgcctccatcatttggtcatcgcagtcgcgtgctacaaaacccgtgcctatatcatttgtggcttcaaaaaccgccccatccacattaatttttaagtgaacttaatatttttaattaatcaattaattaatttaatatttttatcaagttttttaatattttctcagaattaataaaatattataatttttaaaattaaatgttttttaatgaaaggggacaaagtattagtcaagtttagagaataaaaatgctaacttttaacggtaaaagaaacagaacttaacagtaggagcataattataaaattgttatattttaagaggaattttaagcagctatatattttaaggagtaaaatcagatagtattgaaagtttgaggaataaaaatactaatcattcaaaatagaattttaaataattttatctgatttcttaaaacttaaaagatggacctaatatggatattaattatcctatccaccaacatgctcctcaaaaaatggaatagggtctaactagtattgtagaaagattgtatagataacattccgcagaggcagaaaagaccaattttgaaagcagcaggtttcattgaatgagataaggtaaaaaaaaatagttaatagatagatgagtgtcaagtccattttagttgaaagagactccatttcaattttacatttaatgatgatgatgatgccctaattaatataatgctttacgacgagagaagcttagctgcttgcttggttgcttcccaccaatccattatggcatgcgccagatattgtgttgctttctaagtggtagttgcacgtaatttttcttagacctgtcaccagatcacatggatggaaagaactttgctttctctcactcaaaattgcttcttctttacaaccttaaaataaaaagaaaaggaaaagttgaataatccttaggttaggtaaatattatgatacactagatggaggatggaagaatctcattcaaaatctgacacttaataatggggttgcagagaaagggttttggtataagaaatgagcttttttatcatttaaactgatgtacagcatagttgttaccaacgttgatcgccttccatttacaataatcaataagacactgtaacaggatcaagaaaaatccctcttttctcagcaaaatatataacacttgtgtcttctctcttctctcccctctccacattcccatacataaagaatcccaatggctctcacagaaggggtaatcgtgttgacataaccttccacaatccaacgtcaacttcagggagagttgttccagcccactaaggcattctcggtagtgaaaacttgtggtttgatgatggtatatttacaatctcagatgtatcttgctcttggggacccaccaggagtatgagccttacgctgaggtactatttcacgaaagggatcgcgagtgtaagatacggttgatgaccttgttggatatgaagagtactcattcatgttatatgaagagtactcatttatgttatatgcactttgtcccatcatagcaaaagttgggtgaggtggagaaagaaggaagctcctctgtgctcctcctgcatactgtcgtaatggactcgaacaaggtgacacgggcaatgatgtaattgttcttgcattatccctgcacatatgttcatcgatgttatgttaccatatcagaatcataaagcattgagacaacggtattaaataagcttagtacctggggctccttgtgcctctgggaggtgtaaccacaggctctagaattggctgatcaaaaaaacaaaataaaagaagagcaatgagaaatggcttaaccatgaatgtaaatattgaaagtttgacattaaaggaaaaacaaaaacaaagcaagcctagcattaaaagtggtcttaaaactcttccttaatacccctttgtatgaaatgggatccaaatatataaaaaaaaaaaaaaaaaaaacatgtcaaaaggcagagcagaaaaggaaacttgacctagttgacctacaaaaatataataaaagaacacagtgtacttgagaaatgatgttgaaatccaaaagaagaaacttgagtgatattgtgttttgaaaggaaatgcagcaattcacaccattttacccgactaatgcacaaaaacctgtaatgcagaattttacccagatatttatgacagcactgcagacctaacttcaatattatcaacaaaaacttattgtatgcatatttatcctctacttaatcagtaggcatgaaaaatacgacagcaatacacggtttattatctccaatactttagaaatatagtattcttgaaggcataccggcgttctgctaccatcaaaagcaaagggaaatgcatctcttgttatggtggtgttagcagctcttgacgttgtctgctcccgaatgaaagggtgttctagtagtttagctgctgaaggacgtgctaaagggtctcgctgcaagcataatttcacaaagctctttgcatcatgggaaagataatcaggaatttctggcatatctttgctgtttcctattttaaatattgctgctacctaatcaatagaaaatggaacaaacattagtcctacaaacactttgtaaagggtggaaacccacacagctatataaaaatgtgtttgaacattgtatcgcaccccttcatattggctccaaggaggtttcgatgttgccatttcaagaactgtacaccccaagctccatatatcaactgcaagactgtagccactggtattcattacaacctgaaacaagaggagaaacaattttagcatacttccatctagaagaggggagaggtgagcaatgaaaagaatggaaaaatggtaggtcaatggtcctgtctgtggtttttccttttttgagatgttgaattaaataaagtacctcaggagccatccagtaaggacttcccttgaaagagagcattgaattgcaattcgctatctgattcacaataaagagagatcataagaatcctcacaattcattgaagtgcagtaaggaaaagccttttaaactacattaatgattatatcacaaaaaatacttgaaccaaactactacatatttatttattcaaaaaaactaatatatatttatgcatcatatgggaaagctcaagataggaagaaagattagattcttgctaattttgacttgaaacttcccaaaccagaattctcactcttgacagccttactttattgaaagcgactgacaaggttttacaaacaataaccttgatctgatcccttcattgttctaaaaaaaatctcatatgcagaatctaagatggaccattacatgtttagccatgccgaagtctgccaacttgatttcaccgttaggatctactaaaatgtttgcccctttgatgtccctgccagtggaaagacattaacttaaatgttcagcaaaaaatcatgtaacagatatttaaaatacaatgatcagttacaagttacaaccaacctgtgcactgtatttcttccatgtaagtaggcaagccctgaaaggatctgcctggtgtagttttgtatgacaggttccttgaaggcaccataatcttgaagtaatttgtggatagagccgccagatacatattccaaataaactgatagtgcatcatcaacctaataccatgataacaaaaatttgttactaaatgccaacatcctcgtttatccaataaattacagcagaatgactccttgtcactcctctttgtgtcaatttaagtatatacaaaactccaaatcattgaatttttaagcacaatgtaagctcttaccaattcacttccatagtatcgaacaatgttttgatgtgatagctgactaagcaaatttatttcctgatgacagaaaaattgagtaagaagatccattagttgccaggatactaaatgaacaatgctaagagtcagctgttaaaatagaaattaagaactaaaacaggatgaagaaatgtaatgcatgatatagcctaagccaattgaacaaaagaaatacctggtgcaattgttttagactttctttagaagtatgatcatcggaaacaagtctgacttcttttattgcacacatttgtccaccttcactgctcattttaagaacacatcatttagaaataaagaaaactacaaaacaactagtagaaagtctgcagttccgtttttctttacattgtttgtgagaacagacaaccatactaagaaaaacattgcggttgtaagtacattaaatgtccagaaccatagttacctgttaaatccaatataaacatggccaaaacttccccttcctaaaagttttcccttcttccattttgagagtgtgcaagttgtaacttctgtgactccacaagatctagcgctgggcaagttagaaggactagtaggcgacccaggaggaagaggcagtgggtgacattgggttttcccttcttcaggcttcccagttggggactccagactcatggcagacaacataggatgaagaggtgatgtggggctggtgggacctctagacccaggaccggggcttcttggccttacgttttgcttggcatcagggtgtcctctgagatcaaaagatataacattgatcacactcagagctaatcatttaagcaatcattaatcacttaatcaaaacattaaaccccttaatggcctaaatcttttttttaagactaagataattgataacagacttgcttcgttgtacgatatgaatttagctaagacaaacacccgaacatccgaatgattaacttacctaaaaaagaacaaacatgtgtcccaaactccgaattttcaggaaccatatcgtaaacattacatatgtaaatattaaagtcccttattaaacttgatttagctagtgccggctaatcctcataaccattacctgatccgataagatcaaacgtctatcaacaataagacagaaggtaagaaacttaaagtttcagagtgattcattcactggaaatgaattaactgtttaaagaatatcagagaaaaacagacagtgtgtgaagcaacatactgaagatttattgaaaagaaaaatctccattataaagcaatcaaccctgattagaaaataaaactgattagaaagagagagaaagagcaaataaagctgagaaacagaacagatagcagacccacgtgtggaattttcgaaatgaagatcaggaaatccccatagataagggcagcaaactctgacaccatagcctagagtagagagagaaagagggataacttttttattttccaagaaaagaataaaagttcccaaattccaaacaaattaaagagtagttcatcctacactcatcattaaaaaaaaaaccaatatttctataacaaattaagccctcagaaaacctaatttttctgaagacaaaatcaaccaacagccacaaatttaaactccaatccgaaaatcaggagatccccccaaaaccaacctgtaaaaattcaattgaccattctcaagcccaatcggatgatcctccgaagagctattcgagctcacgctagaaacggagaccgacccagatcccaatccatttgcctggtcgttccccaagctgggtgtcgacgaaatcgaaggccgaggcaaagggtgacaccgagaaccatccgaatcgaatccagaaaacccagaagatgttccaccagggggaggaggagaaacgggtccggaagcggcggctgggaattccttactgaccctgggagagccacgagtcaagacctcgtcaaagctcttggacttgtctttgtttctcttgggatcgtttctggctggagatttaaggaatcccaagtgattagttccctgaggactgtgttgagtgggttgattttgagtttcgtccttgtgcttagtagatttttttccccaccaagcaggcattttttttttctttctttccttttttaattttctagttaaccaaacaaaaattaaaaaaaaaaatatccagagcaaaagatgaagaatctatctagtttctcttggtgtttggagatagaaaagatagaagagacgactgagttttgatttgagagaaagaaaggagagagaaggttcgggtgagcgtttggatttttatacaaatcgaacgaacaaccaaggaaggaagcaaactcgaggagggattgtgtacaaaagagacttttagagagagaaagtagaagtgggtcccacactcaaacagtgtgaaacagctcagctttaagctaagatacatacatatatataaagagagagagagag

SEQ ID NO: 111697 - DNA, 5738 bp, Cannabis sativa
ttcctttcttctacctcctcaccacgagaacctgctttctctactttggatcttggagcagaagtctcaaactagggtttattccttttaactcctctctctctcttctgattttgtgtgtactacttgtattttctttatttccatgtttatatacttgtatagagtcggttgatcaaagatctaagagttagttacaataacagttgtaactaacatctggttcttgatccagtagaggcaaatccatctaggattgagtcctttgtttatttatgttgtaaatgtgctgatgtagatatttgtatgtaagggactggttataagtagaatttactcaataaatatgctttaatgtactttacatttattagtgacttgacgtgttattaagcaatttgaattttttatgtctaatatttagaaattcattaactatgaattttaagttacaatatttatcaatggtgtgtattgaaaagaagaaaaaaaacatgataatatatttatctatttttatgtatacacatatatataaatattctctgcctttgaatttattaattttagtaatgttacaaccgtttttaggtgtgtagtagacaaaaattgaaggatcgattaacaactattttggcttctcatggaactggtttatagttaattaattaactactttattttttttgttcaatgatttctcgtgaaattagtttgaatgctttattttaaaattggttttcgaatgcatatttatctctaatatattttaatgttcaattgtgatttactctttaagtattttatatatttttttagggtgataataatgagaagtgtatgaagaaatccactcgtaaagaagaaaaagatgatgactttgaacttgtgaaaatagtttttgaagttgttcatcttattggtaaaaaagaaaatctagtagtatggatggtggtttatcaaaaaagagtagggcaaagacaaggatttcaagattgtatgtttataaattttatgattgatcgtatatatactttttatttgtttttttgcttttttaggtgttgtgtgtttgtattgtttgtattgattgtatatacaaaatttgtgattatgtacctctgctggagtatgcttcttggaagttcatagaggattgctagcaccggacatcttgcagttagcaatcgctcttaatcgaacagtgtatcagacgcatctacaaataacatggaccctataggaatctgcgatgtgtttgaagactcgatccagatatccccagatgacatcacattcagcctcaatcctggagaggttgatgaaccaaagcaagatagcaagattctacttgggaaaataatcatcagatacaagctgggtaaagctgcaattcagggctccctaaagctctcatggaatgccatcagaggatggaagtggaaagagatagatgatggtctattacagttcacctttgctgatagaaacgacgctatgaacgtcctaaccagacgcccctggtttgtgtgtggggccttgctggtaatcatgccttggccagcatggctaacaccggcgaaagtccatttcgacaaaatccctttgtgggtcaacgtggaaagtataccccctttttactggaacttatccaacctcaaagagctggcgacgaaggcttcccttgtttttgaactgccccatggcatagaagacgctgttggattgagtactttgaggttcagagccgctatagaccttaataaacccatctttgctggtttttcctcagaagacaaaagctgaaagacctgtggatacaatacaaatacgaaaaacttcccaaggtttgcttcaaatgcgggctcttcacacatgatcagaggacttgcttcaaagcacccactgtggttaaggacgaccaggggaatttctatccactatttggtacatggttgaagaaggatgcccaggataagtcgccgttcacatctccattggccaagtggttccaagactgggtcctgcaaaaaaggttggggagggaccccatcctacgcaatcaggtgaaggcccaaaaggcaatcaaacacgggggtgagacagaattgagggagtgtcgaatgcaatttcctacaaaaagaagaattgtcaccgactccgacgatgaaaatggtgacccagcggcagaggaagtcattacccaactaccacttgtttacctccaaggcattggagaatttgccttttttggcaataactccaaaagggccatgatcagtgaccttattgaggcagctgcagaaaactcaaaaagtaaggcaaaaaacaaagctcaaagggggaatgaatttgaactatatattaaccaaaaaggggaccatgagcccgaaaaggcagtaagtggaagagaacttcccaactcggagggagacaacaggtgtacaaaggccaacataatgtttaatcccaatatggtagaggtgagcgtgaccgaccccactactcaaattttcgtttctgcagcatgcaaggagcaaatgtcagtttccagtcaaaaagaatctcaaggaagcccctcaacaccctataaggcctccccattaggctctcaagcccaaattattcaatggccaagcaaggaatgttgggctcagccaaaagctagggaattgcttatgggttctctcacagtggacaaattccaaagggaaccaaccttattcaacccaattacaaatattgaggactttagagtccaagaacatctcaatggcccacgcaagaggaaagcctctgatggtttcattttcagtcccccaacggcagaatctaaacctgcatcacaaggagatgttgatgaacaagtgagtaaagataatatcaatctccatgatgttactcactccaattgccactcctcagatataagtcccacagtaccactcgatccaactccttttaatctgggaagcaacaacactagaagctcctccaaacacaggggaaaacccaagaaacagagcaacccaagtcatgcaggaggagtgacaccaaaaaagagagaaagaccgccaaaatctcaattgggtatgtcaaccactcctaagccattcaaatggaggaactcatccaagtcagcgaaaggaattggagctacaattactaatctttgggaaagaaaatcgtttgatcttaaggttgaccttgataaccactttgtagggattgaaaaatcggctttaacaaacacaaggtgtacaataagagaactaaatgatgtcaatcctggaggccaaccatcccaacaaccacatgagagtgtggatttttgctttggggctatggagacttgcccacaacagtctccacagtcgccatgaggatattggcatggagctatcgtggcctcgggaattccacgacagttcggcgattggcgacccttgtccgtcaacaccaacccgagatgttactgatatcggaggcccgtgtccctccaagcaagtttcaaagtctttgtaatcgcctgaagtttgtaaacagccactacattcctctagtgggtctatcaggtggatttggcttatgctggatgcaaggagtgctttgcaacataatcccaactaacaagttcttgatacaaggggaaatctcttcagaccccccaggagaaatttggcacttctttggtatgtacggtccgcctcatgaaagggataaagaatctcaatggagtaccattggagagatggtcctttccaatcaagtgccaaccttgatcctgggtgacttgaatggcaccctccgagactctgaatgtctgaattattcaaatagaggtaattcctcttgttatgcctttgatctccactgaatggtgagtcgtgcggtgctggtggatttgggattccatggccctcccttcacttggtccaaatgcaacaacaaatccccctaggcaggatcaattaaaaaagcccgtctagaccgtggtttggcttctacggattggagaatcctcttcccgagtgcggtgatcaaccacctatctgctatggcatcagatcatagaccaatcttacttgataccattgttggtgttaattgtaagggacggcagtttaagtacaaaaatatgtgggcaagggataagcgttgtttttgggtggtgaaagaagcatggaccaaaagactccacctgaatcccatgataaacttccatcgaaaggttagaaacacttgtcaaaaactgagtcattggaacaagaaacaattcaagaagctcagccttcaagtgcaagagtcaactgttgcgttggagaatgcggagaaacaccacccggatggcttgaaaacaattgaggtagccaaaaacaacctcaatgaagtgctgaccagagaagaaatacattggaagcaaaaatcaagaattcaatggcttcaggagggcgataagtgttcgaaattcttcatcgcctccataatcgttagaagaaggaggaactacatccaatgtgtaaaaaactctgtagatggaaactggatcagagacgaagatgagattgctaagtgcttcctggagagtttcatagagttatgcaagggtcaaccgcaccatgcaaaacctgtgttatatgaagtgttccacaaacaaatcgatgaacaagacaacctcattctcaatgctcttccagatgcagcagaagtgaacgctgcaatgtttgaaatgggaaaggccaaaagcccaggccctgatgggctaccaccaagtttctacagacatcattgggaaatagttaactatgatctagtggagatggtttcttacttttttacccactctgaactgcccaattacattaatgacacttcgtttatgcttgtgccaaagaaggacaacccgacactaaccaaagactaccgacccatagccctctgtaatgtagcatataaagttatatccaagataatcgcttctaggctgaggggtgtaatctagaagatcatatccctgaaccaggcatctttcgtcaaaggaagaaacattgccgaaaatatgatgatagctagagaaattgctcaatccttttccaggaagaaaggaaagagaggatttatgatgataaaactggacatggaaaaggcgtatgacaagatggagtggaaattcattttgagtgtcttaactcacattggattcactcaaccttttactgaatgggtgagagcttgcatctctattaagcaaattaaactctttctcaatggtgcaattgtcagaaagtttgttctcgagaggggtcttcgacaaggggacccgctatccctgaccctctttatcttagcggcgaaaacactctccagacttctccaacaaaaagtaaggagagggttgatcaaaggatttaagattggtaggcaaggaatgacggtaaaccatcttatgttcgcggatgacatcattctctttggccaagaaacaataagagaagtgaaggcattccgggaatgccttgatgtttactgtcagtggtcgggacaagctataaacctacagaaatcatccatatgtttctcaaaaggggtgcaaagaggaaaagctcaggctatatccaaattttgggagaataggaagatgcctcccaatacaacatacccagaccttcctctattcagatcaaccaaacgtacagagtgttggaagttattttaccaggatctcagatctactcaca

SEQ ID NO: 111698 - DNA, 3751 bp, Cannabis sativa
  modified_base (3608)..(3631): a, c, t, g, unknown or other
  modified_base (3697)..(3699): a, c, t, g, unknown or other
agttcctggtaaaataacttccaacacctatcttattaataggactcataaacccaatttaaaacatattttctcttttcaagtgctcaaatctaaaccaccaaactatacacacttaagagcctttggatgtttagcctatgcttctacattgtatgttgatagatctaaattctccccacatgttgctccttgtattttcttaggctatcctattggcatgaaagcctacaagttgttaaatctaaattccagtacaattttttgttctagagatgtgcacttccatgaaaccatttttccttttttgactgatgaatatcataattttttttgtgatacagtggctgatatgcctcctaataacaaccagcaaagtgatgattgcataaccatcttgagacaatagaataccaataagtctgaataggtttccaatagcagcaaacctatcagaattactaacaagccttcttacttgcaggactatcattgttcccttgcacaaaataattctgttgatatgttgcaggattcaaaagtcactccttatcctatttctcaagttattaattacagcaggttgtctcctgcatttcgagtagccattttggctatttttgccattatgaacctaaatttttcaatcaagccaaaggcattcctgagtgggataacgtggatagtgagatagatgcccttgagaaaaatcacacttggattgttgtaacattacctgctggacaccatgctattggttgtagattggtttacaaaataaaacttaatgctgatgcatctgtgaaaagattcaagacaagattagtggccaagggatacaatcaacaagaaggtgttgattacacagatactttttcccctgtcaccaaattagtcactgtcaaacttgttcttgttcttgctcttgccgcatcaaagggatggcatttacatcaacttgatgttaataatgctttcttacatagtgatcttcatgaagaagtatatatgactttacctcctgtgtatagtcttaaggggaagcttccaccaaatgttgtatgcaagcatcaaaaatccatctatggattaaaataagcctcaagacaatggtttgccaagttttctagtgttttaattgaaattgggtttcatcactctgccacagaccattccttgttcatgagacacaatggagacagtttcatcattcctctaatctatgtggatgatgtaattttggctggtaatgatctttctgaaatagagacactcaagaaatacctaaacagcaagttttaattgaaggatcttagtaatctcaagtattttcttggtttagaagttgctaggtctcctaaaggaattgtcatatctcaaaggcattatgccttacagctattggaagaccttggacacttagggtgcaaacccatgagcactcctatggaagctaatataaaactgagccaagatgaaaaggataggccaactgaccctaagctctatagaaggatgatagggaagttgcaatatctgaccattaccatgccaaaaatctccttctctgtcaataaattgagccagttcttggttaatccaaaggctcgatatatgaaggctgctgaaagagtccttcagtacatcaaatattgccctggacagggactgttcttccctgctgcctctgaaattcagttaagagcctataccgatgctaattggggtggcttgcattgacaccagaagatcaactacgggcttctgtatatttcttggagattccttgatatcctggaagagcaaaaagcaacatgtggtgtctcgatcttcagttgaggctgagtattgagctatgtctaataccccatgtgagatggtttggctattgtctgttcttaaagaattaaaggttgatcacaagggtccagcttggttattttgtgataataaggctgcacaacacatgccaaccttgtttttcacgaaaggacaaaatatatagagattgattgtcatttggttagacaaaaagtgcaagaaggagtgattaagaccagtcatgttgcctctaaagaccagcttgcagacatatttacaaagtcccttttcccactcaattcaatggtctcaaagacaagatgggtttaattagtattttctctccatcttgagggagagtattgaagtttgtctcattttctacaagctgttatcaaatgtttctgttttgacagttatttttagttaggaattattagttgtagttagttatgttagttgcattgcttgtttgtaacaattgttaactaactctcttgtactcctttgagcttgagcactatataaggctcactcttgttctatcatcaattaaggaattctatttcattctcttcttcttcttttttctgttttttcattttctctggttttctattttctgtaataatattttcatacccaaaggaaagatatatttaggaaatctaaaaaaaacaattaacatttttctcattttctctctggaaataactcttgctcgtgtgatgagaaaaaccaagaacactttatattgtattttctatcaacccacattgatccttttgtttagtaatattaattgatatggaagatctgatgtgagtttcattactattcttagatacaaacataaaaaaaattaagaaatatattatttttcagcgagcatacttgattgtcaagaggtaaataatctttgatttaatatatttgtatatatatatggtaaatattattttgtaccatgtgttttgtaaaaattattaattggacattctattttgtactttttctcaatatacctacagatcatgccctccttccaaggtctcctttgatctctcccataatcccaagctccgattcgttaccaccaatgtatagggagggaacgatcattgaatttactataatgtttgattttcttcacttgtttggttgctcgaaaaatgttagaatttaattgagaggagattttgtttattataattattactattgacattgtaattcttagattttggaaatattgaggtattggtcaattttggcactctgctggttgagaaaggaagaaacttggcattttgtttagatcagttgttgtgtatttcacttagttgaatacatatttcctttatcaaatagtgaaaattgcttttggatagactgaattggtttgtggacatttattttatatttattttgtcaaaattacatgttaggatgatctttttgtttaatcatcttcttacttttatggtctcatcatatatgtactaacattacttctcctttgaaggttgtcttttggttttgacaggattttgcattgtcaagataatgaatggtgggaattctccaacaatggtgcaatctaacttcaaaaagattactgtggtgtttgcttttgctgggaaggacttagtagacatttttttattacgttttttttttgttttttttttgactaaggagtttttattatgttagtttggaacaattttatttgcacacatattagatattcactaccaaaaagtttacttttagtcacaataaannnnnnnnnnnnnnnnnnnnnnnntgtgactaattataaattatcatccttatgttgtggctaaaaagtctgtggctaaaagtattagtnnnaaaaattacaatttattgtgactaaatgtgtttttagtcacaatacttattg

SEQ ID NO: 111699 - DNA, 5121 bp, Cannabis sativa
aaggtagtcaatgacatgtggctggctctcctgtttctgctttgacctcctaaaccgtattccttcgtcaattattattattattattattcaatagaaaaaatggcagttttgtgaagtaggtctttttaaatccacacagataaatattcaaaaacaaattgacaaaatccacgtagagaaaccactggttcagtacctaaaaacttttcaaagtattataatataaatacaaattttcaaagggcagtctgattattatattattatacatgcaattgcttaaagtaaagaaggccaagtagctgcaagggccgccattaaaaactctttccttttgattttcgtaccgttaaacctcgacctcgacccatatctatttcttcaacattccattttctttattgtgtttgctcatgcttgacaacaatgaccgcgtatagccgaactccgtgtcgtgtttcaagaatttggcttgtcgttttcgttgtctgtttctttgctctgttttgctctgccaaggataccatttctcaagaccagtctatacgtgacggagagagctcctccgggaatctagtgtccgccggggacatatttgaactgggatttttcagcccggtaaattccacgtcacggttcgtcggaatatggtaccggaaccttcttgagatcacggtggtttgggtggcaaacagagaaaatgctatcccagatagaaatggagttctgacactccaaagcgatggaaatttggtgattttagatggaagtaataattcgatatggacgagtaacagtaacatgtcttcggttgtatcgaaaaacttaacagcgaaactttctgacgatgggaatcttgctctctctaatggagaaagtggtgctgttccttactgggagagtttcaacgatccaacggacacttatttgcctggcatgaaagttgaagtgagcgctgcaaaaggagaaaacagggtcttcaattcatggaaatctatttatgacccttcaccaggtaacttcactatgggggttgatcctcgtggatcgccacagattgtgatatgggagggatcgaatcgacggtggagaagtgggcattgggattggcagatcttccttggtgtaccgaacatgacagctaattttttatatgggtttaggctaagcaatttagatcaagggaaacagttcttcacttatgatactacaggtggtaaaattaagttgaggtttcgggtggagtggaatggatttgaaaaacagtataggttgggagagggtgataaagtgtgggagctcttgcaatcgcaacctgctgagaccaatgagtgtgagctttacaataagtgtgggaaatttggtgtttgtagctcatgggaatcggtcaagtgccggtgtatgaaggggtatgtacctactgatttggaagaatggaacaagggaaattggtctggtgggtgttcgaggaaaacatcgttaaagtgtcagaatagcataaatggaacagagggggatggtaaagaagatggctttactgcggagagatgggtgaagctgccagactttgctgatttggctcagatagttccccctacatcggcgaaatgtgaggatgagtgtttgaagaattgctcttgtatagcttattcatttgttgacggaattgggtgtttggtatggaaagaaaccttactggatgtccaacattttcaacgaggtggagctacgttgaatattcgtcttgctcattccgatctaggtacactttttcattctcacgctcttaataacccattcaacttatccatattggtatatcacgcataattagtttaattaaggagtaacttacgttttgattactactggtatatctccaaatccattccttgagccccgtgtttttttttttttggattggattattaaacctgccctttaatcttgtaattaaggcttctttttttctttctatgcaacagtttttttttttttacttctctttttagcacactatcaaggaatggacaattcaatacttggtttgttgctttgtgtcttcgaaaacaaaaccaattcaagttttcagtggagtaactgttaaaaaaggaagaacataatacgaaagacaaaagaattagtatattttatcaaaatgctacttgtggctagctcaagtggttgggtgggtgggtgtggtgggggttttccctgattttatcaaaatgtatagttgatcaaaagtttgaatgatatggtacgacttatttatcacattaaaactgccgtaccgtaaaaaacttgtcctcggttgaatgtgatctaaagatgtcagaaacaatctgatgcatcttttgcaaatattgatttaatttttttttttttaaaagaaaaaattaccttacaaatgtacaggtggcggcagtagcagaaaatctaccactttgataattgtattgactattgtgggagcagctatcttagtctttatatggctagtgtggaggttcagatataaactgaaaagtgagcattgaatatttcatttaccttattttgtacagttattatgattgtctttctagacagataaagaaaacaatgtctcaatatgagcttctaacatgatctctcatcttgttatattcagttttgccaacctcttcttcaatgccctggacaaggagcagtgaaataccaccatcctctggggttgcaaagagcaaagaatattcaacagaacattcaggagcagttgatgttctgacagaatgtcctgatggcagtggcccagaactaccattgttcagtttcaattttgtggcaatctcaacaaacaacttttctgaagaaaacaagctcggacaagggggatttggacatgtctacaaggtatttaaatgtttaacatgtctacaaatactgattataatttgaaataatggtcaatggtgctaaatgtaaatatacaatcttctgttaccagggaaagcttccagggggacatgaaatagctgtaaagaggctttcgagaaaatcaggacaaggagtggaggagtttaagaatgagattatccttattgcgaaactacaacacagaaatcttgttagacttttgggatgctgcattcaaggagaagaaaagatgttgctctatgaatacatgcctaacaaaagcttggacttttttcttttcggtatgtcagtttgccccttatctttgttttgtctcttaaagaaaaacactagtacgaattcttgcaataaagattcttttttttttggctgtaaatttatatattttctttttgtaaaaattgcagattcagagaagcaagctctactaaattgggatactcgctttaacataattgaagggattgcaaggggactcctttatctacatagagattcaagacttcgaataattcatagagacttaaaagctagcaacattttgctggatgaagaaatgatccccaagatttcagattttggcatggcaagaatatttggagggaaccaaaatgaagcgaacacaaaccgagttgttggcacatagtaagtgtagcatcgatctttactcactttgacaagattaaccctctgaattaaattctaatgatccatacttgttgaaattgcagtggttatatgtctcctgaatacgcaatggagggtctcttttcagtcaaatcggatgtatatagttttggggttctgctgttagagattgtgagtggcagaaggaatgttagctatcgtaatactgaatacttgagccttattggatatgtaagtatatcactaactatgttgtctagttttacttgcaaagtacaagcaggctaaaattgaattattgaataaaatatatgtgcaatgttttcaggcatggcatctgtggaatgaaagaagagcaatggaattgcttgatccctctattgcagatacatgttcccgaaatcatgaagtgctaagatgcatacaagtaggagtgttatgcgtgcaagattctccacttcatagaccgaccatgtcatcggtgttgttaatgttggagagtgaaaatgcaaatcttccattgccaagacaaccaacatttacttcgatgaggggctctactgtcgattcagatttttgctcggatggccccgagtacgcatccttaaacgagttgactgttacaatggtagatgggaggtagtgatttgaaattatttcttgaaatataatatgtagttcatatgtatatgccatttttgttgagaaaatttattagtgtgaggttttcattagctattcattagttcttatgcgtgtttaagagctgaaaagaacaaaagggttacagattgagattgaattttgaaacagatacatgtgtataggaaactgttctttattttaattgataattgtatgtatgtaggaacaagtcacaaagtcaaaacttgtagataagaaagttttgcaatggatttgatcgttgtagacaaacttgaaactcctaagcaaacaagcaagaacacaaacttattaatctgagattacataagaagtttatgtggttcgctgaataatacctaccatcaactgcaatcctaagctagggagttttcttactgactaaatatataaaattaaagaaaaacttaattgtaataccgtatacactttaattacattaatatcttaacaatcaatttctaatattgttaaatgtatttttttttatacaattatcatttcactaccgtcttttaaaaaaattattcatttttaatttaagagaaacatttcactattaaaattcaaacataataagtaaaacaattaaaaaataatattaatacaaaatttataatttaattattttaatatattgtacatatgtttgggggattccatagaaaaagaaaaaattattctttataattaaaatagatattatcatgtatatatttgaaattacatatactaattgttatagatttaaaattaggtatattaactatatgttggatattgtatattattgggaagatactttaataaatgggtagatgtaattttaaatgtataacaatatagttaatatacctaattttaaat

SEQ ID NO: 111700 - DNA, 5436 bp, Cannabis sativa
  modified_base (33)..(37): a, c, t, g, unknown or other
  modified_base (1617)..(1618): a, c, t, g, unknown or other
ggtgcatcttatttttcggtagcccatcacgannnnnctccacagttaagcatgcttgacttggggcaatttcaggatgggtgacctcctggaaattcaagttcccatttccattatactttgaagaaaaaagaggtttgaggcaagaagacccaatgttcccattatattttgttcttgagataaaaaatttgtctcaaatattgaagaaaattaggggggaaaaggaattcaagtttcatgataggtgtaaaagtcttgagcttaatcctttatgctttgctaatgatgtgctcatgttttatcatggtgactcatgatacatattttgcttcgaggtttaaagtattttttccaaaactttagggttatttcctaatgacactaaattgacgatttattgttgttgcatggataagaatgaagcgcaaagagtgctagatgctccagggtattcgaaaggtaattttccttttaaatacctcggagtgtcaatttgttcaaagagactttcaaaactggattgtgaaattttgattgagataatggtgcaacgagtgcgcctatggagttctaggaacctctcatttgctggtagggccacattgatcaactctgtgttgattgccattcatacttattgatctcaaattatgattctaccaaaaaaattcttcaaaagattaatgctatttgcaggagttttttatggaaatgagaagtagagttagttggaccaggcaaggtttcttggagaaaactttttactccaaagtcagcgggtgtattggatttcagagacatcattacttgaaatattgttgctatatggaattttttgagccttagctacaattttttttttttttttggatcaattggattcataatagttggtattggatcaattggaatctagaagctttatttcctgtgctaataaaatagaaatggaatatgttgtgctttgtaattctatttccaaggttgattagaggaagaaagtttaggaaaagtttagccttctaaagtataagtttatcttttggttgactatacttgatagatggcaaacaaaagatagattgtttaaatttagtattgcattggaaagtacttgtgtagtttgtggcagccatgaagagaccattcaacatctcagttttggttgtacaaacagtaataagattttggaagctcttaagaattggctgaattggaacacttcaactactattgttcaagaccttttgaagtgacttcgaagtaacaaaatgtgaaagtgtaagcgcaaagtgtatgctacaatggaagccactacagtataccacatttggagaaatcaaaacaagaattttggtaccaaagtgtgtaatattttcatgtaattgttaagaaaatttagtaagataagaagtagaattcattttcagttgtgaaaacaaatttatgttatagatagattcaaggcaaagataaaggatcccagaataagtaaataccgtttcaattgtctcaacaactagaactcgatttaaatgaagaatgaaaataatggagacagagaaaaggaggattagagaccgctcaatataaataaaatgtttaaaggatttnntttgcgagttatacaacttgagttatgagatttcaaattacaaatactaataatttttttgttgggaaaagtataataaccaagtatttaattgctcaattataagcatagatagaatcttttcaggccaagtggtgctattagtttgtacataataagttgtgaaatgatcaaatacatactcaactgattcaaaaaaaaatatatattttattgtgataactgctacaaaataaaatttgctcacataagtgagagttggattaatcttgtgttgatattgataaaaaaatatgaaagataaaatattcaaagtagatttgattcattgaggagaaaacaaaataagatagtactaattatatattgtaatatttaactagggtttagcttatctggttaaaccaaaaagtacataataagggaaaaaataacttattataattactagaatgtttgggatgatcatatctaattatataagttaatattattctagttaatattgaagttgaagccataataatattcatcattataatcataatattggcttcttttttttctttttccagtcaagtcagttttagaaaattattattattataaaatattaatttatattgtctgtttcacatactatatatatatatatatttaaatttaatattataatatatatgcattatgtatattacattttaaaaacttttttatatatataatattattcaaaactagccatgcactgatctactagggtatttttagctgagacatatatattctttaatgttagtgtggactttatcttcgattaatatttaattattaagttaataataatgagaattattataatgttctcactcactatagatatattaattattatatgtatgtgtatcctcaagaattattaacgaataatttatatatataattaataattctcaaattactaagatcgactaattaatattctcaaacaagaaactttttaactttaaagcctaaaaagttgaccgatccaacaaagttttgtctactttgacttcttttctgaaaacaaaagaaagaaagactgaaagtgattagttattaaaaaaagttcatttatgaacatgaaaaaaaagtgtagtaaatttaattattttgtgttacaatatgagtttcatatgatgaattcttcaattacatgtagaaaattaaatatatgttcttcaatataaataaatactatttttcataatgagattccaagttcttgtacgtagaaaccatgcatgcaatatgtcgtgatatatatatatatatataaccatatatatatatctttataataatcatattaattatagctatcactggctttgtgtgtgtgctaattagttctaatctaaccaacaataattaaggaattatagataaaaggaataatagtatgagaggagttaactgatcaactcatgactattaagacataattgcaatcagctcgaatagtatgggaggagtgtgtgtgtgtgagttgggggcaagaaaggggttcgatccccatatgtatcaactgattaggccaacttagatacttaagttgttttttttttgaattgtgagaaaaagacaagggatgtgtgagatgggggatttaggtattttgtaaaagataaagaaattagtgaaagagagaggttgaaattgagattaccttacaaagttctatgtctggaatctccactttgcctttgattgtaactattttttcgtatgagtaccatatgagcccgaagtttctgagtaagtcaccgaggatgtaaccctaattttgggtgaatctcaataatatttgtgtgccctagctctaatttgttcctattcactaattcactcttggatctatttgtgttttatgtgctaattaatgagatagttagtagtccagtgatttgtaagggaaaacactgagtaagttgtgcaatctcacattacctagaaaaagtcaagtgtgatgattatgagactatgtaggtataagactacacaattgaaaaagatttaaatagattgattgatattatatatatatatatatatattaacaaagtgcatcttattttctggtggtccattacgaaagaactccatagttacacgtgcttgacttggagtaattttaaaatgggttacctcctaggaaagagtgaggacaaagcatgcatgaaaatactcatgttggtttgtagggtcaatagtcattccagaaagcaaccaaagcaatgtacccatatataagagccataaatccgtaggggaaggcccaatggaggctttaagcggggacgtcacaaatggtgtcaaacccttaacccagctggaagtgtggtcgacgaggacgtcagaccccgtaaggagggtgattgtgacagtcagtagccccgtgatccacaaagagaaatactgagaaagttgtgcaatcccacattacctgagaagttcaagtgtaataattttgagactgtgtaggtatgagactacagagttgaagaggacttaaatagattgattggtactacctatatcaatgaggtgcatcttattttttggtagcccatcacaaaagaactccatagggataatttcaggatgggtgacctcctgagaagttttcccaagaagtgtgtgagtgaggacatagcatgttggaaacactcgtgttggtttgtagggccagtcgtcagtccaggaagcagccaaagtgacatactcgtgtataagagccatcattccgtggggaaatgcccgatgaatgcttgaagcagggatgttacagttaaacaaatatctagggttatagtttccctagttttgagaggaaagtttggtacactttctctcagatgtacattatatgcactacaaaaaaaattagctttagtcataatacttgttgtgactaaaattaaattaaaacttgtatctaaagataatattttagtcacaaataactttttcttgtgatgagacaaagtgtgacaaagcaaaggtacattacctggctagcggcttagaatcgtctaaaaactccagatagacttcacaagatgagaatagaaagaaccagagactcataatcaattgttctttcaatgtaatttcagtttgcaatgtactaaataagtgtggaattagataagttttgggtctaattaattctggttcaaagaagtgttaaattagattcgacgagccaagttgagtaacataaaaaggagagtatacatactgatgatttttaataattgtgtgtatatgatttggaaagttagaaatagagctataaggaacaatatgttccaactgtaaatagttttgttaaagaattaaaagagtaattgtggatataattaaaaatattagtttaggggaattgagttgagaggatagagtgtgtggatagaaaaattgatgggaggaattaaatataatggaaaaggtagttgggaacttgtacaaatttgagatgagcaatacaaatgactaattggaaaactttttcttgtaattaaaagctacatttagtcaataaaaaaatatgttataactaaaaagattattactaaaggtaacttttttttgttggacaatcaattaggatctaaagttgtttgaagtggacgaaaaataaaatcaaggatatttgtgtcgaaattctttcaatatttacaatttttataattaaaaaaaaaaaagaaatttacatgatatactaacttttgttatttttttacaaaaatactgtcagacggtatttttta

SEQ ID NO: 111701 - DNA, 3448 bp, Cannabis sativa
tttttagtgagatgaatattcctattcaattataatcttatcttttggctgatttagtaaattaataaaaatttattttgcattaaaaaaaaaaagtacttagcagacaaaacaataatacaactggtcctggtacagctctaatacttcttaatcaaatgtaattttctgaaaaatagaaaaagaaaaaagaaaaagaaacatcttaaaagagaaaagattgagttggctggctctatgtggtgcaagtcagataaataccttaaagtttaagatgattgtcgttttgtgttataccttagattttagaacaagtaaatgccgagaacgaggcaacgaggcactgtcataaaagggacagttgtcgaatacctatttgttggagtattacgtaaatgacgtggcatatcagtcccatatttttctcactttttatctccaaacatgccatatgcatgtccccacgtacttttttttttttttgaaacacatgtccccacgtactttactcttctttaatctttctaaagaaaagagaaaattataatgcatacgtcttttagcctatatggtattattttaataatatttatcattactttcaaaaattgacaacctcaaacccaaactaattaattaatttttcaactttttagtttgattattttttatgaacgaaaacgtaatgtaattatttaaattatgttatagttttttaaataactttaaatttattattttgaaaaagaattcaaacaatatttttctcaatgtatattttatttatttgatatcgaggttaaaaaaaattacaaaatggtgcaagattgtacaccatcaagatttttttaatttcaaacgacccaaactgggacctaaactccggactcagacttggactcgaattcgaacctgaatctcgtaccccggatcccaaaccctgaccctagccccgaactttaaacctgaaactagacctggaccagaaccctggacccggatccaaaccaaacctttgatctgaaccatggacccaggcccggagtataggcccatggttaggttacgagttcgggttctaggtttgggactcaagtctaggttcaaggtttggggtccaggtctatggtcagggtgtgggtatgggttataataggtttgggacccgagttcaggtcttactctggacccacacccggaccctggactcagacccgaaccctagaccccaacctggccccgaacctcaaacccggatccataccctgaccattgacccagactcaaactctgaaccccgaacccggactcaggtcccaaacctaaacccagacttgtaccctgaccatggacccagaccccaagttcgagtctgagttgaggtcctgggtctggagtcggggttcaggtccgggtccgagttaggctatgggttcgaggctggggttagcatcgaccacataccctttgtaaacattataatacaagctaatacaagtcatttgttatgtattaaataatacaactcacattatattaaaatttatggtcataataattggtacaatacaatgttttatccaaacatagtttatttgttatttaatctaatacgacccttatacaacctaccaaatgagctctaatgattttttttgctgaaatcaaaacttcataaaaccaaataaaggaggcaagatcaagaacaagaccagtcattagtagcaagaaagggtgctaattccccttcaaaaagaaatcgagcaacatcatgggacgcaacccaaggtgccaaattgtgagcaacataattatccttacgagggatccaaaacacacagctcttaacatcaaagttcaaacaagaaaataaatacaaaaaaagttagtaagtttctaggaggggatgttagaaaaaaaaaaagtttataggaaaagatagaagagtttctccatgaaccatattaaaacaatctgagaaaaaattggcctccttacaattcatcaacacacacagggagaaagcatggcaaaaagccccaacattcaacttcaaatgttgaaccacatttgactttagccgtcacaatatcaataaagtcgccatcattgttatataccatagtaacagtaaaggtcatatcaccacgaatagccgcatttcatagaaattaagtttttcaaaacgagatgggttgtcagccattcaaccagacgatcattagaacaagacccctgtctctccacacccctgcagtattcattaacagtagccaacatgttcgcaataatcgcataaggtaagggggaagatccctaatgaaaaaaaaaattgatttctagcgtgccaaaggaaaaaacagatataattagtagcaaattgaaagaacttttactaacaaaagtcgaaatagaaccagtagctgaagaaaaaatccaggcaacaatcttggaatcagagttgaagctaatcaaatcactacgaattgcataggggctggaaaaccaacaagctctagcaaaaaggcagtgagaaatagatggaccagagaatcaacattacctttacacaaatgcaatgagatttgttcccaaacacaacacgaagcccatcaccacatgggagaacgttctttctcaccttccaaagaaaaaattttacacgcttctggataggggcaatgcaaattcttttccacaagctatccaaaccaccaagtcttgacttaatcaacaaaacataagctttcctaacagagaatgaaccatctgttacgttgaatctcaccaaataagcttatcttgaccccgctaatgatagcctcgagtttatgacctttcaaactaaccaaaggcgtgaaccaatcaccgagaaggctcacttcgagatcgcccgccccttcgatactaagattgttaagcataactacttttggttgttgaattcttggattgaaggcagttgtatactcatcctaactgagctatggatctaagaagaatgccatatatcaaatactttttccatcaacaaagagctagcaagtctttgcccgaataaaattcctagaagccataatgcctcgagcaaatttaaaggccaaatctggaagagacgaactccaaaaggaatcaccacgtttgtaatatttagctcgaaaaacatgacaccacaaacggtcatcaccttttttcaagaaaccaggcgagttttgagatcaatgccatatttagatcaaaaaacttcttgatccctaaaccaccaaactccttcggcatgcaaatagaatcctaattggttaaggctaagtactgattcttcttaaagcaaccaagtgcatgtttggcatcataactaaaaactattttttgtttttaaaaatagaaaattattttttgaaaacaatttggcttgtttggccttatttcttgaaaacagttttcagaa

SEQ ID NO: 111702 - DNA, 2679 bp, Cannabis sativa
gggggggggggaagccagaaaaaggagtcaccaggcctgaaggacataaggtagaaccaagggcagctgagcttgaagttacatcatcagtaggctaaaagtctcttttgattcagtcgagtccttgggaggaagggcttcttgacatttatactctctagaagggcttgattcttctcagtatgtttcctcttattaagttgtgatcctctagccttaagaggaatatgaattgggctagaagttaaagcttgaggttcaaaggatacagatgaacaattatcagtagtgaaaatgactaagctctattgaataacagttttagattgagcagagctcgagcgaagatgattcagattaacctaataagtaaatagagtgacaccttctgaaataaaaaacaccttctctattcaattcggtcgtagatatgaaaatcaaacgttggagatctttagacatcttctagtcgtgtgcatcaatcttgatcttaagaagtgcaatctaatctggaaggattttttaaagaactaatgagtcattagcaacatcaaccttcttcaagtaatcttgataaccgatagtcaattcaataaaattatccccaatcatgtttgctttgatttgtagggcaatagagtcgacattagaaggtgaatagagaacacgcaaatgattgaagagctccttagttaggatgtcatctatttgataagttaggtctttcgagatgtgggtaatccccaatttaaacaaggtagctttgcagactgtaaaataatttctcgaaggccaataaatcaaggtggaaaattggttagcaatggtgaaaatttcataattaatgaccctggcttcctaagtgggggcatgacttttacccctaccataggagtatttcttatttcagcaccaagagaagttatattctaattttttatgtatgttagtgtaaattaaaattatgaaagacattttgtatttttttgaaaaattctaaaaaatttaccgcattaaaaataaagtttaaaatagttattgtacacataaaataataaagcacgatgcaactaattgtctcaatcatatttttatcaccctaaattattcaatattttttgaaaacgaacatgatacctattataactgtaaagtatattgtcatataataaaaaaatggtttattataattttctatataccgaaagtaagaaataccccgatagtatgagcaaaactgatgctctcacctaataatttttctaaaatggattatgtataaatatattgccaataatttaatttgtaagatgaaaaatatctatatatatgtgaaagctagaaggaaagtgttgtgttagagtaataacgtacataagtggaacaatagtcaggggatgatgccaaagctctgcgccatataacatgatgatgatcatcatcatcataagacaacaattttcttctgtcatcatcatgatccatctttgtacccttacatggaagcataacatctccaaactttgcaggaatgcatattttagaaatgtactgtgtccccacagtcagtaatagagatataaaccccagtagcattagttctgcatgtatatatatatatatatatccaaccaaaaataatatacatattaagttatatatatacatgactataatataataatattagataaaattagtttaatcaatcatgatcaccagctttaattttctccagagcttcgatcatagcctttttatttctcttcttgaaaaactgcatgcatgcacgtacatatgtaagcaatattaataattaaagcttatatatcctcttaatcataaactcaatgttacctttccaagagaatgaattgcatgttctataagaacagaaatgataacaaaaatagaacaaacaagagccacagcccatgtaggtgtctcttgaagtgtcctttctccaggagcccctgcagccatgtctattctacccacctctgctaccttttctatatattaattaacttaattagtatgtatttatgtatatgcttcttttaatataatcaatagtatatggttggaaacttaggttttgatggagaagggaatatgcttaattatgagaatttaaaaaagtactataagtttggaagaagggaacaatatatatgtcaatataatatatatttatttatatataggccgttgtgaatatagagtatagtgctatggtttttgtcattgtattatagttgatgtcttttgtgttatgggagatgcacttatatattaattactacaatatcataaatatatataggccggctataatttcattgtagtaacatccaatataatatttagtgcatatattttgtaaataggtttctacaataacaatactttattaaaattcaacttttgaaaatacattattgttagaatttttagaaatacaagtattaatagccaatatacattaaatcagaaataaatttaaattaagtttgaagcggaagcatttaggatgattattatcgtaccgcacttaggatcactactacaaatatcagaattcgtgatggtcctaaaaatgatttttttcggggaccgtcgctgaaaaaattaagtaactatttaaaattgtctggaaaaatttagtattcccgacgg

SEQ ID NO: 111703 - DNA, 4115 bp, Cannabis sativa
ctctctctctctctcatatttaaagaattgaattttctgtagtctgatttgaattatagcttcattatgtctcactctgacattttatcaagacctggcaactcaactttgggaccttagatggcagatttgcatccgccaattattacttaatacctactaaaaaaccatcagtgtagaggtatagttatctattcaaaaactcttatcaagatataatgccacttgatagtttctcatcaccttcttcaccaaactgataatgctcgtatatttcgagtaataattccctgcatggtacaacagccccaagcttgatacaagccaaaaaagcaccagaaagcttgcgatgtagactgtacgcctcatcaggtggtggtgtgagtctgtgtttcagcattgtcgcaccgaggtttgaaaggctttgtgtgatattggcagaccgaaagtcatatccaccgggtctcgagaaaggcaaccccacaacaaaaccagcttggacatgagtctctagcattatctctgactccattcctgagaggaatccaagcctcttcgacatctcaatgaccatatttttatctccatttgcacatgcgaaaacctaataaaagatgacatcggaagatcatcagagacatgcagcttgtaacgtataagtcctcattggcatgatgccaagaggccaaagcaaaagtgctactttaaaaacagtcactagtaatgatagcttcgtaattataaagcctttcactatagataatctactctatcaataaggcatgcggcaagttaagaacattcatccaacacaggatcttaaatagagttaaggaagcaactagacctcaccattcttagatagtcatcaacaaaatgttttgggtaatcacgagctgctccaaagtcaattagattgattgtttttgtctcctcatcatacaagaaattactccagttaggatcggtctgcatcacattaaacatgatagaagaaagtcaagatgggagcctgaaattatgaaaaatctgaacaaatcatgaaggatattattcacttccaaattatagaacatgcctgcatgaactgaaaaacaaataactccattaaagtgagttccagcagcctcttgcccacatagttgcgagtttcctgggataacaatgccaccttatcaattgggatccctgtagcaataaaaagttaatcttgtgacaaaaatatgtactggtaaaggataaattctcataataatgacctagcatcattccatgctttcattacaaagatgtttagttaacaatggaaaattacgccagaattataatgacaaaataaaacaaaatgtctcatgactaatgcagtcatggaagaaatgtcacaataatgtaacctttctatctacaaggctttttaagatttgtaatataattctactagtgactgtgacctctttttacacaaaacaatataacttggcaaggaaggaaaacatacttataagtgtgaataattatgttcttatctaccaaaatcagaggtaaataaatttgaattattcacaagcattcataagacttccagatcatatccgatcataaatcaatagagcagataaataacatctatacccacctctaactaactctgtagttaacactcttttgcttgatatatcatccacaaccatagggacatagaaaccttgtttattggacatcagttctcgaaaccgtttttgatttgttgcttccaacacatagtcgcattcgcgagataactcttcttttgcaacctagaaatacaaagattaatttgaattccgaaacagccaaagggaaatatttctcaacttcataggcactagtaaatagctcaatatggataaacattaagttatcctgtgtagaaggatttccaggctcttgaactagtcattcttagggagatataactgatatacaaacaagacaagatgtttgtatacgtctaaaaggaagtaaatacaagatgaatctgttacacataatttggaactagaaaaaccaaatgatccttagtgatagataacatgattccacaagatttattgaatatcaataaagcatataaaacaaagacaatcataccttaattgctctgtcaaggtaaagtccttttggaatgagatttgtataatctaacagaagtttcacattatcaatatcactttcaatactatctgcgacaccagggtattgtattttcattgcgacatccataccatcctttgtaacagctcggtgcacctaaacgattaagaagatacagatacacgagttcagttaaatttacattacaacaagaaaagcataatagtaggtggtgtttggttgaaggtaatgaaatggaattgaaacaaatttgatttcatttttttttttgtttagttgcattttaaagcattggaatgtcattctaatagaataatttttcctggttttgaaaatgatggaaataccattacagcataagaaaaaatttaataatttttgcattttaaatttgattctattccattttttcttattcatattcatgttcccattcctatttctattccaatgttttcattcttctaacaaaacgtcacctaagtctaagtgtatgttagtagttgttgtcaattgtcatacttggccaatgcttgcggcagccattggttcaaaatcaaagcttttcaatttcgaggaccattgagaacccaattcagcgtccaaaacttgactgagctggtttttgggcatcacatctgcaccttgtcgcacaatatccagagcagccaatatctaaaagaggaaacaactgatgataatatataaatatttgagaaaagcattataatttagatagaagtgcgagtagtaccggagcagggacaagagactcgtcctgtatactcaacatctggccgattttgagtgctgcaccacgcatcctacagagcgcgagagccaaacgttctgcgtttttttcagagagaaatggtgaaagagctgatttgtctttttccgtatcacctctgccgtaaacgagcctcttcgcagactcctcgacagtgccccatgcaagcccagctcccagaccagcaaacctatcaaaatctattcagtcacactcattcatccactcactcacacctaatcaagcaaacaaattcatcgtaaaacacaaattagaacccgagtgctctggagaacggtgttgaaggaactcgtctctccctgggcttccgcctcttcgataatggcgctacagttggagcttcggaagctgtaactgtatcaacaggatcgtcattgaagccagtaacgtccgttgatgagaaacttgcggatggagatggcggaggttgaactccatcatcattgagatcttgatgtgattgtgattgtgattgtgattgtggttgtggttcaggttgatgagaagactcagaggtaagaatagggatggggttgggtttagaaaaggagcggaccttgcctcgggtgaggccggaggagagcagagctttcttgaggatggactgaggatcgtgtctggccaattctcgggcaactagagaaagcccattcaatagcctgcttacgtctttcaaagaattcgaactcatggccggcgccggcaatcgcagtcgtcgtcgtcgcgtcctccacctattcttctcgtatgttttggtagttcaaggctgaagcttatggttatggttgacgacacagatctattgaatcttcccaagcccagcgcaagcccaggcccaagtaagcccaaatccaaaacttcaggggaagaatggcacacgtcgactcctcctaactcactgacgtgtctcgtgtctgcgtcttgagtttccttcctattttcagttagggacactttcattttcatttattacaatgaaaataaaaatactctgagacgatgtcgtctgattgtcactgaacatgacgggttagtcgagtttcgggtttaaaaaattgtattcggatctgactcgtgaaatttttttgtagtgtataagagtatcttatccttttttttttttttttagaataaaacttgttattataaa

SEQ ID NO: 111704 - DNA, 3533 bp, Cannabis sativa
  modified_base (569)..(571): a, c, t, g, unknown or other
tagtaactattcatgggtaatacccattaagaagtattccgtgttctatatatatatatgttaattaattgaaatattaatataattttcaaaacatgtatacgggattttaaggagatcaaatgcatttattgaggtgtatccaagaatatcgatagtgaattgtccaaaacaacctgaaaattaagaatgtgatttttatgtattgaaatatatcagtgacatcgttgcacatgcaaatcgtaacagttacttaaccgatcaaaaagttgtaagttttaattattaattatcttatttattgtattaataaaaaatctaatatacatactaaattaatatttacattttttatggtttgggaaaaaaaaacatacgatgcaaaaactaatttgttaccgttacagcgacagtggatagaacagttgctggcggtgattcatgaaggcctgaaatgatgttgaaagaatttttcttccttatttttttatgttaacatgtaagtttttttttctattatttcttttatgtttaattagatatcttaacttgttaatacttggactaannntaaaatatttgtgtaatatatttagttaaaataaatacatttaattatatggttaatttattttttagttatatgatattaatttaaataatatttaatttaaattaattaatatttaatttaaataaattaaatttttgaaattatattaggttttaaaattgaaaaaataaatagattttctttaaaaatcaaaaacaatatgacgtcaattttttcttaataactgatggcataactgactacggcgtcggttattagcaaaaaattgatgccatatagtctctaatttccactaggcctcccctatgccatcagttattttataatgactgacgccataggtactccttatatcgtcggttgataagacccacctacagcgttgccttgaacagcaatgatcccttttttgcccaaaattgacgccaaatgccctaaaaaaccgcctctaaaactcttttttgtagtagtgataccttaaaaccaaaacaagcaacaactaacctttacctctctcaccccaaaccactacaccaaacactacctatttatacccatttatatgttcttatatgtatagatatatatacatacccaaactacccgattatatatacgggaaatttgcggcataaatactcattttgttcattttcttgctaataagtacccaattttaaacaattgcggcacaaatactcaaaactccaatttaactatttgttattggtacccactaacacaagttagtatagtagacacatgtcatgctctcattatttctaatttttttacctaattattaaaacaatacaaacataaaatcaaaaacttaaaaaaaaaatcccattcccaatcccaccataatcaactttagttcatatgttctcttttcctaaacccatattggaaccaaaattttcaggtaatttgagcttgaattttcctcaaccaagaccttgaagcctccataaccgatgtggggttggcccagatagttaactttcctccaataatctcccgaatcatcgggtaccgagctccgaaagtaatcgaaacccgaaaactcacccaaaattctgacgtttacagctacagagtcttactggaaatgctaactgggaaaattccaatccgatatctgggtcacgacgaggtggtgacttgcccagatgggttcgatctgtggtttgtgaggaatggacatcagaagtgtttgatgtggagcttctgagacagagccatgtagaggaggaaatgattcaaatgcttcaaatttctctggcttgcgtgtccaaggtaccggagaactgacccaccatggaacaagtcgttaaaatgatcgaagatcttcggcagccacaaatcaaaacttaggcttcttctgaatctgaccctccttgcctttttttttggatttatatgtgttaaagattctcactctatccaaaattttttggtcccaatatgggtttaggaagagagaacatataaactaaggttgatcatagtggtggtaatggagggtctgtgccattggaaatatatttttttttttttgggtctaatgcgattgggaatgggagttttttttttagtttttgattttatgtttgttttgttttaataaattaggtaaaaagaattataaataatgagagcatgacacatgtctactatactaacttctgttagtgggtaccaataacaaatggttaaaattgagttttgagtatttgtgtcgtaattgtttaaaattaggtacttattagcaataaaatgaacaaaatgagtatttatgccgcaaatttccctatatataattgagtgttattatcatttcaatcaaatctaaaaaaatttataacaaagctcttaaaatttagatttttatcttattattgaaatttgaccaccatgcacaactactataacaaaatcttaacaatctaaaaaaacgctaaaaaaatttataaaatcaaaaataaagaaatttatattaataaaattattagagattagatttataccttaatgaacgttgagattcaataattttttcaccaaaagcagcggttggagccacaaccaccacaaccaccacctctaagcttaatttatcctaaaaatcaaacaaaagacgatcaaacttagagaatatatttttgggtatgaaaatacaagattttaaaaaatggatgaaaaaagaagaaatgggggatggaaggcagtggttgagcgagagtttcgtgaaagggttgctggttattttatttggggagaagacaaagtgagggagatataatgctggttggggttatataaaccctatgatgttgattattttataataactgataccataggtgacacgcgtcagttaatgtgtatccctatgacatcagctattacaaaataatcgacaccatatgattttttaattaaaatttgacactctatggcctcagttatcttgtaatagtcaacaccatatgtctctttcattccagcctcactcaatggcgtcgattagcttgttttttttttttttttttattaatcagcttaaaaaaactacctttgaagacttgttttgtagtagtgaccaacaatactaccactcgattctccttaagttggtaaatagaaggttcatcaatgtttccttccattagtaccccactaaaaatttagtaatatatatatatatatagatttaagtttactttttacactgcccaaccaggataatatgtgaagccacatactcccttcccaaaattgtacgtattaatacatggtccaacaacaaaagtgcactgaagagatgattgcaaactcagacttctgacgataactatggcaattgaaggttcccccaaaagtcaaaaactttttgtggagagtcgttacaggtacattaccaacttgtgtccaactagtgattaagcatgtcgat

SEQ ID NO: 111705 - DNA, 5873 bp, Cannabis sativa
tttttttttttttttaaattgcaggctgcattatggtgcactgattccttcactatgaagtctacactcgaagagcactcccagtggatcactgatgttcggtttagtccgagtttgtcaaggcttgccacatcttctgctgacaaaactgtcagggtctgggatgttgacaatgttagtatacattctccttttagtctcttggaaaattaggtgttctattggaaaattagtatgcattctcttgtagtctcttggacaattagatgttctacagtgttagtatactgagcttctgctttctgcttttatcttcttaggaagctcttcctgagaaagctactaaaattggcttttcttaaaatacctttaatagagctaaaagcttttcactcactggttacccaaccagcaatagaagttcttttgcccaaaagcagcttttaaaagcccagccaacaagagccaatatgttagtagtcggtacaatattagctaggctctatattcttatttcttttgaaatgctatatctgtgattatgctagtttgccgggtaaataaatagtaatagaatttaatctgaaagcaattagaatgaagtgacaagagctgttacaaggtatgcggcttttcagggcagtttatggatttaactttttaaggtctaattttgcattcgtaggcatatgtggtggaacggcacgttattttttaacctcactttcttattgttgagtatttttgaggctatgtaacaaggctgccattgttatattgaatcttgggttgagtgaatttgagcggcaaaattgtgatagctttaagctgcttcacataataaatgatctatctgaatcagtaacgagaaggttgaagtatatgcagttaactctttcgtgttgaccttagtcatgaggggatgtttagtcgttttactttgtataaatttgttttatgtatttaacatattaatatttcaccatgcagcctgggtattcacttcgtacttttactggacattcaacagctgttatgtctctggacttccaccctagtaaagaggaccttatatgctcctgtgataacaacagtgaaataagatattggagtgtaaagaacggtagttgtgttggagttttcaaggtatagctcatgtctcatcttccaaaatgtgtccaacaacaaaaaatatatgttagtaaacttctcaaacaattgaaacagcctatttctgtcaatcagggaggagcaacccagttgaggtttcagccttctcttggaaggttgcttgcagcagctgctgacaattctgtatcaatacttgatgtggagactcaagtttgcaggcataagctgcaggttggtgatgacattttccttaattcttgcttccttgcaattcttcttttcagggatttgtttgttacttgagaactttgggtactcgtctcatataatatatatatttttctgcttgaatatttgggcatctatttagtatgttcatgttattgtctgctgcagtttattttatttaaatatatataaaaaaaaatattgtttattttttattaatatactagaacaactttgtgcttgaatggctcgcggtgattgttagttcatttgtttatcaacaaatttggtgctgaacatttttcttctctggcaagctttctacagatgtagtagtcagcttgaaaacatttcttgagaaactatggtttagacatactatggttgctcaacattttgttactgtttcttcaagttgttcttctcccttaataggttgtttgtttgtttgatgggaattaccatttcagggtcacaaaaacattgtccattctgtgtgttgggattctactggagaatatctggcatctgtgagtgatgagttggttagagtgtggagtgttagccccagtggaaaagtggactgtgtccatgagttgagctgcacaggcaacaattttcggacttgtgttttccatccaacgcatccttctttattggttgttggctgttacgaggcaagttttgaccattctttcctgtcttttggtttcataaccgaatctttctgttagaatttgttataatcatataatgccactcacataccacttagcatgcccaaacttgagtatctaaccgggtttatattatgcagactctggagatttggaacatggatgaaagcaagacaatgactctccatgctcatgacaacctggtttcttcattggcagtatctaaagttactggtttggtagcttcggcaagtcacgacaattgtgtcaagctctggaagtgagaggttacttttgttatcttgacaaaattggaaatacttttaactcatactgcaacaaaaatagtggtctttttagagttgtttatattggttacatcgtattgtagtagggacaagggtctttaggtgatgacactacccggtctcagtaacccaaagaaagaaagttctcataccaaagctaaccaatgtagtcagaacaaactttggaggaaggtgttttttttgttaaaatcacaggggttataatgtaaagggctcttttgtgtcgttaaattcccttgtaagagatgatatacttgttgctttgtttatattatgtcttatctaatttaaggtcaagcttcccattatacgtatgtagataatagatatgccttttctctttgtggtcaaattctggtgattagtttatctacatcggttattaagttgggttgtcaacatttcttatgctcatccgaattacaagggtattttgagtattgatgtgtatttcacacatttatgagataaaaaatggttgattgaaatattttaccacatttgtgtgtattatatgttaatcaaattgaataattttgattttggtgactgaaggttattgaaaagtaacgaaagactgattagtgattaacacagttgatcctttcaaattatatttcattgacgaattttctaaggcaacaagaaaagcaggatacgaatataaaagagtagtgttaggagacaaaatgctttttacctgtcaaatgattcacttgttgagtaattaacaaccttttttatgcaatttttttaaggtaagggtacttttgtatttaacgttatttataatttcacacatgtgtaagtagagctaatattatatttatcaatgaaaatatcttgaaactccattaagcttcttatcaccaacatgataggggctttactatgtataaaggccatataattttattttgtctatgtgctgcttgtttgttatctttgttggataattgtgtatcatttatctatgcatttacttgtagattgtgtgagattgatccttcaatgacttgtgttgtgcttgctcatactttgtgattccacttaacatgtacaggacatgtattctgcctaactattgagtttatttgcctataaatgtccttaggctaactggctaactcattgtcttaacaagtgtcgctcgttctgtttacttggaagtgtccaaatagctggcccgtaacaccaaacaatatgaataattattttaaaaagtaaagtctcgaagcttgttagaatttattttactcaatgaaaatatgacttaaagagggaaatgacaattttactgaaaatagaaaaaaatttaataaaaaacataagtagatgggaacaagttacgttattgagctttagtaatatcactcctaatcaactcaagtgccttattaaagtgatttgccttaattccaagatattctttccaagttgttggacgatataaaggaaaaggtgatgagagttgaatcaaaggttcaatcttcacatcttttggtgggccatagaaataagcggttgagatccgatgatgtgtcttgttaacaaccgcacgatgtaacacactcttgaaacgcccattagacaaaatttgcatcaaatctcctacattgatgacgagtgcaccttccactgcatgcaccggtacccacccgatcccttccttctggacttggaggccagtgctgctttgcaatagtagagtgagcaatgaggagtccgtgtgagcagccaagcccatagctttggttgggtccggacagactgggtatgaattcagctgaagtgggccactagaattttggcaaccatatttgggcttaatattttttgtatcttgttgtgttaggcccaatgacccaaacatcaagcccattatatgttcagcaagtctgttcatctccttttggcacgattccatcacgttgctgcaggaataagccagacagattcacattaaaatttaaaattaatgtttatgggaaaacccgtgccataaagaccaaatttgattaaatgttttataaatataatataatgcacgttactgggttttgatgctcctgaaaatcatatattgcgttgcagtataaacaggccaatcaatagccatataatcatcaaatagtttgaatatgatgagctgtatatatccatttaaaaagtgaaaaaagtgatctatgagctgtatttatatgttttcatattcccatttaaataaaaataaaataaatttatttagctacgaaagttaagcagattttgaataataagcaaagttaatttgttggacaaaataaggaaaatgtttgacagtgtttttaatttttagttttctgaattttatttaaaattttaacagtgtttgagtgaggtgttttaaaaaatttactttctactaaaaaatattttgacattatcacgatataaacccaacttcatcatatagacttggacccaatttccccatctagatccagacccggatcagagcttggctcaaacctcaataaacattatttttgaaaatgataaacagcaattttttaatgttttctcattttttttttattttctatttttacaaaatttgtccaaccgcgtcctaatttatttttaaaaagtatttgtagaataagagaaacggctttctaacaaagagaaattatataattaaataatatatgtcgacacttgggtatagtatagtagtagtatatagtatattccttatctataaattttttaatattttgaaaaataaataaaaaaaacaatctatggcgctgtagtcccctttggggttatggtataggtaagggtaaagagaaagaggtgcctctgtcgctacataaaggtacagctaataagtgttgaatataatatatattgaaaaacgacaattacaaccgcagtagtaccgtacatcaaagtgaatttgataaacgatttcccatgcagcaatctactcattgatcggttgcggttggaaacggagtgtagtaccgattcattttaccccaataattacggcggccgctccccccttactactcacaatttacatatcatattttggcaactctccattatttatccatatcttcatgatttaatattctaaattatcattcatcggacggtactagctatatatatagacaaaacagaatttggacaaaatctgcattttctttttatatatatatatgtatatacatatatgttataattatatatattgaaatccaatcggttgaaacgaacatttggatgtacatgtacaaatatatatatgtattaatgtgaggggtgttcatcaaaccgcctacaccgcaccacaccgtacgtaacggtttaaaattctttgcggtgcggtcgcggttggaatttatcctaaaccgcacggtgcagtgcagtttgtggttttgaattgttaacatgcagttcaaatcgcacacagcatattataaaaataccaattttttatatttatttaggt

SEQ ID NO: 111706 - DNA, 3361 bp, Cannabis sativa
ccaaattgcctagacttaccaaaacaagattttgcacgttgtgaaattcttgattttgggccttcaattactgagtctttggaaattccacattcgtggacctgtgcttcacgaaggccccatcatttccctaaacaaactactttaaaataccaatatataatactaaacagtgccttcattgttaaaataatactaaacctataaaatcaatcgaccatagaaaccattagaaacaaagtgaactctggtacataacacatcaacctttcaacttttatcattcataaaacttaatatgaaagccaacaatttctatggatacaacaaaccctaattgaaacaaaaccaacccaatcatattgtacaatgagtgtcaatccaaagattataaaaagcgcttaaaaaaaaggcaacatatgatcaatccatatcctacttattcagcttcaagaaaacagatgtatcccatttggagtgcagagaaattgtcaagatcgaacagaccacagtgaattccaaaaagtacatatcacctagtgaattccatgagcagagagataattggttgaaatcttttttcataacttgccaaagctaattacgagtaggtagagagctttagattaagatcaatatcatcttcaacagctttatcattatccttttcaattttgttcaacataaccagcttttccattttagccatctgatctttggctggtaaaaagctgtagaagcgcttgttattttgatctgatttagctgatggtaatgtcacttggtttgattcccttatgcctcccttcatttcattaataattacaaagtataagttgacaatgtgtacactattcaataactttcaattatatataaaattataattttacattattcttattacctgtaatggaagcatatactcatcaatcttacacaactgttgttgtacacaatgaaattggggcaagacagtagatgtagtagtagcactagttgtggtttctgtagtgcaatttttcaactgattaaactcaactggaacatccgattttgcaatatctctgagaaaaagaaatagtcataatgcttacatgactgaaaaaaaaaaatattgacaaatttttaaaagaacagggcaaaattttagaatgtcgaagtaattaagctaaaaagccaattgaaacctgggcaacggcaaagtgaagttgagattgtgtcccatgccacaattaaataaggttgcctgttctggtattcgcctgtgatgagattgaaccgaagggacttggtattggcaaactgaacctgccgccacactacgattttcctccttatgaatcgatggtggtcgccgcttcaagccgattacctataaaataatatttgtattaattgatccatttacattatcatcatatatataattgcatttatattaatatagtggaaaaatttttgtatacatgtaccttttcttgtggcttgattatctgatagttttggtagaatatattttggtttgaagggggttctatttggtgacataatccaccataagatgatgaggcagagccggaaagttgattattcaactgacactgaaattataataagattcatcataaaatgaaataaatatataaattgtattatatatataaaggatcttactattgaagctgattgtttcttttgccttattaatggatgatattgagaagataagtaaggtgatgagtgtgaatattgatcattgggaataactgcccaggaaatattcccatagtccgatttcccttcatcaatactatttgatttaatggggtttgtccaaggagcttgaaaatatgtactttccggtaaaacaacttgtgaacctccaacaccaacattatgatcaataatgcaactctctaaaagggcattattgtcaacatatttagtagtgaaagtcttgctaatagtagtagtaccactattattggtggtgccattactataaatagaagcaggagatgtcagtagtgacacttgatcaagatggcgatgatgatgagtggaggtggtgattggaatcaacggctgagaatcatccttggtatgaaaaccagggttgagtagctgttggtcattattattattattctcagtattctcttgttctctcaagatcttctcaagttcggcaactccaggacctctcttgggaactctttgtcgtttattggtgtgcgactgtgactgccttgtaataggggtcggattccaaccaaccccatcgccacggcctacgccgaagctgaagtctccgtcgcctcctcttgtgctttcagtgttgctacacatttcaaataccttaagaatagatcttctactaacttacaataataatgccctgcgatagtttttaaaacagtagaacactcagccatttcaaacacttggatatcatatacgtatatataatataatgtatataccaaatttaggggtacaaagcttggaagaaagataactagaatccgaattttcgcggtcacagcaaatctaagaagtaatcaaaattattcaaaaataaaaaccgcaatatttgggtagacgcaaatttcggtgaacgatatagatggggaatctgggctatatttacatgtatatatatataataatgataaagtccacgttcacattcacgtccactaagcgaccttggtttcagctcatgaaagatttttagtaaatgtaggccaagctagagaataagaaaggcaaccaaataagcataagagaatttatttcttacctttaaaatcagcataagagaaaaaataaatcacatccttagattagtacttgaatgatcgtatatatgttttttagttttctcgattatcacgccaaactcttctctcccttctccaagtacgacgagtgcgtagagtttatatatatttatacttttataatgatttttattgactaattatctatttaaacagttggcatagagtcattaacaggtgcattaaatccctactatgagtttggtttagttggctcatgcatgatctgttgaatccttattattagaaatgtaaaagatatattatggtacaaaatccaaatttgtataaagtaatattaaatccaaccaagcaaccatatattaaatgactcaccatatcatgtaaggtaccgtagatatatatacttataaatatatttatatttgtcttgtctataaagcaactaatctacatgctttattaacattgtaaaatctaaggtggcgtttgataacacttttgctttttaattttaaaaacagaaaaataaaagtagattttttgtttttaaa

SEQ ID NO: 111707 - DNA, 2963 bp, Cannabis sativa
tttttcaaaaataaaatttttactttcattctgtgattaaaaaattaaaaaacaaaagtattaccaaacgacactccaaattatctttcttaattaaaaaaaattaataaaacaaattaatttaaaagatatacgtatctaaacaaaattatgacaatagtacttaagtaatcaattttgttataattaattattagtataaaacaattaatagcaaaattggtaagtaaaattctattttttttaaaaaaaataaaataaatacctatataaaaataatttaaattaacttttaaaaaataaatagtattaatttaaaattaaaaattaataaaatttattaattattaatattattttttttaaaaaaataaatatataattaaatattattataatatgtataatattttaattgtatataaacagttctatcgtaaaaatatagactttatattttaataactacattatttaaaataaaaaagcttccatacagtaaagaaatgctaaatagtcttagcctatataaatatatttatttatttttacaagttcgacaatcactttccccttctgtttttttctcgtttttcagtaaaacaaatcagttctaagatataaaagatcatgcctttttgctaggcttatcaatgatacaagtatacagcactagataaaattaagcaaagtgaacagggacttccgatctaattactaatttcatcgtttatttggatattcccttggtccaaatatagttgaaccgattctcacattagtgctgcccatttcaatctgcattatcataatatgtgaaccttttattagtaggaagtacaaaagaagcaacaaagcgtttaacaagaaaactcaaaagaacatgaaaacgcagagcatataccgcttgctcaaagtcaccagacatgcccattgaaagttcacactgctcttctgtaaacccaagtgccttgcacacctcaagtctgcagttcgacaatgtctaattgattgacatgaattagtgtaaataaatgaaattgtagaaagatcataacattgtgaattttcatttctgattctgagatagaaaagttgaagttttaagtagaaaagatacaaactcatactcaaagtccaatagaggcttagaggaactagttaccctaaagttctctggagttgacgtgtagtccggcatcccgattgtcattaacccagaaaacagtagatttgggcagtgcaatttgacatgttttgcaagctcaacaacaccagaagggtcaacaccagattttgctgccaaaaatgtcaaaactattttatattacttttgttatcttaaatagggtacaaaactattatctggtgaagcattgtattgattatattgaataatacagagatctagtatggctcgactgtgatcttggcaacatttatttttctgtaatctaggccgcaaggagaaaattctcctaggtgaaagtcagctattacaatattggcataaaaaacgcctacgtatggaacttagtttaaccttgatcgtctctatttgtttgaaactcaaatctttcattttaaactccacaattaattgcatttcatatgattgatttagaaaacttcaccgagcaaatttcaacaatcatatttgggcatcatgtaagaaagaataccaaaacaaagaccgtgggagtttcaacaattgtagagaatttttataaatggccaaaagctagtaccaattaaaaggtcaatatgggttagaagagacaatgtcattatgctggatcatgacacatcttcatcttggaggattcataattctatttccactgttattagatgactttttaatctctaaagaacctctctcatactaaaagaacaaagactaggaattaaaatcctttgatcagtcctagttgagccatgggcatgaatctaatttgagatttgatggttgcaatagactgtttcttaattggttcaatggacatcaatgtggcttcatgaatttttatgagatttccatagctgtggtcaaaaaagaaaaaggtggcatcaaccacatacatggctttctttgcgacagtcaccctaaccttttatagacttaatattcaaaagccatagaaatataatgaccaatattttgtagatgctacaaaatgataccaaacttagactaggcatcatttaatatttcttcaaactcaaagttccaggtgctgagttgcactttatgttatggcaaaaagatgcagttcaatggcactaatctctctttctttcttgaaactaacattcttgctaaaccttaaaatatttagagactaaggaattatagcaattacaatgcaaatgcccagttgggacccgaacctcagattttgtggatttactccatctgctacaattcttgggctgtatggaattatggagctaatcttgacagagtcctaagtcatcaacatttcaaaaaatacaaatatggagaaattataatctttactcacatggttctccactggtattcacttggactaaaaccttcaaaggattcattgataggcttgacactgcattgtcaagatgatttgcaatctaaagattataaataaatgtcaaaatacggtagttgtgagtgtacttgtttgttgaatacattagaaagtacatttgtataaagaaatcaattgaagcttaaagaccaaagattatcctctttttaatccatctagaatagctattcaatgcatgtcaaaagaaaaaaaaaaactattgaataatatatcttcttaccttctcactgtgcacaccctgaaccatgcttatattaggcactccagctgcaaaaaattaataaatctatggcctcaaaatcataccctaatgtactaaaaggaaaataaaaaagcaaatataagatctgtattaccattttttaagcatta

SEQ ID NO: 111708 - DNA, 5049 bp, Cannabis sativa
ttttttggtatttttaccgaattccacataaaaactcctattgcaattaacagagcaacttaaatcgcaaccaaaatccgtataacaactcacataaaaaccactgaaaaaacaatagtatacatatggggtaattttctatttttttaatataatcaacccaagactaatttctaacatgaacaaaccaaaatggtacttagcctaaaaacaacatatgcattaatcatataaaaaaatataacttttttacgtgccaaaacagaaatgctcgaacccaaccatagaaactatacctatatatacataatatatgcatgcacgtgcatggaaattaatataattaacaaacttacctgtaacttaagggacggttgttcgagtttttcaaggttcgttgagtgcaagtgatgcctgtctataatttctttcatgcttcacaagaccaaagcagacatatatattcgaatggttgattaaacatgtatgcatttaaatatatacatatgtcataattaatatcatgacattgacaagaaattataataattataaatttcaaattataaagatattgtatatatatcattctatgcctgaaattttcagaagtttcattaatggcactcctgtaaatgattaaaaaacaatatactccttgatggggcgtatatgtcattcaatatctaacctttaaatgcaataatttgattaaaaatcctccaacaaactaaagcaattgtatcatgtatatttcacccaaaaattaactatattaaaaattaattacaatacgtgaatcattcaacatactcatcttcaatttaaccagtactactatatttatgttttggacaaaatatagttgtagtgtacttattataactttctacaaatatgtaggaaaagcaatatgcatcatttactaaaaataaaggatattaaatttccaaccaaatctctgagcttattatactactgatcagtacgtacacggcaatttaaatttggaatagtatccagcaataattattaaattccaatagaagttttttactcattccattacgttcgtaagagatcaaattcaagaaagtaattaggtttctaaaaattttgttacaccaaaccaaacaatatatggcataaagttattagtctggtgcatttcatacggggtctcacattttaattaaataaataatataagaagccacaaactaattataatggttatataaatatactcaccaccagtcagtacacgtgcttgtatataaatttgtacaacttgtaccattaattatatttgctaatagatccttcatctttgaagttagtactagtatagattcaaaaacttttgccaatcataaccttgtgcagctttactggcatggaaaccatggtacagcatttcaaataatatcataataaagttacaaatatatagagcctttttgtttaaatggagttcaataattttcaaatgtgaaaagacatgagaaaaaacaaaacatcttatcaccaatatataaatatgcattgtgtataaataccaataaaattaataattatcacatacattgcaagttgcaactaataccctatgtatgtatattcacacacattaattaacattatatatatattttttttggagcaattatacatattttttgtaatgttttatgtgattttaaccacattgggctactttctcgccccttctaaaattagatgctgaaaatgatagaagtgaggtctaaaaacaaaaaagtacaagtatacagcatcctatgtggtcaccatatatataagaaactatgataatatttcatggaagattcacagctttactaacctaataaggcaaagttaaagctacctaagaatcttctaggtcatgatatatcttcattctcaacaactacccctacttactcatgcatgttaccttgtttttcttatctaaacaattttttttaagaaagaaattgattaattataggattaataactatcattttcttataaaatctttttccccctcttaatattagaaatcttattatagactaacacagcccttttcttttcttttcttttccaatatatagaaggctatacatacctatatataaccagcttctaatattatatatatatatattaatttatatacgtactttcctttgaaatagagtcacctaatatatatatatatatttttcaactcatgaatccccataaatttaatcttatcagatcaaaattaaagtaaataaatataccttgtgtttgagtattcaaagagttttccagtagaggaaaaaatgatgagtccaacatcagcatcacaaagaacagagagctcctcagctttcttgacaagaccttttcgtctcttggaaaacgtgacttgcctggccgtcgcgttatcgatcttctttatctgaatcttctccctagccataataataataatctcccttccctatctaccctattatatattcccagatcgattttaattacttcaaccctttttcttcttcttcctatagccagatagataaatctttctcttcttcttctactatctcacacaaagtaagaagaagcttcaaaacttaatatgtgcaaaaggggaaatttttctatttatggagcttaatgtggcttatttgggttaaaacaaagacatgtttgatcacaaaaatggcggcattttgccaaatttagccaagaatcttacttccaaaccctaaatactaatgactttagatgaatgaaagaaaggaaaaaaagaagaaaaaaaacacccaccaattattgttctagatctagagccaaaaattagagagagagagaaaaaaaaaaaaaggtgctctatctttatatatataaatatatatatactacttttccactaagttgaggttgtgagagcatgaaatgaaaggaaacaaaacaaagaaagtaagaacaagaaatgaaaaggaattttgagagagtggagaaatgggtcagatatatagagagagagagagagaatttaattttggcttttttatttctttttggtgggatttacttaccagtttagggtgtagaaaatagttgatgatgatgtttgtttttgtgctttttttttttagggggtttgtttttgtgcttctaatttggtttttgtggacaagtttttatttatttatttatttcttttttcaattctgaagttaaagagaaaagtcaccaatataagagagaatgtaatgtgttttgtgtgaagagttgtggaaaaagaaaaataataaaaaaaagccttgtgtggttggagagagagaccatatcttttggcctttagttgctgtgaaacacactacataggcatttgggggataattttactgagatgttggtaaacaaggagtagctttatttcctatttttatttatatttatatttaagattactattgaaagaaaaaaaaaatatgtatccttttaataattttttttatggggctttgagctggttggttgcccttttgttgatgcaaagagtcattgaagtgacaagtgtcccagcaaaaatattattagattacactctttttcttgtttttaatatttggtaagtactatagatgatggcagtcatgaataaggtgctttgtttaatataaaaaaatcctaaacttgtaactaaaaaaagaaaaagaaaaggtaaagcgtttttttttaaatgtgaaggaaattataaaaaaaaaaatacttataagcttatgggtaagtctatagtgaacctttaagggatattttggtaaattttttatttattttggtatataaaaaaaaattttaatctaattttttttcgtgatcgtatagttatagttatttaaaattacttgtaaatttttaaaaaaaattgagtagttaaaatttacatattttattgcatgcacgattatttttcttatacacgtagtaagtagttgtttaaaccttattttcgacactgtaaactatttagaatttcttaaaaatttataagtgatcttttttttttttggaaacagatttcattcattcaaacaaacattacacaggattaggcgagtcaagctgaaccgcttgtctcgcacaagggggaacaaccccaacccacatggcactagctttgttaatcaaagattcattggctaatacatgagcaacttgatttgcttccctataaacaaaagagatcccatgaacccttgcatcttgcaaaagatctctaatatgaacaataagtccatcaacatctctacagcccccttcatctttcaacaccaaattaacggcctgcaaacaatcggtttccacagtaaaagagggaagcttctgctgcaacccaaccttgagcccatctgctatcgcagtaagctcagcatgcaggggagatggttctttcctcactatccggacagccgccccacttacacgcccattatggtcacgcacaaccgaactagcacttgctaatccttctcccactttcacccccgcatcaacattgattttaaacgatccccgaactggtgcagcccaacgagcagcagccctctctgctccagccttctgcgaagcattaccatctcgaaattcagcaagaaacttgctgcaccattcaaccatagcagtagccgtgggtttgtgtcccccatggttaaccgaatttctgatgtaccaaagattccaggacagaactagaaaaaactcaaaatcctccttcgccaaactacctgacattctcatcaaaaaagcaagaacatcctccttaccttgtctcttaattttgccagagaacccagtaagtttccacacatcacagttcactctacaaccccataatgcatgaaaaacattttcataggcaccactagaacactgagtacaataaggctcaacttgaattttctgatgagcaagagccgaattggttggtatccaagaatggatcatcttccatacaaatagctacaacatatgcgatta

SEQ ID NO: 111709 - DNA, 5318 bp, Cannabis sativa
  modified_base (5252)..(5253): a, c, t, g, unknown or other
ttaattaaaataatgtatacaaaattataaaatgcccatcaattaatatctatcaaaatcaaaggcttatcggtagtacttctattttgcaagaggatattagtataaaaaataaaaggtgtaagcacaatacatgattgataaagtaaatttaattagaagcaaaaaagagaaaaaatatgacataaaagcaatacattgagaaaagaatagaataaagtgatgttttcaattattaaaaagaccgctgcctagtttgttttataatgctaataaagataaatgcatacatcgatttaataaataatgtaaataaaagtagaagtgtagaataagatatgcaaagtctccgtaataacattatattgattaccccaatcaatataatgttgcaaagtctccactttagagaaagtagttccatagaactttcaactcctccttcagtacctccataataacattgagatggacctcttgtttctgaatatcacagaattatcaaattagtgaataagttagcaaagaaaaataagaaaaaaatttagtcataaaataataacattatttctacatatataatctacaaggttaaataataaaccacaaaatagaatttatataccagtaattctgaagataatcctttcaaagacataacaacctcccttttagtttgtcccccttttgaagactcaaaattatacagatcaaaatcactgatcttcagcttcaatgatgaatttttgtatattttacgtgttatgtggacgactgaatcaacacaaaatttattgccaaaaacagtcttccccaagggccatctcagaccaccctgaacattgctatctactatagcagaatcaattaaatttccaatcatttgcatctcatcctcctgtaatagtacgaataatttagcagtaatcaacatcattctagtgtgaaaagccagatttcatactttgaattctatacattttcaagtatatatataggtcacttaaacagggaacttacaataatatcagtaacagtttctttgaagattacttccagttccatatctaaattcttttcaaggcaagatatttgcttcagcacacaaaacgagtccccaggtcgaatctagaaggggaaaaaaaactttcaatgttagcctcactaaagaaaaacaaaataatgtactctagaaggcacaagccccaaaacttgactgaatttaaatttcttcaacctgccttgtacaattgaagctttccaccttctagtaccctacatttgcatgacataaatccatctcgttctgtggtgtcacgtaactataggaaaaagtgaaacaggttagaaattcaataggctgttaacttaattcatcatgaaactactgtttaacaatgacttacatatacatggaatacttctttttccttttcaaattcaagtccactctttgaggcaccttccttcattatgtattccacatatgaattatcaggaatatttgtgtaaaatgatttttctaccagtctcaatgcgtcttcagaaagcatgtttttttgggcaaattcttggttgactgaaggcctcctaaacaaacatttctcacactcttttattcatgccaactatgttagttttgtttaagcacacaagctagtgagaagaaattaaaaaaaaagactgaccgatgaaaaataactttccctaagatagctattacagttggtgtattatttacatcttcagactccattttattcctccattcttgaaaagaagaaattaaaactcgtagcacctttcctgctatgtattcccaagggcttcttgtagagctctctgcctctactttgctgcaactttctgtgaagtaaaagttttatcatatgatctccttatccaaccactgaaaatagaaagcaaaaaacatagacaattactaacgtttagcaagatcactgttaactaaagcatatttgtgttggagggacaataatgatcgaggttggagatgaacagaatgtggaaactgatcatgatcatccaaaccaacagcaaaccatgtggatctaatactttgttccaaaatgatctcgttaggaaagcgttcatcacagcaaagaatgttgttccatagaaccttcaagtcatccttaaacatctcactaatgagatttctatcagcatcttgtttctgaatatgttaggcaaagcagcgaataaattacaacaatttctatcagcatttcaatatgttcaaagcatgaataatgcactatcttctgtaagccttgaatatcacaagagagataaagagaatgtatataccagaaattctgaagctaatcctttcatcttaacagaaacctccctcctagtttcctctcttgtagaccgagaaacatctctgatcttcaatcttagagatgggcccttgaaagttttaagacttatgcgccatatttcacccaaataaaatttatctcctgccacagtcatccccaaaggccatctcagtccaatcttgagttttgtatccacaatagcataactaataaaatctttcaggcattgcatgtcctcatcctgtattggcaggaacaatgtggaatgtaatttttagaaagcagaataatatttaggctccatctcaaaacattgatgagtggagtaatagtattaagttcccaccaatattttgtaattaaacataataagctcacactagaaacagttttagttcttctggtgcatagatccaacctcatatccaaattcttttccaggcaagatatgtccctgaccatgtagtgtgaatggctgtactccatctaaaagaaaacacgctttcaatttaggcatcactaaacacaaccacttaccaaatcagaagtaaaaataaagaaattaacttgactaaaaacctaattgaatcttgaaatgtcattaatctatttcctcagtagcagtaacacgtatcaggtagaacataacaacaaaagaacttgccttggatacatgaagttttccatcttctatctgtatcgtacatttgcaaaacataattttaccaggttgtgtcacgtcatgaaactacagaagaaaaaaacaaagaggaaaatttagaaaattcgataatgataagagattcataagattaggttgagcaaagacttacatatacacgatagagttctttctcttgttcaaattcaagcccagactttgaggcaccctcctttattaagtattccacatatgaattaggaatatttgtgtaaaatgagcttcgctgctcccccagtgtgtcttcagaaagcaaataattcgtagctctctcaagtttttgttcataatttgaaggccccctaacaaaatcaaaattaaattagtttgtttggtttggtctcagtgtatacaatttatttattttttttggttaaaaaatgtgaaaaatataaactaaccaactagaaaagaaaactttgccaaatcgaaagattatgtggattgtctttggaaaaactttttcgtggtccagatcagactccctattgcacatatattcatcaaaagaagaaaacaagtcttgaagaagattctctgtaatgtattcccatggctgtcttgtaaagctctgtgttactctgttgctactccctgtggatcaaaattagcattagaaagttaaactaataaactcaatcaaattacctatcatcattgaaatcaagagaaaataaaactaacgttcagttgtatcatcactgtgataatgtaaaacttgacggcggacaattttcccttggagggatttcccagaaacagttcggagattaagagaaggcgggaaatgattatcatcatccaaaccaacagcgaaccatttgaatataccatcatatttataatccccgacctgctggtagtgggcagatgatttgtgttttggatttttgtagttggtgagaaatggaggcaattctggctttggtatgggactttgtgaagaaccttcaccatcaccatcattatcgttctttgaaactcttttatggggtggaacataagccatcctagttgctcaacacacagtcttctcttcttttcaagaaaaaaagttttctcttcaaaactcttcagtctcaatgatcttcctcataaataaatacaaatataaagaggatacgtttggtttagctttatatattccctgttctcctctgcaaagtcattaagaccattgatgatgtttcgtttaaggttcacaaagtaccatccaatttacttttgcttctccagtatcattattagtgcggtacggttggtacattaaaaatagtaaaaagaacctcttcttgacgaggcaaagcaatacttggggtaacaatgaattctagtttctagagctaaagtagaagtagagtagctttcttaatagtttgattttttttggaagaatagctttcgaaatagttgactgaacattgacttgacaattcactaatgaaccctattagagcatttataacttaccactggcgtgtcacgtgcttcgccacgtgtgagctcctaaaaatatttaagcacaattattttaaaaaataattagtattttatttccaaaattttatactacggaattgtatattctaaaatgtacatcataatgataaagttttgtgaactcttttatttaaaaaaatatagtacttttgctagctttagttcttttttatcatttcacaattgatgtgtcgttgtaaattaattaattttcacatgaacatagacaattactaaattatgcctctttttttaaaaaaaaagatattaattaaatatttttctaataattaaaaaaatccaacctaaagtatattaatgttgatttagataaaaaaaaaatttgcaccttcatttcttatgttttgaggctaatatcaatttaggtttgtaactaaagaaatatcgtaacgaatatgaatatgaattgataaatatgaaaaaacttaaatctgatttgtttaagtgaaattaattttctagagaaagaattttaaatcttttttttttttaagatttattgcattttcaataaaaaaattaagaattacataaaaaattaaatatatatattattcaatggttacatttttattgtaaccatatagttacattttttctttacctataatagaatgttacttataggtaaaaattccatttttagaattaattaattatanntaactattttttaagtaattaaataaatatttaagaagactttttttttagcaattaaaatttat

SEQ ID NO: 111710 - DNA, 2811 bp, Cannabis sativa
aaaagcatattttaatataatcttggaaaataaatgagaagagatgtgtttgagatttaccagatttccagcaccaacagtgcaaaatccattgattatatcaacaagaacaaggccagtgacagaatcttcagataaattaatagtttcttggtgaagaggaatctcactcttcagaagatcaatagtagtttgaagcaccatttttctccacctattactcactcactttggacaagtttcaaaatgatgacaaaaggtttgtggttgtgacttttgaggatgatgagtaatcacttatttatttagaatttttataatgggatatatgacaagagaaatgctaattataacctcctattataattttttagtcaatctttacgtctgaaatcacataatgaaatatttttttttaatttttttttatagcagtattcgttatagttacagtatcatccctgtaaatttttgaaaaattcttacagtaccgaaaacagagttcctgatattccaatttatcacgtgcgttcaaaaaacttcaaacgtatttttggcactgtaaactatttgaaaatttttaaaaatttacaagaatgatgttgtaagcataactaaattggatatatattttttttatatatttgttcgtgctaaaaattaagttaaagttatattaaaaggaagatcattaaaaattgaactcagagtattattttgtattattttaaaaaatacagaatttaatttatcagttaataaaattaaaagaactaattagtattttttataaatataaagtgcaaaataatatttttaagttatatttttgtatccttataaccaaaccgaatttgatcatatctaatcaaattattggagtccaaaatattaaatatataattttaaaaagtactataaaaatattattaaaaacataaattacaattattttaattgaaaaagttagtgagaaaataagtattgaaaaaattgtagtacattcttttaaaagagtgtttcggtacactttgtaaaaatttcattacactatatctcgttcaacatttaaaaaaaaaaaattttttttttttgttttttatatgttgtaaatatttaagattattagtaatttttttaaaaaattaaataatttataaaactaaaagataagatttactaaacatatgaaaaaaataattactcctctaacaaaatatttaaatctataagttttaggatgatgacaaacaaatacaatattaacatttggaaatgtttgtgataagatttcaaagtcaaaaaagatgacattgaatacgacgtcgtgcatgcaaatttggacacatcttgaatttattgattttatatattaaaataatggagtggagtctttatagtaagagcactcccgtgatcatatctacactatattccctaaaatatcttattaattttgtttatttatttaatctcacacatttacatcatattatacattaatttctttaaattatttaaatattatatctttacatataatttattaattaaaaaataaaataaaaaaataataaataatagaaaaatttacagcaaaaatcctaaaaaatttatatttgatgcaactaaatttgtaactttaaaaattaatgataatagttcctaaagttacgtttttctataagtttaataatcctttttttttttaactgatttgttaaaaattaataaaataccacatgttaatttttttataagattttttttatttttacattttgaaacagtttttttttttttttttacatttttacagaattctacataagaaccactattgcaactagcgctgtaacctaaattgcaacaaaaaattgtataaaactcctattacaactagcgctgcaaccactttagaaactcaaatcgtaaaatttaaaaaaaaaaagttcaaaagacagtatatggggtaattccccttttttattggtcaaaattataattttaattacaaaaattcaaaataaaataagaaattgaaaaaattattttgttttattttatcttttctttttcttgttcgtcttcttcacccaaccatgacacctccactgaagcaccaccatgagatctcgggacttggagaggtcatcagtggcctccattatgacctacggtgaccggagctggcaccgtcgtgcacaaccaagaaggagagaggaagaaagacagacaaccaatgggctcgagggtagaaagtcgaggtttaagctttgagttttctagggctcattttgagcttggaggactgagaatggttggcgtcggggctagttgtggtttttcgacgagagagatagagagagagagagagagagagatagagattgggggtaggagggagaactgatttttgggtttttagactcaaggattatgaatttttagtctgcttggaccaccgttatcggagatgttaaaccgacgtcgtacgtgaaaagacagagagagtgtcagcaagtaaaaattaggggtttccattttagatttttattttatttttaaaaaattattttaaaataggtgggtttttggtggtcgattgggaacatcagggctagggtgggtgtggctggggtcggctgggaatgttggacgatcgagatgtggttggggtggggatcaaagtgtgaccgaatatttagaagaagaaaaaaagaaaaaaaagaaataatatttagtatttaacatattaattagatgagtaatttgcggcaaaaccccctcaactatcaatttacttacaaa

SEQ ID NO: 111711 - DNA, 5705 bp, Cannabis sativa
  modified_base (28)..(29): a, c, t, g, unknown or other
  modified_base (210)..(233): a, c, t, g, unknown or other
aaataaaaaaaaagtcactttcaatatnnttttaaacagttttttttttcttaatcaatattttagattctgaccagacccggatccaaattcccctcccacgaccatggcgctatacacgacctctgacccgaacccgaatctgaccctagacataaacccgacttaaataaaatcaaaaaatgaaaataaaaataaactttacagaannnnnnnnnnnnnnnnnnnnnnnnaattgaaaaataaaagtgattacagaacgcatttttgtttttcaaaacaaaaatttcactttcattttgtgattaaaaaattaaaaaataaaagtattacgaaatgtcaccctaatattttggtatttattggggaaaatgcttttgtggtagggttgaaaattgaaaatttgtagaagataagcataagggtatatatgtaatttagttgggttagtttggataggaaataggataagtttagaggtaaggggaaaggaagaggtttagattttgacagagagagctcagagctgctcgcttgctcctcctccgagtctgaaagaactaaactcacatttttccaattcttcaatttcattaatggcttctgcaactactctctcactgtgttcttctctcactgctcaatgcaaaatctcacagaaatggcgtacccaccctcccctctccaatcctaatctcacatttctctctctttcttatccaaacctctcttcctccactctctctcaccgtatccattccccacttccccctaaagcctctttgtctgaggcttcgattttagagaccgccgagctcgacgcacctaacactgatgacgccaaaatcgtcgaggtctcctcagaggagctacaagtcgatacttcggaagaactagctcccaagcgtgaggaaatcttcgcggtggttatggtatgtgtttctatgagtggctattttgaggttatccagatgaaattttgttttgtttttaatgggtttttggactaaatttttatttttatatgagttttggttttggacttggtgtagataggatcgcgccagtacattgtttttcctggacggtggatcaatactcaaagacttaaaggtgccaatgttgatgataaggtatggcatttctcttgttttttgagatttgtaactattttgtcaaatcattttacttacacacctcaacgaagccaatgtgctatgaatgtattccaagaatttaatagtgtcctaactcctaagatgattcataacttccttaaggattgtcttaaagtagttatgaagtttattttgaaactaaaaaaagtttttttttttttttaatgtcactatgggatttatcatccttctagatatctctgtaggtgaggaattgctgacactagaaaaatagtatgtagtgataataacaaacagatcctccaatgttgacaactttcatgctcaagattttgctaactaagcacataagcacaccaatcttcagcttactatcgaatattttgtggagtagtgtcatgtgagatttttttttcttttcctactgctagaattatattgttattaactttgaccttctactaaataccgagtttgttgattatatcttcaatttacctgtaagtagtgcaattctctactttatacaataagcgactatagttgagtcatatttatgggtcttgtaggttagtactttgactagaatatagtgcaagtcaactatattctcccagtgatattgtagttgagttgctttgtgggcaatctaaaagactctgcaaggcagcacttggattcacttttaccagtttattggtttgaatactttgtaataagttatatgatgaagaacttttgaagtaatgctttgtaatttccattacgattattttatgagcacaaaaggttacttcttttgactcttgtttgacaccagttaaatgataaatttattgtgtactttaagtttggaaggaaggaagttttacattgaaggctcctaataatattttacatgagaagccatgttttttttaatgagatttgaacacatatactgcctcaaatgtatgctccacaaaagctttttgtttctcctctctgactgttggtaaattgaagagtgcacaggcctagaaattggtgttcaatgtacatgtagactctgaataatttgttgttgcactatagtgtatcttgggcttctgagctttctgttcttattgctggcactctgtatctctcaatctgttaatagttttgaagtcattgtgcatggtatgtggagagtgagaaagtaagctgtttgaagaactgctatgttttgattttgagaaaaccattgtcggtttgtgtatatattgttacgctgaataccttctccctagtatatagtgattggtagttggtccctatttatgttctttcaggtctactaattctttctatttgtatttatttctacttctgtgcctaaaacattggtaattcttttataccttatatgacagtttattaggttgattcagattgactcttctggagtttctgaaattcccaattaaaaaaaaatcattattagcttttaatgccattaatgtttctgattgtctcaatagtcaattctttgtagttcttaatctataaaattttggatcttttgcagattgttctgaagaaggttctgcttgtgggaacaaaaacaagtacctacattggcaagccagtggtgacaaatgctgctgtgcatgcggtagttgaagaacaggtaatttccttccttattataactgtttccattccagtcccgtaacggaacaaatgaccatgtttaactgtagttattctctttattctctgacctctaagtctatgctgtttcatgtaggcattagatcgcaaagtaattgtctttaagtacaagaagaagaagaactacaggagaaatattggccaccggcaggtattacacaactccttactcactgcatcttcttcgtttataattcactaaaatctgcttgctggtaaacctgttaaaggtccaactgttttcctataactgataacagtaatcccgttattgcttaagagttaaataacaagctttattttctgataactctgctttttcacttaagttgctcaagagttaaataacaatcttcaaagtattctgcatccttgttctcttttcagactcatgtaactcatagaagaaaactaaaagcttcctaacaaccttataagaaaaaaaacaaacattaatggtgttacttcttctgcccttgcttattgtctaggtcttgtttgattttgatttgattccataatgcagccaattacacggataaggataaccggcatcacaggatatcaagattatcctgctgtcacactcgactcgtaggagctatggaggatggtgtatgatgagaaaatatgaaaattttatgaaggaaatttttgtaatcccttttgtttgtaagatatctttgattgaatttcaattttaacagtgacttttagttcagtcgttattttaccctactcttaatagttatttttatagcaaagactttgccaaaacatataaaaatcagttcatcgctactgagtgtagcctaaaataaataattattgcatttcctacttttcgggatgaacacatccttggtaagtgaccatctgatcttttcaattttcagttctacaactctatttccagcaagctacacaatttataatgacttctatattaaagaaaaagaaattagattgaagtaactaaaataatcagaatttacaatacagagaaacaataaataccactaaaacgtgagaaattcaacctcaaaaaattaataaataaaggggaaattttagcgtacgattccactaaaaataaatttacaataatttttctaaagtttttgtaactgtacaaatcttaatctcgtgagagagcaccacacaagcatattactattggtgtaatttaatattaagttctatattaatttactaaatagtataaaaattattaaccacttacaacgcgctatatcggtatagtattagccaccgtaaggtgcctaatagcaattgttttaatttttaaggcaaaaaatggtactttgcgatggtcagatcatgtgatagttttaagaaagatgattttagagaaaaagaaaaaaagatgccacaacgatgtcctgcgacggggttgggaatgttgtgaaaaataattttatgatgctatattgatggttccttgaaaacgatgctatttcattaggctttgcataaaatttgataaaacttttagtgagaactttttgtttggatgtcattgtttgttttttttattacttttggtattttatgagacgtatatatttaaatttcaaattttgtttgtttaaggagattgtgacaaataagattctacgcacactaaatttaagattccacactagtcgaatgtgtagatctcgagaaaatatatcaaatgttgtgaaaaataattttatgatgctatattgatggttccttaaaaacgatgctatttccttaggctttgcataatatttgataaaacttttagtgagaactttttgtttggatgtcattgtttgttttttatattacttttggtattttatgagatgtgtacgtttaaatttcgaattttgtttgtttaaggagattgtgacaaataattaaaatttgagattctacgcacactaaatttaagattccacactagttgaatgtgtagatctcgagaaaatgtatcaaaagaaaaaaggaaaaacaaaaaacaaatcaccctaactgataaatgaatatgattgaaaagttatgccttagcattttttaaacctaagttatgccaaaatcatcaaaagaaaattgatttgcgtcaatttttactctgaatgtcaagttttttttttatcattgcgtcattttggacatctaaaattatattttgatatgagcattgaatgacattgttcccacattaattttgagctctaaaattatgttttggtgggatcatcgcaaagcatcgttcaaattactttttgtttctaaaatcatattttgatgggattatcgttgttcaaagtgtgtttttttgtttattatgattattcaaaattctacagtttttaactttctagatttgataaaaagtataaaaccaatatgattaaaattttatggtgtcttatataaattttatggtgtgtttaattttcagatgattaaaacataaattgcctattagtaaataatttatataaacggttatccgtgtttcaagaagggggacacgtggcatttccaattcaagattaatcatctaaggcctggtcaaaagccctaccaagataacgggtccattctgtacggaaggatgggcctcatacccatctgaggctctagataattacatccgagatcgaatctctttagatctgaaagggtgtcccgtccgaatatggagcagctgagacccttcaaatgagcatctgggatacatctgaaaggacattccaagaggcatctcgtaaacctaaggatgacgtggtagccctctaccaccaaattccaccgaattaggggattgtcccctgtgtcagaccctaagagtgcgcgcaccaccaaaagaaa

SEQ ID NO: 111712 - DNA, 11067 bp, Cannabis sativa
  modified_base (8940)..(8950): a, c, t, g, unknown or other
tcttaaaaatgtaaaagagttgtaagtttctcttttcaatgggaatccccttgtgaatgtgattgactcagtttgattaatagaaattatctttttttataagaaaaattaataaaataaattaatttagaagataattatagtagaagtatgtatgtaaataaattagtgatgttttgaaaataaatatttatatataaaaaaaatttaaattaactttttttttaaaaaaaaaataataattcaaaataaaaattaataattttttattattaatattattgtattttttaataaatatataataaaatattattataatatatataaaattttaattgtatacaagcagttctatcgtaggagtatacaccttacatcataataaccacatgatctaaaatcaatagtaaaaaaaagttccctaccggtagggaacttttactaggtcctaccataatcttgccctataattatattatatattttcatcgttaacattaacattgcttttatgactattgtgatttgtttaggacactcacttcaacaaacaaaactgatgccttttttttctttttttttttctgaaagtgtggtagacatgaatgtaatataaatttcacataattaaacacacatacttattttttttagtacaattaaaacacatacaaatttctgtttttttaatagatttgaataactcacttaacaaaacaacttaaggcttcaaaccaaagttgttgttggtgattttcatttcccaaaaaacagtaaacgacagtcatcatggttgtcccaaaacagtcgcaaccactcaaaaataataaaataataaaaataaataatattatggatctaattctaaacctccatggatggatctcctctataactaaaactcactccttttctctttaccaaccacggctgtcacaccttccttcgccgccgcttatcaccatttccaggttctgacctctttccattccatttttttttctctttttcatttttacaaacacatgcactgcatagctattagcttcacacatctacggtagtcgactcgactcatgtactgattcattgcttcaaacaatttcgtatgattgattctctgtttgttatatatagggagtgagaaagatgagttttactgtccatgctccgtcttttgagggtttgcgatgtactgatatcaatctaacggtttctaaaccttgtgtgagggttgataatggcactttgtctaatcacgaggcaagaaaggtggtggtgatgtcaagtaatttaattcctaagagaaacttgcaacaaggttctttcgttagaaagaaaaagttggatgaaccacctgttcagaagttgaagttcgtaagaacattgttgattgacaactatgatagctatacctataatatttaccaggagttgtctgtggttaatgggggtaagcttttttgttctttgcaaggggtgttcttcaaatcattatataacattgtttatttacatttggtttgtaaatgtccagtgcccccggtggttgtgcgaaatgatgaatggactataaaagatctgtaccattacttgtacaaagaaagggcatttgataatgttgttatttcacctgggccgggttctccagcttgttcatctgatataggttgggatgatttttaagttttgtaatggtagtttgaattgttgtttctgtagttttcaatatcaggacatttcccaacataataatattacagctcaggggaacacttctcttttactcgatcttctcttggttgaatatatcacatcctttcttagtccttggcagtggaattctatttgttgtttttgtgttggttgtgatctaatattttctgttttgtttataacgttaacttttatgatatttcaggaatatgtcttcaactgctgcttgagtgctgggatatccctattttaggtgtttgtcttggacaccaggcaagtttcattttccatctttacaattgtatatgttatataattagtccctgaaagataagctaatatggaaatttgaactatcactcatgcatgtaagctcaacgtgatatttatactcataattaccaagtctaacctatgatgtgattgtcatttcctcatggatcaacaggccttaggtttggttcatggtgctaaagttgtgcatgcatctgaacccatccatgggcgcttaaggtataactgaattcattttgaatggatttttggattggcttgctctaaagttatagccatcattggtcaggaacatatttttgtattcccctaaatagcagggcacaatttttgtctttaatgttatctagtctttttttgttcagtgaaattgagcataatgggtgcagactgtttcatgacgttccttctggccaaaactcgggatttaaggtgaggtgatgatctttttttgttgataagatgtggttgctagccatttatggtgaggtgataatcttttttgttgataggatgtggttgctagcctcaagtagcagtaattcaaagcgttcatatttattagtgctaatttttgtcttgtaagtttgttgtccagagagagctattgtcttgagatgttaattttagaaaatctacattttggtggttcccacgtcacatgattaaaatgaaaatgtaaatatcatcagcttctggtttacttgaaaattgcattcaaatacttgttaatctttcattattttaattatttactgaggtattttatgctgtttattatggtggagctgattctttttttttttttggaggaaatttgttaatcctttggccagttgcaattgtatctttgaaaccgaaagaaaagttaaaatactatattctaagtctgacatgaatcttgatgcaagtaacttaaaatgttattattccacttagtcaggtctgatctcactgctgtttccttaatcactttgcaggtggttcgatatcattctcttgttattgatgctaactcgctgccaaatgaactcattcctattgcgtggacaacttccaccgatgcactttctcttctagggacgcatgatcttgatattatgcctgattcttctgaagattcttgcccatcaagaagtcaatttagcttgtctgatagagtaggaggaaaggttctcatgggcatcaggcattctactaggcctcattacggtttacaggtgtgctgcatgacatttcaacttactttaatggctctgttctggttatctagaatattaactcatatttggccctcagtttcacccagaaagcgttgcaacatgttacgggaggcaaattttcaagaattttagagagattacagagacttattggcagagattgaagccgacatttgccaatcaaagggtttttcagtatgctggtaaactgaattttttgaaagatttatcttcttttaatactacttattggctgtagtaaaatagttattcagattaagaaactatttaacatagatgaaaggtatgtgcaaccttcactttagaatctgaagccagattgttaggaaccaagtaacttcccacacaactcagagtacactaccatcacgcaacacatgtatggtggtatttgagacacctcccctctcccaagagcaacaactcctgatccaaattcatacaatttatacacctttcaaactctcctacactgtatatatatgtatatattccatgcttctagaaaatcttatacactaccccaaaaccacctatactgttttcttacaaaatacttttagaaaatctttcatgctccctaatgcttaatttagtcctatttcacccttcattgggtgcctatctccatccagcatcgtgtttggttttcgtgctcttataaataggttacctcatacttttcctattaaaatcaactggcttttagtttacttgttcattataaatagatatataaattctatacctctcatttggtatttctttataagaactcctattatgtaatattttctgagtagtaaaccttttttagcacacatgcaggtgccaaatgctaatcagttaatgaaagaagcttctgggagcttacaagtaacacacaacggaaacgatcaactatctaaagaagcttttaaaaatggtcaattagtgcatgatgctgtaaataagagctctttgggcatgtctaatacgttagatctttcacatccaaacattggcaccaaatacctgaagttgaagtggaagaaatttgatgggttggctagtaaagttggtggagcaagtaacatattttattcattgtttggacatcataaagctgagaacaccttttggctggatagttcctcaacagaaaaggttttctttctcattctaatgaacttttaagtgatatgtatgcttttatatgtccatgtgcatgccattttaaatttttgatctcatttttaataattaaattaagttaagaaacagaaatttgttaaaagcagaatgaattcacagctttttgtaaattttcattgctcttaaattgcaggggtttcaatcataacaggatatgtgtatctattattttcacttagtcagattaaatagtatttgcatagtcaaatatagaagtgcgaaagtagaatggtcaagctagaatttggagcaattcttgtttatgagaagttaacttgtaaatgtaatataaattttcacatttgaactgcatgacatttgagattgacttttgttaaaaacgctgagatgtagtgggtcaaatagttttatttatttataatcattattaaaaatttaacttctagagttctttctcatactattcatatagtcatactcccttcaaaaaattgactatggtctctgaatgttcaggaaagagcacgcttctcattcatgggaggtaaaggtggatcactttggaagcatgtcacatatagattaactgatgaaaggttaacttgtcttccagatcatttctgtctttaatttctttcatctaattgttgtgttgttgtgtataatgaaatttttatgattctatatcatttttcagggatttaactctgagaggtggaggttatatgacaattgaagatgctgagggctctaccacgaaaacatttttggaagaaggttttcttgatttcttaaagagggtatcttatgaatattttctctcatctgatttctactatttgttcacaccaccataagttttaagcaagatgaacttctatgtctgtagtatctaatttaagtactttgtttcttgatctttgctctaggagctcctgttatttcgttatgataaaaaagattatgaaggactgccatttgactttcttggtggatatattggttacatcgggtatgcagttaagtcttttagttgtgattattgaactaaaactattatcttccttgtatcactatcatgaactctgattattggtttggagctttctttaactacaaatttttttcctttttctcgtttggagctgcataattggtcaggaattctgttcccctgatgaccgtctctttttcccttctcttaaatttctctaaactcgttgaatgatgtttcatccgtagtactagtatttccatatgtcacctactactctatacctgttcaagcaaggaaaatcatttctttagctgttaatagaagaacttcagtgttacattgactaccttatataaatatatatatatatatatatattttaatcacaccaaaaaaaagcatgtcattattttttgtttttatttatttctggaaatgaatccattagcttagtcttcttcattaccactgaagatgctgattctctttctagctcattaaccaaaaggagtcatgaaccagtaattttgaaacttaaaatagtggaacttgtaatactcatcagtttcttatttatctttttaaaatagttgtcctcctgctgaaccttaatcggaggtaggaaactctggaaaattttgaggtaggtcctcgcgagaaattgaaccccaacctcatgaacaaacccattggtttgtaatactcatcatatatcttatatttctcttaaatgctgttatttttcttttaatgcaggtataaccttaaagttgaatgtggtgtagtttcaaatcgtcacaaatctagaactccagatgcttgttttttctttgcggataatctcctggctatcgatcattgcaatggtgatgtttacataatgtctctacatgaaggaggctcagcttcatcatggttggaggataccaagcagaagcttctcacaatagaaactcctattaaaagagacacagacgaacagactttaaaaactccaagatcagtttcatctgagggcggttttctttgtgataaatcccgagaggactatgtgaaagatattgagaagtgtatggaatacataagaaatggagaaagctacgaattgtgcctaacaaatcaactcagaaagaaaattggagacattgatgcactaggactttaccttcacctcagagagaaaaatccagcaccatatgctgcttggcttaatttttcaagggaaaacctatccatttgctgttcttccccagagaggttcctaagactggataagagtggcatattggaagcaaagcccattaagggtaccatagctcgtggcacaacgcaggaagaagatgaacgcctaaaacggcagttgcaattcaggtaacacgaataccaaatgtatttagcttgttgtccctatttctctgttacatacctgcattagagaaaatactaatgttgatagtaagtacccttttacttcactcaggaaaattgtctattttctctgtcaacagtgaaaaggatcaggccgaaaacttgatgattgttgatcttctaagaaacgaccttgggcgagtctgcgatcctggttctgtttatgttccccatcttatggaagtggaatcctactcaactgtccacaccatggtaagcactatccgagggaagaagcgatcagatgtaactgcagttgattgtgtgagagcagcatttccaggtggttcaatgacaggtgcgccaaagttgagatcaatggagcttcttgattccatcgaaagtagctctcgaggaatctactcaggctccattggatttttttcatataatcaaacatttgatctgaacattgtcattagaacaattgttttacacgagaatgaagcttccataggagcaggaggggctattgtggctctgtcaaattcggaagatgaatacgaagagatgatcttgaaaactagagctcctacaaaagctgtcatggaatttatctaggagattagaaagaatagctcactaatatcattattaacttttacagcaaaagctgttatgaaattcatatataccatacctgtatagaattagcaggccacaatgatatagtttggctcagctctctatttcatgatttgttttcccaaaacaaataaaaagggtcatttattctgttatcaccataagattaaaaatgtttgattttggattttgaatcttctgcctaagtatgtcatttcagtccttgattataatatggtttagtttctaaacttttgtataagtaatattagaattctacctattgcttacattgttacaatattacaagcgacatgtaatttatcaaatttatatgacatattttactcaaagaaatattaattaattacatttactaattcttaccatatacaatacaacttatactttcgtagtgagctcagaattttttttcttctctattgttgttacaagtttgcctttttccttttaattttgtacttgttttatgtttatggtaattttacttttaccttatttttcatttgttatcattttccaatgtttaaacggaacatagctatacatgccagagagaaccaaagttgctcaaatctcacacagagatgattaaacaaacacgattattacaataaaaagcaaaccaacaaacaaaactaaaaataaaaactagaaaagcaaatgaataatacatagtattgacatttgtgctatcgcgttgtatttgtatctacacgttatgatacgacacaattaaatgtgtcaaatattcaaatacaaacacaaaacgattaattagcatatgttacacgacatgacacgataacataattattcaaataaacaatttattttaaaaaattataatttgtggaaaattaatttgttttatcgtgttgacacaattataacacgatgcgattattaaatgtgttcacacaactatgacatgacacgattaaggtagacataaacaaacaaaattattaaacatgtctctcaaacccaattattatgtatctttttaagttgtgtcattgtgttgtgacccatattatcaccccttaataataaccactcaacaaccatagatctgatcaagaatgacattgacaccccaatcgatctcgttcttaatgttagttgatttcaacgtcgtttttatattgtgatcgtttttcttttgatgttcttattttttctttcaaaatatgagagtctattcttactatacattacccgcttccaaaatactattataatatctttttaacaatttaaagatgcttaataaaaaaaactgtaaaaaagggtaaaattgaaaagaacaaaaagttaaataattgaaaatagaaatattcccataattacataaaatactattttttgtaaaaattttagttcaaatattttttttatttttatggtattttataaaacaaaaataaaacaacaagaaaattacataaagtaacaaaaataaaatattcaaacaacatcaaaataataacaaannnnnnnnnnnaaataacaaaaaataaacaaaagtacaatataaaaatacatcaaaatactatattttttgtaaataaaatcgtaaaaatatttaaatacaaccgtatttttattatttttgtgtttttttttttttttcaaattatgtacttgttttctttctaatttgtcttagcataccaagtttaatccaaaatatcattcttagaagtctagtaaaaacataaagctcaacatgggtgtgtccaatgatcttttttttcttttgttcatactaagcaaagagatattacctaaataatggattggttggatcccaattctaaaagtaatgagtaatgattgtaaatgatcaaaaaacatactaggtaaatgtcctcatcatactattatgtaggtaaatgtccttatcttaaatgttttagagaaataactcttttatactcaatttattacttaaattatcttttgtcacaaaaaacaaaaaaaaaaaaaaaaaaagcttttgtcacataaaatgttcatggttctcatattttatatattcattttttaaaaaaatttagaagtgtatcacttaaatatcatagtatatctatattaattttgttaaaattatttttattttaaaattaatttttttatagattattgtagattgttggtatatatattttgtcgtacattaaatatttttttattatatgatatattattattcttccatgatattgtttattttattttattatgtataatataggtgttatccgtgtttctggaaagatgataaatgtacttccaagattcgtttcactttcggaagactcattatcaggcccaattgagtgggtcagcccactaaaggagtcagtctgcgactccatgttcagtaacatattaaaatcatccattacaaggtcagatcgtccaggtccgggaaggattcttggccagaagaaggaaagcccagtatagcatatccggataccctcatagggtattccttgaatgactatctaagaaaatcccaaagcaaaggcttatgtggagatacctcggatacgagatttcactaaatcagaaattcacctagcgccgtatctttcgatatttattgtatgaatctagcagcgcacaacatctatcaacattaaatggacctcacgattgtagatgatcataatcttataattgggtctttactaatttatctaaagttaatattaaatgtatttacctcattggtgagtctagcttcataaaaaaactctaacaatttaaaatcctggccaataaataagatactacatcttcatgcaaaaagttagaaaatcatcattcaaacactaatattgagaaattggggttcttaagcttgagcaagaacattatccttgtgtaatacatcaaagttttttagctaataatattgacacatggactaatgctcgttaacgccccaaccacgtaaaagtcttagttttcttcttctttattttgtatatttcttaagctctatttattttataatcaatttctgaaaaacttgataaatattttagtgattttattgagagcttgaagaaagatttttgaccaaagctgtcatctacaacaatggtggctactagaaaaaccaccgcaaaatctactgtttgcgagggtgaagaagatactgccatggataatgttaacggacctcctccagtacatactcatgtggcaaatgtaggggatggagaaacgtcagaagtcagtgatcgacacgcttgaaaagatccacaatctagaaaataagttgataaaaaccccattgacgatgatgatcaaggagattctaatgaaaattctcatcttaatcaagagtatgaagaagagtactacaagcaagatttcgaagtgatacgattgggaaaagaactcacagatactcagaaaataatgacaggtcaggaagaattttcccaaaaaattgtaggaagctcttgcacagatacaagctaaagtcaatctctcaaaggagaacatcccttgtaaagaccgcttagttttaatttggaaattagctgataaatagggtttaattatgaaatctatgtttgattatgaatttatagtttatga

SEQ ID NO: 111713 - DNA, 2148 bp, Cannabis sativa
  modified_base (27)..(32): a, c, t, g, unknown or other
aagagggcttaaatggattgattggtnnnnnntatatcaataaggtgcatcttgttattcattagcccatcacgaaagaactccacggtaagcgtgcttgactaagggtaattttatgatgggtgacctcctgggaagttttcctaggaagtgtgcgaatgagcacaaagcacactggaaacactcgtgttggtttatagggtcagtcatcagtccatgaagcagctagagtgacgtactcgtgtataagagccattgttttgttggtgtaagggcccaatagagacttgaagcgggacgttacacaaaaggactcatttaaccctatcattttaactctacaatgaacaagctgagagttatcttccaaaattttcaaagacaaaaatttattaagccaaacaatcaaaattttaccttctattatagagcttgtatagtgatcccacccaagaaaggatgagctcattatttctactactttatcacctctaactttattttccataattgctccaatccccaccttgtttttattcataacctccctgactttttcctgcttcttttttgattaaatcctctaatgttccagctcagaatgttgcaattctccatgattattatgagtcataggaccatcttgcagcacactgaacttattgctatgttgctgagccaaccttttttgaattctgtcaccttttctctttggaatttcccattgttcctctttatttttctcatttttaccaactccgtgttctgtagtttcagctgcaggtgtggtagtagccacctactgaggatcaacaccaacttcttgttctgtagcttcagctgatggcgtggtagtagccacctactaaggagcagcagcaagtgtcttctcttccaagactagaattgaagagctttcttcttccttaacaacacttggagctgtgtttggatatttgtcaaatgtttgagcagttgtagtaatttcctccgcaactgtttcagtaggttcattcttggtgcctttctgttgccacttctgtccagccttacaaagatcatcttgatgaccatagcctcaacatttggagaaagtttttggaagccattcataatgaattggaacaaagtcaagcattccccactcattctcaaatgtaatgactgaaggcagttcatcttgaatctcggtaaccactaggactctagcaaactttacttgagtcatttcctttgttatattatccactattattggagtaccaattgtacttactagtgcactaagacaattggtttcccaatattgaagacccaatccaggtagtttcacccaaaccggtacatatcgaatgagcttgatggaatctattctggtgaccatggcctcatgatcacatgtttgttgtcaagatgaaccaccctgcctctaaaacatagtcatgagtggcctcatcattgaatttcaccagtgtgactccattattcattctaacaatcttctccaagcctacatcaccctaaactcttttcaaaaatcccttaaacaccttaattggagggttagctctcattaccacacaaagaatagtaattttccagtatttagattcaatttcgatttcgatttcatctaggtcaagtttaacaattacctttccctcctttgtaattggtggagtgaattgtagcttcgctccaacatagttcaccttcagagcttgccttgcccaatgttgagtagcttgctcttgtagagtcaatccaatctctccctttgttcatggcgcaattgagcgagtgattgttgaatttggtggacaaccctccaagatctgattctcgatttcatcttgtagcaagtaaaaatcaccattcatcacatcaacaaattcactcatagagtcatcaaccatctccaatcaatgtgattcgatcttttggtctgatatttgctcttgatttcgtgatcaaaaaggcttctggttggattttttcttcttcattgggagagaaaatattcatctcatgtcctaaagaagattttcttgaactcggaatcgcaactagaactgaaccgaactaggactaggaccaggaccaagacccagactcgaacccaaacccaaataaaaaaccagaccgaga

SEQ ID NO: 111714 - DNA, 6095 bp, Cannabis sativa
gaataaaacactcaaaaaattctctcttctctattttttttctctaaattataatattacataatactaatatttcataataaattttatgtaattttttttaattaattaggtgaaaaaaataagaattattaggaaagtacacgtgtccttcatactttaatgggtaccaatgaccaaatgtaaaagtggtattttgccgcaatttttaaaaattttggtactaataggaaaatgaacaaaataagtatttaatttctcactttgctgttcttctctttcattccctcgttttttttactgaaacttgcgccaaacgctgaagcaatttgaccttgctcatcaaccacgcttggggagaactccattttaggacattgaaccagaggtttgtatataaatatatgtataaatataaatacacagttgtatgcgtattgcagaaagaccattcaatttcatccaaaaaaaaaaaaaggtacttcaggtttagattttgcttcgagtgtagatatttgcattgcttgcttacttttctttctttgacctggttcaataaagtggtttatgttgcttcttctaggttttggattatcattttctttatagagttttgtgttttatttttgttgaatttcaacacttctatatgatttttgtagttggatatttgggtattaagtgatatattatttgcataaaattaaagggcccttctttctttgaaatttaagtggataattttgagattagaatgtgtatacatagtcagttgttgtgatagttgtataatgtattgtagaattatttgtgagtagaaaacttaaatattaacacaaactacaaggtgctacagcaacatcttttagtttaagaaccatctcttatgacttatgtgctcactcaaatggcagaggaatcagttattcttaaaaaaaagcataccaatcctaattacataatgatacggagagagctcaagtaaacaagggggcaaaaacagttgtagctagctaacaaaggaaaagttttattacaaaagccaagaacaaaactagcctaagaaaaagcatttcaactttagtaatgtaaactccacctgagttaaccagaaatggagctcatcttattcaggaggccttttatttcaccctcttatttggttctcatctctggagaaagattgttccctgacttctccagcattgatgtcatcatctgtagattctgccttattaagtcaaaaataactgatccctccattagtgaagatgttgctaagttgttgtggtagaagcttgaccgggtgtcgctactttgaaagcggcggaatgatcatggaaccggtagttagtcagggttgaaccaaaagggttgttttctttatattctgcaatgttctctagcatcaatacttctggtgaacacaacctgagagctacaggggtcttttaataacatactttctgattctttcaatggtccaaacttgcaaaatgttgagatcaaatcttctcttgaaggcactggaactccagcggcagaagtcaagagaatagcagcagcaccttttgtctttccattagtttcttttttatagtaacttgcattggtgtctggtcttcaagttaaagaaatattttttggagtcttgaaagcagcttgcagttttcttctcctctttttccacacaggttttgaaggaactgtagcaccattgatcggaaccgcttgcgaatccgtccccagtgaattggatttgctgtttgttccattcaaatctggaataattttcggagcggttttctcccttttctttctcttttttcggcatagatttaccttcttcagagaatgaaccaataatttttccatctttgtccaacagtccaaacctaggaggttcattatttgtgagtggcatatatgattggtattattgagaaatgataaaagttgttttttgtttttagcaaagggcaaccaaggcttggtagttggtacattctcttctagctaaaatttcaactttaaataagatcaacttgtctaacttgataattaccagttttgtttctcatatgaacacactttattggattttatatgaacataactacatattcagctacatgatttattactagaaaaattaatatacttctctattataataactgatcgccttgataaaagttattctttttattttattatttgtttgtttcatcatttataggtgtgtggaagtgttaactacttaacctgtgtttgtcttttcacagaaactatgctgtcaaaacttctgagatagagtttatgaatgttttatgtttttaacttaggaaaagctgaggagaaatctaggattgttcttctagaatgtggaccataatctgaactttttaactgtccaagaggcttgtgcaactaagaagattgctttaggtctcttactttattatatgagtagttgttcttgcactactggttaaaaaagttggtgtttcatgttttgttttagtttctctttggtgggtttgctccttaataggggtatatatgagattgctagttgtatatcgtttgttgctctagattgtatagtagtaccaagaccaaaattcaactcgattgttttgaataagtgtgtgtccatacaagtagagaatagagccaattacaagcacatccaatatacattttcagctttgttttactttgcttgaagtaaaagaaaattggtatgtaattaatccctagaatttggcacaaatatggacttcccagtagccctctctagattcatagttgctgatctgctgcaatgagagctaagaggtccttccaaagaggggagccaatgctgctcgaataagtcaatgttggagccatcaccaactaaaaaacaacagccagttctcatcaaatttctaagtagcaatagaattgacaattgagatgtctcaagttgtgaagtgttggcttggacataagatttattgtaatattaatcattgctgcctaatcataaattagaggcgataatttaagattttccttttcatgtgactttcattctatatgtgctatggaaaatgatgaacgaacttttgatcatctaagttttagcaaaaaaaaaacttttgatcatctaaggaaggtggaagaactacagattgcatattctcgtgattacctgaaaagagtgatgttaaaaaaatattttacttcatttggagactaaatggtaatgtattatgtcattttcttttgttgtctgactatttggcaaattaaaatgtattattgtttgatgttgttgtatttcttttaatttgatttgatttctttaattaatttatattctatttttataaatttagattaattaagaataaaataaaatatattatatgggagaaatattgtaaatattaaaagatatgagaatattattgatagttagagaaaatatttgaatgaataatatatatttagaaagtataatatttatatgatatggagataaaatagagaagttgatttatggagaaatgtaaaaatttaaggtaaaataaagaaagtaagattttggtgactattttgaatcataggatggagaagctgaagtgaagagattgtattttaaagttctttcttatttttttagctactagtattaaaagccccaaaagagggagggcaagtaaatagagaagagagaggacaggccaatacaattagtggtgaacccattcatacatttcccctactttctactctctactctcaactctcacttatggatttggatatggaccttgatgatattttcaaagatgatgaagacgactttgacaatgatttctatcaggtccttttttaatatatattcatattatttattttaaatgttctttgtgtacacgatattaacatttgaactttttttatatttctttttgatgttgctcagcaaagagaggcaaccaaagattttgttgtgtacttggttgatgcttccccgaaaatgttcaacactacttctccagacgtgagcttttattttattttatgtctttaaagggttatgtttcttctatcatacaagttctatcgattctgtgatggtgatttttttgccttttcaaaatgcattgtttagtggtatataatgcatatatggtatgctttttgcgaccaaaagtttatttatttatttatcaaaaaattgtgaattgaagtttatttattaatttatagttgtcacttgtcaaaaatagaattcataacatatgacgttttcttagcaaaagaaaagttaagaatttttcttcggtttaactatgtataacgtgttgttttagaagtttgaggatctcattatagctttagaaggtatgaccaagctcttttgtactgggatatttaatgatcatcttggttttcaagtcagtatatgaattgaactcgagtccagaaagcagagggagtaatggggagggatatagaaaaaacaagtagtagtttatgttagttgaatatgacactaaatatatcaccatattgatgatcaataaatattttatcttgattagattatacatgatagttagcttaatgtgattttgtattttgtcgttgccccccatgctcatttcactgtgtcaagatagaaaaatgatataagaaaatcaatgtgtacttgttaacttctgataagtgatgatttaattttgtctgtcattgggcaatggctaattgttacaaaaatgaaaagtaaataaaaaactttctgcatgtcaattgatgtttcacttttatctgtcattagatgatggtcttgatttgtgcctttattcttatgtgctataataatttttaatatattgattttactttcaattgtttcatatctaactgttttagccgcgagcctggtaattctccatacattgtaaataatttaaaacttatttttcatattggcaggcgggcaacgtggatgaaaatcatttccatattgctctcagctgcatctcacagtcattgaaatcacaaatcatcaataattcgtatgatgaagttgctatatgcttctttaatacagtaagatgaatctgtttaagtcttacaatatagaattcttggatcatcaccagagactgatttatattggactaaatataaatctgtctcagatgttgttcagggccatttttttttaattttggtaaacatgtgcagccaagtattagctttcatgaaaatagactgaatataaatctgtctcagatgatgtttggggctgtttctttctttctttcttttttcttcgggtagacttgttcagcccaagttctagcttccagaaaaaaaaactgtttggttttgttttaccattttctggttaaaatatttatttcataagtttatacttgcagagggaaaagaagaatttgcaggacttaaatggtgtctttgtttttaacgctgccgatcgagatcagttagacaggccaactgcaaggctaattaaagagtttgatcttttagagggtaagcatggagtagatagtatgtatggtgcatgtcctgtggaaccattggatcttctctttgtaattatgtctgttgaaatctcattttgtagttgaaataaaaaagaacagggatattcatgaattctgtgttttatttgccacatttctgtttccttgatgttttagaacaagaagttctgttctaaagatgaaacggaaacatgtggtaaatagtatacaacaatgttgttttgcatttataactcttggattcattgtttcattcttttattattgtttgaactttctgttccctctcaaaactaatcatgcataatactgaataagtatttgatgaagttaaaggatgcaaggctgttgatgatcaaactttaggttatggataaatgggcagttaactaggattataaaaattaaggtgataagacccgagatcttcggatcaagagctcaataaaacagtagcaaaacagtaggaattgtatattaaatgtattgagaaattcaattacaaaggataggagccct

SEQ ID NO: 111715 - DNA, 3131 bp, Cannabis sativa
cttaaatgaactcaagttgctacctttttttaattgtcaattttataatataacactaattaatgctatatatacatataagcaataaatcatcaaaaatataaggcttcaaaatttgcaatcataaataaaattaattaaaagaattattagtctttatataataagggaaccttttatagttgaaacacgtatattaattatttaattaccaagtgtaatttgtgtaatatatataataatttctaaaatagttttgttttatttttttgaaatacccaagaaaatagactgtaacaaccagtatatatctgaggaaattgtagtaagtaagaacatttcaatgctgaactatttttgtatatatttcttatataaataaacatattaatttattaaacaagaaagactttgacttgactaaagtattactttattttatttttaatttcaacacggttctgtgacatttttttattcattattaattactattagggaacaaaaatcaaagacttattaattaatgttatgtaaatgttaaaaaaatattttttattattttacttgaaacaaatactaaaagaactgtttaatttatcacatgcaacagcaaatgacagccccacactcacacccactcttggacttattacaagttattattttattttattataattataatatatacttttaaaataataataataatttacagcttaaatactaaatttaaccctcgccatatagatatttatttcatattattataatatatatatgttcttaagaaaaaataataataaattacagcataaatactaagtttgactcttggctgcagataaatatctcagtttaaaattttaactgtatagctctttatagctcaaacgtgatgtttaatgaactctcctttcccaaattcatctattcctcgtcatctcaggtgcattcttcacctgtttcatatcctactgcttagttcttttttacaaatcaaattgtctttggtactaatcctgttgttactcttgctgttatactacagttttatctactgatttacctgaacatcactcaatctctattgctgagtctcacactacaccagttgctacattacttgatgttgaatctgcttctgagtctcctaccaatggctctctttttccatatccacttcctgcagagtcttcatctgtatctacattgattcaagatgaatcttctctttctacacatgcagaacaatctgcaacttcacaacctattacctctcatcatgtagttgcagtatctgagtctccttcttttcatctgttgttgtagtattgcttgagcctccaagaactcatcctttggtaattaagtcttagagagggatttataaacctaaagcctatctggctaccaagcaccaattgtcttcctccttgctacctagagaaccaaaaatagttaaagcagctctccatgtactgaatgcctctatgaacaaagattttgttgctctcatatccaatggtacatggaccttagttccttatgaatttcatatggatctaattgataataagtgtttgtagagtcaagcttaatgcagatagaactgtggacaagtgtaaatctaaactagttgctaaaagttatcttgaacaaccagggattaatttgaagaaacttttagtcttgtgatcaaaccagtgactatgaggctagttctcactcttgtagtgtcttatcaatgagaactaaaaaattggatgtatcaaatgtttttcttaatagaaatcttcaagagactgtctatatgacacatccaacaagttttgaggatcataatcaccctacatatatttccaaattaaacaaagctatctttggcttaaaaaaagctcctagaacttggaatgataaactcaaaaaaatattgttcagttggagtttcactgtttctcgagctgatacatccctatcatatatggtactggtaccaacttggtcattctacttgtctatgtagatgatatcttaatatgacttaactctattctaattcataagctataattgcagttctcaacaattctttctctctcacacacattagctaagttcattattttcttggagtagaaatgcataggaaatttgcagggttgtatctttctcaaagcaaatacattgcagacctattattttaaggttcatttggaaggttctaaggtttgtttaagtcccacaagcagttctcataagctggctctcacagaaggtactccttttgtagataaatactttacaaaaacaccatgagcaatatctcaccttgaccagacttgatgttacattcatcatcaacaagctgcctcaattcattcatgctcccacaaatgtgcactaggaagctagcttgtaaaaggttattaaggtatttaaaaggcacgatttcaagaggactactcatccaacttgcttctagaatggaaatttcagcttactcatatgctaattgggttagttgtcttgataacagatgatccatatgtggttatgccatatttttgggttgaaatttaatctcctggtctgttaaaaagcaacaagtagttgctcgaatccacataatttgaattctatgccttagcaaacacatcagttaaaattaagtggctgagttgcaagtcaaggtcactgaaatgtatagtgtttgggtggataatcaaggagcaacaaccaaccctatctctttcatgccgctgcaagcatattgaaatagactaacattaattttgtgatcagattttaaatcattaactctcaatttgatatgtatcttcaattgatcaagttgctgacatccttactaaggctctgtctaaagatcagtttcggtatctaaaagctaaactcaaagtggtatcaaccccttttcgtttaaaagataaccaacaactgagttagttagtggatggttgttaggcataatttacattagttttctgttttatttcttgatctgttataacaaatttcgagtgtaaattaaggtactgttgtttggtaacacttttattttctaatttttaatcacaaaatgaaagtaaaatttttgtttttgaaaa

SEQ ID NO: 111716 - DNA, 4241 bp, Cannabis sativa
aaattgcagattttattgaacaactaaacaacctaaatttaatcagagagttgtcattagttaaaagaacactaccttattttacaggcaaatcaagaaatacactaaaaaagttaaaaaagaattagtagctagctttgtggaaataacttgaaaagaagcccagaagaaaaaatcttccatatccaactagctagaactcaccatgcaaactttcacatctgccttcccttctttcgttagcaagcatccattcaaacatgttttcctcctgcaatttacaaaatataagatatcaacactcactctacacattaaacaagaaactaatatccctttatacaacatatacacatatatgtatgtgtaatagggagagaacaaatcatagaacacaaaagataaaaacccaggaaggatttacatgtgaaactgtctgaatccatctgaaaacaacttaaaacgcacggaagccttcccaagtgccaaattttgagaccaaaatccatggtctatagtctactgcaaacctcccttggttctctgcagaaacaagagtttacttaccaattgttcttacatactgagaaaatgccttttcaacatgtatcaaagacaaggctaaccatctctcgtagagagcttggaccatgaaaacacactcatatctagtcatctagcggtattaaactataatgtgcgagaaacgtgtatatctttgcagacttacattccctataccactcatgagtgaaggaacaatttaatccaaagactattgtaaaaaggacatttgacttcagataataaaatataataaagcaaacaaaaagtacgagtatagcattgttgcacctttaaagaccatctttcatgctaatcttaatgttttgcactttaattgacaactgtagcttatgatcctcaatatctttcaaaactgaaagcaggttagctcgataaacctcacacttcttgtttgcgttctctaactcatttgtaagttctcgaattcgcttgtccatatcatcctgcatagtagttcataccaaatgtaaagtattttaaggtgcaagactttacaaattgaaatggtataaacactatatggaaacttcaatgatttgggatatcattcatacctctgacatatgttggcctgagctcacttccttatttccactagtatgatttacacgactggcatctacagttgaattccctctaaaacgtccattcaacatcgcagatttgctggaattctttattgcatgatcaaccttttctgcagctttttgcagagcaatcaaggcagcttcatatgtttcagaggtcttcgccccttcatctacaaatttaaaggcctcgtggcgtagagtattatatcgaacagtgtgagactccagataattggtatatacatcactacaatgttcttctaatataacactgcttttggcattccttgtccatcgtttcaatatgtaatgtgctggaagagttagcacattggtgactctaaaaactgccaaaatatgtctgcaaagaagacctgaaaactcgaacatctggcaactacaacttgctttcatttccaaaacattgaacttaacataataagctttatgatcctccccatattttgatacttgatacgtgatgacctccccatcatcctcagccttcgatgccatgaaagttagggtcccaactagctcctcttgaaacctcgcaaacaattttctggtataaagctctgatacttgcttctccattggtgatggagtcttaaggaaaggagaagtgttcatagtatcatagtctgctttcacctccttctcattgcggctttcaagagctttctcatacagcttgaaaaactgatttagatttgtcgacgcatttatgtatccatcaaaatatgagttcatactatcacttctctgcgttatggacatttctgcaaaaaaggtgtcccgcaaatacactggaacccactgcctgcgggcagaatatattgtttgaagccaatcatgatccctgagttcgtatctatcgacaagagacaaccagcaagactcaaattcctcaattgactcagtcaagttgacacatttgtgaaaatctgcttcaaaagttggatgttcaagaaacacgtgagataacttctcttgacatttcttgaatatgtgccatttacagaaacgatgacgggtctccgggaaaacttgcattatggcagctcgtattactgcatcatgatccgtggtgattgacaatggagggcgaccagacattgccgtaagccaagtcttaaacagccatacgaacgatgattcagattcatttatcaagaaagcacaaccaaacaacacaggctgcccatgatgatttactcctgtgaagggtgcaaatggcaatcgatacctgtttgacctataggttgtatcaaaagtaactgtatctccaaaataattataattcgtccttgcctttggatcagcccaaaacacattacctgatgactgatcctcttcaccctgtacggcaaaaaagaaattagagttttcagcctgcatctgcctcaaataatccaagagcaattgaatatccccttctaagctcctctggcgattattcctcatgtaattcctacaatccacctctgtaaatccaaccttacttattccaccatattcttttataagagctgacataattctacgaggacccatcccagctgcctgcaaggtatcaatcaaagtcttagcagggccagagatttgacgatgcgagcggagacaatgcacttgatcaggcggaaccagctcatgattatgttctctaacaaaaccggacacaacccatttccccgaattctgcatcttcacagacaatgaagctttgcatccaactctggtgatagttcgcggccgcttgatttccctatcttttgtacgtttctcatttaaatttctaaaaccttctttggcacaaacaaattgcctctgaataatcgccccatcacgcctagaccggcgagacgagctaacacgggtactaaatccaactctgcgagcataagagttataaaaagccttggcagcctcttcagactcaaattccatcccctcagaaggttcaagatccaataaatctccctcaggaaggtaaatctcaccacttccaccaaaaccaccaccactattaaaaggagggctatcaaccatctcctcatcatcaacatggtgttcaatatccaatccatcatcatctccttctcttccactacctccttcccctgctcccaacccaatatcaaattcaatcacttcattgtccatgtcaaatagagttcagttcctcaataccaaatcagtactcaaaataacccaattacgtgaattttacttctctctgtatacgcaaacatatataataaattaccatacttgtgttcagactaaattccacaaaaaagcttaaaaagttgtaaagaaagaactaaccttcaacgttgcagactcatagtcatcccaacgacaacgatacctctgaaacatcctcatcgtaaaaaatcaaaagtcccttgctttcttgcagaaatgggacgtttggggttctagggttttgcagaagagaaatgacagcgaaaaaaacctagaaaatctaaattcttgaggaatttccgacaatgaatttgagaaacaattgaatcgaaagagaaaaatgattctattttaagctgccttcgtcaatctcgaggaaagccttcacacaagcctttgacgatgccgaccacgaacagagccttcaaacccaaccgtccgtcgaagatgccgatgctcccaaaaacgtgcttaagttggtactgtctgtctgtgctccgatttaggagaagaaaaagagagggaagaaagagaaaggatggatttgcaaatttagggttttgttgtgtgttcatattttagttttggctaattattaattattcactcgaactttaacatgtcccaaattatgcctctgaatttttttgacagttaaaaattcagctgaactattgagattgttagatttaaccgccaaaaaagttcaatgacacgatttagtacatgtcaaaccataaatttaaaaagggttatttgcggcaaaaccccctaaagtagggaggtttttgcaactaatccccaattctaaaatttttgcggtaaaaatccctaaactcaagttctgttagc

SEQ ID NO: 111717 - DNA, 9148 bp, Cannabis sativa
  modified_base (7712)..(7715): a, c, t, g, unknown or other
  modified_base (7837)..(7840): a, c, t, g, unknown or other
gtgtgaccactttttcttatttttcctcacttaaaaagttaaaagcaccaccacttcttataattcatatctcaacatcattggtactctgaaattggacatttattaatatttatttattttcttgagtaagaatgaaaaagtaagaaaaataatcattgaaaactgcagtgttgaaataaatattcaggtgatgacaaaggcaatgaaaactggacgaaataattgaagagttcaaataaattgcaactttgataaattaagagttcaaataatggtggaaaactagtgtaaaaatgtgtaaactcaattcaattatatctttgacaggttcgacattattaataatttacagaggttaataatactttgtaccaataaatatgatcaacaggtcccggcacttccttgtcttcatttattgggaaattttgtagtactacaatgtgtatacctaatatggtgacaaaacaaatgaagggtagaaaatggtcgatctctctccttaaaaaagagagaagtagttcgaaaaaagtggtataaatatacaaaattgtagatttcgaatatatttggatgatctttatgggccttttaaaatcaatctcttaaaggaagaccttatataattggaaagatttttacataaattcaggagtagtagctagcatgagtgacacggaagttggagaaagaaagttgcggccatatgggacctccacttttgaaaaattcagtccatacaaacaattttttttggtttcctttgtaccacaaatgcatcaaacaaagatattatatattaatatatctatctaacagaaactataaatatctatttttataatcaacactcttgagttttcatgatgtgagtataagctataatccttaaagtaagctggtaagtaacaagttaaataactcaaataatacaatcagattaaattaatttatgattaagtaaatgatatgatttagaatagataattacagtatgtttacttatctgctattaatatcgctccaatccaatgtaacaaatacattcgatcatatctactttattaaggccatgtaaaagaaatattacttactcatataaatcttgtgcactgattaagaataatttatttaaatatataatcacaattatattttattatcatatcgttactataattatgattttatctatatattcttattaaacttataattatgtgaatatacatgtaattaatttaactaaacaaatccaaattctgtatatctagttgataaacaaaagtataataaaagaaatattattttataagagcataaaattattatttattttgtagggagaaggaagatgtttgcgcagattatattgcaaacatggagcgaagaagcaatacccttcgtaagtgacttcatggagaggttaatgagaataggctatgttatgcagcatcacgggcgaccgttacaaaggaaaggaagaaaataaacctttcgggtcatgctacccccaacatagattccaaacatcggggcttgagagccaacacctctacaggaggtatgtctcgcataaccataaattatccaccctcagtaggggataatgctacgcttagaactactaaatttgacaagtctcttaagatttctattgtaccgaccgaaatcgttggtggaatgatgaaaatgaaacatactccctctatgtataggtgtctaaattatcttgcacgtgtctgaatggaacctcccattctaatcctagatgacgtgtttcctaccattatgcctatctagtttggtctttcagatggttttcttgaagatgatgacattaacaattcctaacatttcttgttggaatatcaaggttcagggagtcaccaacccctgttgtttggttggttttgacctaaacaccttttttttttcgtatttctcgtcatcaccctggttgtaaatgcgaagggtgtgatctttaatttctttcagctctcaatgaaagtaacaaaatattgaccaagattttcagcaattgaattaatatattattatagagctaaataaagaagtttaagatctgagatttttacgtggttagtgcgttaaagaatcttagttcacaagtcactctattaggatattgtttgctacaacaatggaggtcttcgaagattttagcagtatgtaggcttaagaatcagattccagttacaatgaaatgatagttttatttgcaggagtcatgtgatgggcatgattagtagtccattaggtatatttcaattgtttacttgataatagagttatcagttgatccctctgcatcaaaaccataaaacaagcctaaagtgagtggtaggtagagaagagctgacttgtccacctttgatgtgataagaaattacatgagccacctaaggacgcaagggaaagtgtggattattttcggccgtgaagaggaccaaagtctcagagggtctccatgtccccaccccgactgggctgatggttgaaatggaagccttgaagaagcatgttgcacccaatgtggggagtgaggctacgcctttcgtagtagagctccttgacgtggtagttggtaatgcctctgaattgcccttagagacttgggcaacttgcagcagtattgacgcttttgccctagcccatgctgccaaacaacaagcgattggggcaagactctgaactttttcactttaactttcgatgttgcacgtagctttcttatctttgcacattgcacatgtagctttgttggtggagagggctgctggagaaactggtgcattgatcacaaagctaaagcaggctaaggcaaataattgcgacttgcacaatgtcaatgacacctttctcaccaaacttgctgaggccaagcttcaaatttagagcttgaagaaggagaaccagctgttggaggccaactacgcccagcaagctcgcctcattcgaggaatgagggctgttcacgacctctaccgtgagaccatggagaattttcctgggggagagcttttcaaatcgtccaacagcgcccatccttaaacacccgagacttatagccatcttcttttattgtttgttggttttttttatttttaccctttttgattcgcggagacaattaatttttgtgctaaccacgggactggttgtaataatagtaggccttttaccatttccttctggagctttatttctgatttactagactttttaggggctgggttcatcttgaagtacatggttcaaatgaccactactttaaaacttcccattagtttttgccttttttagtcgatttggggatcatccatggacttaaacttcttatccctggagccgtaacacttcttcctgctaactaattactcgctcgggagaaccactcaccaagtgttagcccagagatgatttcctttgtggaaggggggaaccttcactcttttaacatttcccaggctctcgcacctttacgaagttaggtttcaggagtaatgcccgcggttgtcccatatcgatttttaggcatttctcttacttcgatccttgtcagcatgaagttttagcttcttgcacaacctaacaaacaacttttaggaactccactgagatcagtaagaaagggattcaggcaaatttttcttttcaagaattttggccgaatacgcatctcatctctagatttacacagttttaattttgaaaatagttcttatctttggttgcatatgcatgttgtgctaatttttttggcaaggtgagtgaaaaaaattgcagttgtcaaccaagcatatcgatgactaggcatatcacccctaaatgagttgagagatttaaactcctctaaattctcggtcatttgctagaattccaacatgtaatacttattggtcctgaagaggggatctggatgtgtgctttttagccaaaccttgttttgggaggcataacttaagctatcatccagactgtgcccttctcttccatggccgcttggaggggaatctttccaaaagttgacagaggctaggttaaatttgacagtggtctcctggcttccgtagagaaaagcccttcctgcactaaaatttaagtcaaggcttcatatctagaattgtaggtggaaaccaagttgggtggcagactttaagcggttcctccttccaagagggagggttgaagtcgcgctggtctctaagtaacatttccatccataagtttggaatgtacacttttgccacaatagagaccacgtggcgaaggtgtaggtgtctatggaattccttttaaactgtgcaacatgcttttggtttccttgaaggaaagctaaacctgcgccataacttgagcaactattccaggctggggtctgctttgacacacaagagtcacgttgaattttgatatggcagactttggctttcgcgagggaaggctaaagttgcacaaaaatctgagcaatgactttgatttaaaagaccaaaaggtgaaacatcatttggcgtgcgataaacttcaaccagtccttcttttctagaaaggagagttgaagacctatcgtacccccagtgatctttcacacacaaacaactacgtgcacgcgagagtcatgttgaacttttatgtggcagacttcggctttcgcgcgtgaggaaaggctaaagttgcacaaaaatttaagcgatgacttcactttaaaagaccaaagggtcaaacatcactggacttgcgacagactttaagcagtctttcttttccgagaaagatggttgaagatgtgtcataccctcagtgatctttcatgcacgaaaaactacgtgaatgcgagagccatgttgaacttttatgtggcagactttggctttcgtgagaaaaggctaaagttgcataaaaattcaagtgatgactttgctttaaaagaccaaatggtgaaacatcactgggtgtgcgacacacttcaagcagtctttcttatctgagaaggagggttaaaaacgtgtcatacccccagtgatctttcatgcacgaaaaactacgtgcatgcaagagtcatgttgaacttatgtggtagaatttggcttccgcgaggaaaggctaaagttgcacaaaaattcgagcaatgacttttctttaaaagaccaaagggtgaaacattactaggtgtgcgacagacttcaagcagtccttctttttcgggaaggagggttgaaggcgtgtcataccccagtgatctttcacgcacgaaaaactacgtgcatacgagagtcatgttgaactttcatgtggcagatttcggcttcggcgaggaaaggctaaagttgcacaaaaattcaagtgatgacttcgctttaaaataccaaaggtatcactgggcgtgcgacaaacttcaagcagtccttctcttccaggaaggagggttgaaaatgtgtcatatccccagtgatctttcacgtacgaaaaactatgtgcatgcgagtcatattgaatttttatgtgacagacttcgggttctgtgaggaaaggctaaagttgcacaaaaattcaagcgatgacttcgctttaaaagaccaaaaggttaaacatcactgggcatgcgacaaacttcaagcaatccttctcttttgggaaggaggcttgaagatgtgtcatacccccagtgatctttcatgcacgaaaaactatgtgcatgcaagagtcatgttaaacttttatgtggcagactttagcttccgcgaggaaaggctaaaggttcataaaaattcaagcaatgacttttctttaaaagaccaaagggtgaaacatcactgggcatgcgacagacttcaagcagtccttcccttctgggaaggagggttgaagacgtgtcataccccgagtgatctttcacataggaaaaaccacgtgcctgcgcctcccgcgctctggaaagcctcaggagacgtgcacgacttagtttcccctaggatttcctgggcagtctgtcactcagggtatccccaaggtacctagtagttctcaaggcaaagactcagactacaagcagagtaagcgttactctgatagatatttcttgactggtttatattgtctcgagttactttcttggatgtaacttcaatagtgatagttacatagaaatgacaggaatccttgtcaataaccttcaccagaagtgatttgccataacaacacacttcctaccaacaacaccataaccaagcatgtctagaaacttagcagatgttggtgatactaaaggtaaactcccaggtgtcgtcattataggatcctaatgtcaatttttgatcaacttcacagctcagccaaaaggcagtggaagtagttgtcggtaatggatctgaccctagcgcaacaccggtgctgggattcatgtttaagggaccaaagtcgtgagctggatgaggttgttatatttgataacccttcgtaagttattcatcatcatcgtaactggtcttagcttcttcacctggccccaacatctctcacacctcgttgcttctgcgtggtcatgccttattggacaatgggggactccggattgaggatactggcggtctaccttctcctcaaagagttggctggccagatctgagcttttataaagacgtatgggtactgtgaggactttaagaccacacacgttcactttcttcattttctttgtctggacaggggcgtaggccttcactttcaacaacacccttgaccaacacacctctgacctcaggtcggcccctgttcatatagaagaattgtatataatggactaaaactcttttttcctctcgttcttcttgaataagaagaagcttagtaggaattttcgtagagttttatgtaagtagtatataatgttctttttttgtctcgagagagtcattttaaaaatatcctccccttttcctatggagtgcgagggtatttataggccagctttctttcgtgtgctggctaggttgatcacatttagagcagatctgaccattgatctggtaggtggctgttttatcacatggcatttaaaggtgtcagattgtacagactgggcatcatacacatgtcgtcccagtgtcttcctttttgaatttctcttatcaatggtcgttgaattatttaggctagtatgattgggcgcgcatgctctgtactatggcatatcgtgggggacaaatcctgatgctgtacctaaaaaagccaggctactaagtccgtagtctgacatgtacaagcagagcctccacgaaatgaggatatagccagctagatgttttgcaagacactcttgggcacttgacgagaaattcatacccttttacagaagcctttgacttaagtcctgcgagagtagttggcttcaattcctggggttacgagagacttctagccatggatgtctctcgcatcgctaccttgtgggggagttcctatcaaagaggccctatccatgagataaggcccctatcttccctgaatagtgttcaagagagttaactggctacttattatacttagcctttctagattaggatctacgtgtcaagcttataaaaatctagacaacaatgtcactctattttcttctataaaattgagtggcgcagatgactatattctagatattctatcttgaaatgatataaatcctcgatctnnnnaaatcttctacttgtatatgcttgctaaaggcaacttaagcttatagttagataagtagtggtggtccaagctagaataaaactcaagatatatttagtataaatttaagtctttgaatttnnnntagattccaaatagaaattttaaatttcagtttccagaatacattggatagtacaatataactttcacaagttgtcaatatcaattttctacaatggatctgaactgtatgttaatctatggattatgagatttgtattctatgaccagaatctacttgaactattctaagaactctttgttgtaactagacctaagttatcaaaagacataaccataataatatatctatggcattcgtatcttgttcatagtagttttgacaagatcagtctctgtaaagagaaaatatgcctatatccacttaaaagtaggatcatctgtattcaaacatatgggtgtacatatagggttggatatgagttatcgttaaattctcaacaacgatcactctatattttaccttatacaaagaaattttaaatgtttaaaattttttatgaatttctagcactgttgaaaagatattaaggtaagtggttaaagatcttgcgaattgataggggtggaaaaatatttggttatgcagttcaaagatcattaagtttaacttttaatagtattcaaacttacctccttagaaatccagattacatattgatgaaagtgaaagatttatgattagttactggtagctgcctaagtccttctagagaaataccctagtgataagaaaacttcaaaatgatggaattgttatatacttagtgtataccattactagaatcatggatgtcctgattgtgaacataagaaaagctagaattattaacttacgtttgcaagtttgatagctattcttatgtgattaggggtggacatcctatggtcattaagataagatagtgtttgtttcaacaaatactaattttctaagaatatgactaaatctgaaagtaaaataggaggagatatttttattccaaagtgttctatcatcatattctatataagatggtcccattgcctctgttgtcttaacacaaccgatgaggtcaataccattaatgttcctagatagaaagtcacagtaccttgttatagtggaagggtttcaaggaacaaaccctattatggcttggaagacacttgtgataaaatccattattagtttaaacaagtaatggatagttagaataaggaactaagaagcaaagctaagagaactatggttaaaactattcatatggagtaaccaaaagttttttattacaaggacaagaaggaaattttttgataataagtctattcaatggacttaacaaaactttccgatcttattatcataggtttgagattatctaaacct

SEQ ID NO: 111718 - DNA, 2517 bp, Cannabis sativa
  modified_base (50)..(56): a, c, t, g, unknown or other
  modified_base (2489)..(2489): a, c, t, g, unknown or other
agtcattcctttaaacaataatgggtatgtaatttctttagtaattactnnnnnnnttagttgtatttatgttgatatgaatagatctgcacatatccttgtttttatataccatttttgtcaatgaaacacgaaattcagcaattctgcaatttatggatttttttaggagtttagtgataatttacgaggttgttagcgctactacaaaaatgactttttgcttcagttgttaaatgacacataaacattttgtgtcagttgtctcaactgacgtaataacagcagacgcaaaaaatcaagttatttatttcatttctaaaccgacacaaattgttttttgctttggttgagaactgaagcaaaaagtatgctctattagcgtcagttcttaaatgaagaaagaaacttagttttatattgtaaccgaagctaattagattattgcatcggttacaacttgacacataattttacgcaatttttttttttttactttttgtgtcggctataaaataacgcattgctgtacatagagaaaaattgcagatttctttgtaattttcctcacctgtaattatagatattagaattgcttgcataacattatttatatgactaacaataacaaagctaagatatgctaaggtaggctaagctttgtttctttcaagtttatctcttattttttggataattattgatagggtaggtgagtgtgtgaaaaggtgaccctctcaactttgtgcccgtttttatcacaatagccacaaaaaatcaacaaaaaaaatcaaaaccagtccttcaataagattacggacgtacatatccaacctcttcatgtccattagtgtaacaacatatatcgtcttttactttcaagccaaaaaactcttacaaccaccataaatattttaagtaatatttaaagtggaaagcaaaatacttagacagtacagatttttattctatccactgctttgcattattgcattgcttgccagtgtaccaactgtaagatttagtaaaaataaaataaatgcagtagtattaagaacaattttataatgcagcaaaaagaaaaaaaataaggattaattcatcagtaaatagataacaaatctatgatgaatggtcaagaattcagtcaaaaagcagtacaagaattacagcaaacactaatccatagctactactactatttatcaaaatggcatgtccaattcactaatccatagaacccaaatatctattttttttttattctggaaacagagctcaaataatctataataactattaccataattaatcctacaaatgagatgtttcatggttattatatttaggtatatagataaaaaataataatttgaaatagaggaaatgacttcaattgttagttaacagagcattgacactgactagcaggggtggactcacatataaccgaggtggggcaatcgcttccctgaaaaaaaaaattggaaaaaaaatatatatgcaatttaattagttgtaacatgtatttgtaataaaagatatatttataagtataatattaactttagtgtaatagttaagctatttagcatatagattagaagacaagagttctaatcccattgtattttttttttttaagtttatttttttggctcctctcacttcaaaaaaaaattcgcctcctcactttaaatcttaggtccgcgactactgactaggaaacgaagtccaccataaacaaaacacatgctactgccggacttgggaaatgaaagaacaacaatcccatttttttcttgttttgaagagaccaatatatacacctgacaatatgatctaaatccaaacatgtcctttatgatagcacacgtatatatgatatatagccctaaataataataatataacactagaaaccaaatatttggactattacagaaaaaagaaaatcgttggactatatatatactagtcttcctctgcatttacgtttttggttctttacttttgtttttatttagtttttacattcagtatacattgttttgtcttttaaaagggtctacttcatttacttaatttatatggatcaaaatcaataaaattgttccatgaggaaaaagaagatgccaactgagaattggtctattactatagtattactgatactagtaatactagcaatactatatcaaacaagtgatactagtaatactatatgaaagggatatagtctatcaaatatcaaacttgaacaataccaaacttctcttgttcacacaccaaccattgcattggctcactcaaaataccttttccccttttcttatttttgtctgctaaagaatactccaaccaaaacaactcattcatatgcaatcttaactcaattcaaataaaactatcattattataaatatttgggtaaatactattttgaaccctgtgttttacaaaaattactaattagaccctctattttnttacatgacaaaatggaccctgtatttt

SEQ ID NO: 111719 - DNA, 3895 bp, Cannabis sativa
  modified_base (27)..(30): a, c, t, g, unknown or other
aaacgtgattaactgctaatttccaannnnaactaagcggtctttacatttattgtctcactggtcctttgaactatttcaagacttaaatacttgtttccctcatctcgtcctattgaattggggaacaatatttcctataatacaatatttcttagggaaccatcattatggtactatgataattgttagtgtaagaaaattctattagagtcaagtaattactccatgagccctcaaagtccatgacacaggctcacaataaatattctataatctcaatcgtcctcttggactgtttgtcagtctaagggtgaaaagctacactgaacttcagctttgtacccaaaactctctctaaagactaacccaaaatttctgatgtaaacttcgaatctctatatgaaataatagattttggagctccatggagacgaactatttccttaacgtataacttcgtatattgatctactgtacaggtgttctttattggcaagaagtgttctaattttgaaaatgatccactaaaacccatatcgaatcatacattcccatagttctaggcaaaccaaccacaaagcctattgtaacattttcccactttcacccaagaaatgttaatgattacaatagccctaccggactttgatatcttgccttaattagatgacatgctaagcacttgtatacatatttgactatattcctctctatcccgcaccaccagtaatagagttttaaatcttggtacattttaggggtatttagatgcaatgaataaggtgtagtacgagctttatcaattatttctttcttgagctcaccactgctcaaaatatatacttgagagccttgaaaagaaacatttcacattgtttgagattgagaagtccttagcccaatctgctaatacctcctcccaaatcctagctaacttagagtatacaaatctatctaataaatctgactgaagtattaggttatgcagtttttcaactacaaactcaataccagccctagccatatctaaagtcaactgaggtgagatctttatggcactaaaaaccttcccaggaccttctacttaaagcatctacaaccacattgactttcctggggtaacacagaatctcatagtcataatccttgactagctctaacgactgcctctatctcatattcaaatctttctgagtaaagaagtgcttgagactcttatggttaatatatatatatatcataattttcctctcaccgataatgtcgccaaattttcagagtaagcagaaccacaccaagttctaaatcatgtatcaggtaacgtttctcaaattccttcaattgacaaaaacataagcaatgactttgtcagcttatattagaacacaccctagaccttgtttggatgtgtcactataagctgcaaactttagtaactatttttggccttggcccatttcttttaatcgactcaatcttccctagatacactatgatcccatctttatgctctagaaatgacacttgtgataattagaattcacattttttgaaccttacatatatcttattatttttgagtcattacaaaactattaggaggtgctgctcatgctcagcctctgctaagagtatactaggatgtcatcaataaacactataacaaagcagtcgaggaagtctttgaatatcctattcataagattcctaaaggttgctggagtattcttttaatccaaacgaaaaaactggaaactcatagtgactgtacttgatttaaaatgctatcttcgggatatcttctcctcaaattctcaattgatgataacccaaacgcaaatcagtcttggagaaaatggtcttaccctgaagttgattgaacaagtcatcaattctagacaatagatacttattcttaattgttaacttgttcaactccagtaatcaatacacatatgaagggacccatccttctttttcataaacaaaaccggagctccccaaggcaaaacactagatcgggtaaatcctaaatccaacatcccttgaaattgtacttttagctccttaaattgtgctagagccattcaataaggtgcctttgagataggctctacccgaggtactaaatcaatgatgaaatctatttctcgctatgcggtaatcctagtaacttctcaagaaatacatccagaaattctcttacaactctgacatccttaggcccaatgtattgggtctgctagagtcgatgacaaccgctaagaatcctacactcccactatgtagtaaacccttagctctcaaactgaaataattagaatttgagaaccttagacgtacccgacatacataaatgatttctcactctctagttgaaaagttacaatcttccatttatagttaatactggataagtactaggacaaaaaatccattccaagtatgatgtcaaactcagttaatgataactctaccaaatcgacactcaactccctgttcttaattctgattggcacagacctgacccaccttctagagataactaactctccaccaggtagtatggcttcaaaccctacattaataatatctctgggcccacccaacttattaatcacttccaacgccacatagaattgtgtaaccctagcgtcaaatagaactgtaaaaagaagtcattgacaagaagctaacttgatactactaaagggctggctgcagcatctacttaaataatattaaaaacctgtgctggagcgggctttgcttcttttttcttcagttgagggcaatgtttcttgaggtgcccaaccaaaccacactagaaatagaatttctggttactttccccagggtgatgtttcttagagtctcgacactcaagataggagtaagcatgaagcccacctctaccttggttcccaagaaacctcttactctaatataagctttatgtcagaaaattccttcccttcaggtcaacattagaatttccaccctccttgctagaaccagaagtaggaagggtggtattcccaccaacacttgaagtcgcttgagtcttctgaaggaatttcacagcacctttgactcaaatagccttcctaaccatctttgtataggttgttgtgtcattggttgaaataaccaaattatggctgatcttggcattcaacccaccaagtatttttccttcttactgaaatctgttggaactattctagaagccaacttgtctaatcgatcagatttcatagtatattttcttacttacatattcttgccctaaaccaagttagaaaattctttcctcttaacactgcgaattgcttccttataatatttagcattaaacagatcctaaaattcttctcagattattatagtgacgtttcgagtgagggacaccattttccaccacacgagagcatcttcttgaaattgaaatatagcacacgtcacccagtcatttttggtgacttccataaaatttagaattctctcgattattgttaaccactgctcaaacttcataacatcaggacctccccaaaaaaagttggaggtgcttgtttacaaaacctctcatccaaagattccatacagttgctagcaataggtttgcaccgctggaattaaagtgacgagaacttgctaaggaggcattgcaagaggaccctgttgtctcgccctctgaatttcttcctcttgttggtgaatttgggcttgcatttttgcaaacctttgctcttaatcctaaggagtttgaggttgattttcaagaccaccactttaaatccttccacagcctccaccggttccatggagatttggaggattttgacctccccgactgccttcggtctcgaccatattaccttgactcctt

SEQ ID NO: 111720 - DNA, 12320 bp, Cannabis sativa
ttattgtaaaatgtaatattgttgaaataatattattgcaatagctaatatatatatgtggaatacttcttaatgtgtaatatatattatgattgtctgttattttaatttttttgtagcggttttaaatactacaataataatattattaattaattagaagttaaaatgatatttactcttaaatagtaattttacatatgtataaataaattaataaataattaaaaaatgtataagttcaattattattattatgaagaccgcgcaacgcgcggttatattccctagtgaaactatcattcaactactgatctcccattttgttgcgcatttggtgtgggcaattaaaataattaaaagattttttttagttaaaaagtaaaagaaatatttttttttcaacatgggcttaagcccacactggtccttcattgggtccgccagtgcctcatacaaaatttactaaattacaatatgtaatatgttagatattttatgtttgtacaaacattaaaaataaaatttatgttatccttgttattttattgtaaaaggaggggtggcaattcgtgtttacggtgtcgaaactcatgtattacatatatttatatatatatgttcgacctaaacacattttctttaataaacatgtcaaaaaattaaattcaaatacgactcgtttataaatgggttggcacaaagcgactcgtgtaacctgtttataaatgcatcttatttaaacttatcaactcattaatttattaatgatctgtttaacacgtttatgacatatttaactcatttataaattattaaagccaaaaatcaactttaaacaggtcaatttcgtgttagcatcgtcaatctgaacacaatctatttattaaacgagttagaccggtcaaatgaactaaacccatttaaggcaaatataaacaaactaattttgtgcaggttttgagttgggtcatcgtgtctgaccaattttgtcgtctttaattaaaagtatcgtgaatgcattgttaaatattatttttttcgtcacaaatatattgttttttcttttatttcaatttaacaatgaacatatcgcaaaaatattgttaaaaattgctttgtaccataaaatttaagttttgtaatatcatcgcaaatatatcgttaagtaacgcaaaatatataaatttgatctaaaatcagtaatgatgaattagtatcttaactaaatagaattacatggaaaaaaaaaacaaaaaattgatgagtgctgcaatggtgatagggttatttggatgagaagtaaaatctatttattttgatgaaatgagtgcttaaaaatggtgtggataatggatatttttggtttagtgagaaaaaagaaagaggatagagggagaatagtgcactagctacagtcacactgtcaattacttagctcgaataatttaaaaaaacccttaactccaatagtgtagtagctatagtcacgtgttaattatctcgcagtaaatatatatgtttttttttttttttgacattttttgaaatatcatgaacaatttttgtaggttgagtactttttttaagaaaatatagaataacaacatttaaatacatcaaccatctttataagaaaaggtgtgaaattattaagatgatttgttgtttagttgtaggattatggaaaaataaataatgatagagaatgagtatcactttcttctttacttaccctttttttagaagtaaattaaaatatttgcgatcgcaccaatttgagattaaaaatgagattagcaactacacgaggttggaggattcacagtagaattctcatttttgtcaaatataacaattgttatatacttgagataaaatatacatgtactttttataatcttaaattagtatatctaattttttattctataaaacaacatatataatttaataaattaataacttaaaaagatatttaatcaatgacatttttccaacttacaagaaaatctggcaagtcaagtaaacaatttgctttgaagtatttaatttagattgaagatcaatcgaaataatgtacacaaataaaggcacctcaaatttcacttttgtgtataatgtctaatttctctttcttgtattgccactgtaaaatacagatatagaaatttacccattctaacctaaaaaaaaaagagaaaaaaaaactatacaaagaaaaagaaacacactctctcccaaggtgtacagttgtgcctacatttacaacaaactaatctcctcctagtgtgttcacactagagaagaactcgttggacttgaatccattaagcgaaatggtttgatcagtagctcttcaaaatcatctagttgtaagtctgaggtatcactatcacaaaatgttgtttgctcgcttgatggatcattgctttctccagcatcctcgtcggtaacatccatggcaataaaatcagttaaattttcattagcaatgatgttattgtaatcttgtgcaatgttcttctcaaaccccgcttttctggactcaggaacctggggatctggagagccgaaataccgccctctatcatttctcaattctcttgatcgtttccttttcttttcctgcattcggtttttagggtgatggagcttgcatttggattcttgaagacaggttcctgtagcttcaaaacttggacagatgtagctatgcttcttccggcactgtgagcaagagatggattctattttactagctacttggtacaacaatagattgagtttacgagtatgggaagaaagagacaaaagggttaccaattttacaaacacaaatctacaacagtgttgttggagtgacagaatgtcaaccagtgagattttttttttttttttttttctaaatattagtactttcgaagattgggaactgttactacctacgacatcgtatggaatgagtaatcgagaaaagaaagttgatctgatcaggaaggttatttgtatgtcccatgaaggcataaaaatcatttccttcaaaggctgtgttagtgcgataacaaactgacctcaatacttagcaagaagtctcaagttgatccatgatgataccaaatcatgaagaaagaaagaacaggaaaaagaaaaataaaaacactgatttacacagcaaaacattacctcattcccatcagaacaatatcccctgagaaatccttcacaagtcgctgcctttggattcacatttacatgtcggtaaggacagcttttattggtgcataaacctgccaggaaatctatcagtgttccacctctaacaacgcactttttttttactactttcttttaattaaaaaatgaaaaaagaaacacaacaccgccaagaaaaaagcttatgctaccttgcaaaaagtatgagcaatctggcattctttctggaataacctgcatatattaataaaattcatgttaaaaatagttgagttttgcaaagacagcagcaaagttcttgcagaagagaaaggggaggggagcactgcatcaaatttctttgagtgcaattatggaatgataaaccttgtgggtcaatttgcagttgtcattagaacataaaccattcaaaaactttgtacaaactgcaattttggatggatcatgaatgaagtgacatctcccattatccttgttgcacttcccaaatcttgtaaagaactgacaatactttctctttttagccagccggaccctggcagtgtgcaaactccaacggaccttctcacttgccaatatccttgttcgtttctttggatctctaacaagctggttaccgtttccaatccgaacatatctgccaaaatttgaataaaaaaaatttgtatcaaactaaagttaccatcaatcagaaagattaacaaatactgataaaacataaaaatacacaacaacctataaaaaacaagcaacttactcattattgccaatcactagtctcctggggatgtaggatctctttgcatccttatcaggatgaactgtagcagcaaatgatgaatcatcatctaccacaggacatgtgaagttttatgatcaattaacaataagataccagaacttatcaaaatatgataaaggataaaagaagccccaatcagaaacactagacactaaagaatagaattcatttatcctgcataacaaaagtgatcacctgatatcctctgaagtgttcgtcttgatgggtccattttataacggcacgagccaacacggaatatcctctcacctgcgtcattgcacaaaatagagaataaaaaatagggataaattagcataaacatctgcaaacagaaagataattgaatgagccaagatgggaaagaactctactgttaactggcttacgtgaagaatgacttctgtccttggaaccagaactattgcgtgtagatcctttctgttctcttttcttcttctcaacctcagcaacagcaagtgtagcttcctatgtgaaaaaataatagcattgatatattatacagtataaaagctattattgataaaatccatcgtgtatgtacagtttattagagtagcagcaactaacctcatgagctttctttgagtgtttgtcaatggattttgaccattttaaacttgatccaccaacacttaacacctttgattttcgtagtgaaaatccattggttgaccttgtgtaaactgtatctcgctttcttgataacagcaatttcccactaaaagcagaaaaatcaatcactattttcttacacaacataaacaagtacgatagaaactgcacaaccttcataatttgataaatagtccatacctgattgctaaggaattacttttggaaatcgaattccagttttgcatggaatttctccagtatgttgtacgcttccaagggaaaaggtgaggataaaccttctgatggcttattgtaccactatcattatttgatgactgtgagttacgcagtgtccagaccagagagtttgatgagcgtttaaatgtctttgcaacagctgcacatgaataaagctcatgttttatgtgccatgaaaattgatgagtcattcagcacatatttgtcttacacaactattagctatatgagaacatcaaggtccgtccatgctgagagtatatttactatgacagaaaaagccaaaaacatctaacacaattaaaccagcagttttatctttattcattattacaaacttgtaaacagagggcttagcaactcatattcagaaatttcaagaaaaacaagaagaaattataaacatttgtcagaactatacattctcattttatgcaacccacaaaagacacatatcctaatatcaaagagtagaaaataaagtgttcaacactaaacgtacggtccaccatagctacttcatctatcattttatagcatgcatgatgcatatgtgtgcatatacaaatcaaataaaaaaaaatataaaggtttataatagactgccacatttattaagttcttcaacgtacccttttgtgaacgcttcttattcgatcttctgcttgagatagctttgagagttatttggacatccagactcaaattgtcatcaggcataaccatgggctgtttggtgtggctttccagtgaagtccttacgagctgattttttctcttcttgaagtacccatcaaaggatgacgattgcgtcaaatcagtagaatttgaagttgcaaccaactgattcaatttgcgctttacatacactattctctttgggtctacagatgccgaattcccatcatctaattcagactggttatccaaactagtaagtatgccattttggttttcagaagtcagtgaatccttcacaaatttagttgtgacagtgttctctgttgaacttataggatctgatgtagtttcaaagcaaccactaagatggggccctgctgttggggaagacgtacaatcccttgatgatatagggacattaggcaatttagtcccactatgtactaatgatgttctggacttttcacaagaagtctttgtttcccccttcctcaagaaaccatttgacatcccaacatcaacttttttgatgctactctttgattcatctaaaccagttgagctcaaccggttaacaggacaaaaaccaggagaacgctgaggtaaagaagcagctggagaaggctttcgaacaaggctattgccctttcgtacataagaagtgctttgaatctttctatctttaactgttaactgcgattgagaaagatcagtcctcgagaaaggcttacttccaggaagagatgcagaagaaacattatttcgatgccaagttcgtgggttggcatgtgttgatgtggttttcctttttatgttggtgacagcaaaagatgtactaccaggaaaggttctaggagggggatgacccagctggttcttctgcccattgtagtgatcatcactactgatattcacaccttttggagaactttcagaatcttgcaaaggcaatgatatcaacttctcctcaattgcttggtccgtttcagttgcacaatctgactttagattagcatcagtacactgcaaaagtgatttttcagcagctacgatagaaccatctgtatccacaaacgtttttatcagctctccatcttcgctacaagtttcattagatatttgacagccagacatggcatctaatatgcatgcattggatgcagtaatcagggagtgctgagaatcaatgtttcttagagcatcaggcaccaactccatagcttcatcactggaggtagcagcggacactccattttgatcaacaggcaaagagagatcattagacaagctgcgaaattcatttttcacaagaagattatcagattccacacctgtaaaagaaaatctcagatttatatctagagcctggacatttgaaagaattgtgcaatgaggaggctcttcttgagcaataacttcaggaggttcttcttgaccaataacttgctctctagatgcagacacacccagcctttctactcctcttctttccatattacaagcctcagcatgctgatcaaaagcagccactactgcagcatcaatatttttttgttcctgtcttgatccttctggacaaatcgattccacagttggaattattgacttctcaagagttagatcacaacaaagttggttttcagatttcaaggtatcgtcattaaagacactccttacagcaaccacagtgttagaagatcctttgggtaattcagtgatctcatgtacacagtgcgtcaaattagttgcagtagatggagtatctgcaatagatctgttcatatccgtgttttgttgcattgcaacctcatttgaagtaaatagttctgcacaagaagtagatgaaggctgttcatcagtctctgaagttgttagactaggcatagccatatgaggattcagagttttcctcttctttctacaatgtggagtaaagtggaaatcatctttgacattatctctagctatcaagttagagtcgaaaatcccatcagatgaactattttgatgcagaacaatggcttggtcttcacctggtggtaaggcaacatccaaactccccatacaagaaacaacagcattattttcattgtcagcagaaaaacttaacattgtatctacagcggtagtagggttagaaacattaacagcatctaaagcagtgtcagttgtacttgaaaagtctaactgacttctaactgttctcttcttactattcaaagatttatctcctttattatttccaaatgatttcgtattagggaagtttttcatggcaccattttcagacaattcagcaccaccatctgtagatggttgcatgtggtccacagtgcaactgctggaaatggtagtgttcttttcactatttcttaagttgtctcccagagaggtagtttcatcaatgtgcaagctgctgtcttcatccatggtggtcttccctaaatctaacaaaccaacttttgcacagttttctgctgacaaagtagcatctttttggacactattatcatgcaatgcagcgacctcaatactacaaggtagcttgctcaaagcatcattagtaccaacatcacaaactttgctttcctcatttgacaatgtgaggccactgacaacatccgatgtgccactgttgtaacaatatgtattcacaagcttgttgtgcatttggatttcccctggattcaagagtgcagaatcaacattgtctccaataggcaacgtgactggtattgggtccttttctaatgcaccttcaaataataatgagtcaccacttggatgatactctttaatatttaccacatctgcaatttcaggaatatcaatagtacttacactgagtgacctaactaaatccttgttactatttgacatggtagggaagccctcgactgataactctggacatttgtcaatcctgatatcttcagaacttgaaaggctgttgccaattttgtctatgttgtttatgctttgcctactagaattgtcattaacgccaagttcctcagactctatagctgcagcaaacccttctaactttttcccttcatgcttcattttaacttcattggggcaaagacaagagactgattcacccttgtcatttccggaggcttcagatggactagggacggacacatctgctttcgcaagttcatcacgctttctcttttgttgtgaattcacctgtggacgagggcgtagcactttctttataactttcctcaccacttttttcttcttagcaaccttgcgagagccattatcagagccaactttagtatcatgtttattattaatttcagcacattcggaagactttttcaattcggtctttttaaccaatcgattggacacacttgaatgagcttgtgtgctagtatcacgcgtattcttaacaccagaagaagccactccttctgactgtgtcgtgtccttcttgtgagaagatctatcgttcccaacatccatatttgcagtagtatcacagaatttactaagctctggatttgaacaatccttatcagataaagaatctttcctaaatttcaaatctctactggtcaaatcggcaccagtaacattggaagagctcgatggtaccacaattgccttagctaccagtgaattagatttaaaagaaacgtcaagctctactgggcttccctctctttcttcttcttcttcttcttcttcatacacatattgatctttgcgcctgaaagaactggagttagaattgtcatgataaccagtataatgcgattgctcactatccacattcctgtgattagactttcctttttgaagacgaagtaaagcactcttcttctgtaactgcttcctcggagtacgattaaattcatgggcatcttccctgcttcccctactattgtaccttcccaattctggaccaaaatactcacgtttcacggagccaacatgagccccttcgccattattaacctcagagtttcctttctcaaaagaggaattatgggattctctggaaaattttcgatcgtgaacccttctttggttgtcatgacaaacaccctctcttctactaccactcctgtatatatcattactataagaagagccgtaccggggattataactctccgattccaaatccatatccctcactgacaaactaggattagacgcgaaccctacatcgcgaaaagaaggaccaggactcgacaaaaagctacctcggcgagaatagtcatcctcttctaaaccccttgaaagttcatctctatgctttgattcaaatccatcaacatattctgctctaaacctagaaatgccctcagaagcatgtctcaatttgctgttcatattatacggagacaaaggtttgtggtcgagctgaaacttctgagaaccgcggtcgaaatccagtggcgtgtgtggcctctcagtcatagtttcggccaaaaccctcggttgctcccataattcttgccggatttccggttcaaattcggccaaacgatgcctagggcggtcatcctcaaagtctaattgcctcgaaacgttagccgagatggagtaatcgcgatgaaggtacggtgatctggctaagtcgtcttcaaaacaagtacgatcatgattaggattagcgaaagatgattgagattgtccaggactgtaaggatgcatctgcggagggtgataggccgcagacgatgattgtggcggcggcggaggcggaggtaggggttgaaacgaaggcatttggtgtcgtggtggtggtggtggtggtggtggcagaggctgagactgagggtgaggtcgtggaatatggtgatgacgttgttgataacgagggttgttgaaattggggtcgtcggggtagtgagaacgagaagagttgggaactgaaacgtacctggacttttgctggtggttgtgatgatggtggttctggtagtgatggtgagagttcggaagatccattgcaccagatcttgattgttgagcagtggtttctgttttgggttttagcagtagccagaagaagaagaaagaagaagaagaagaagaagttgtttcgtttcttctttcttagaagttattattagtggtagtatttggtcttcctttctttattgataagtcaataatgttccattctttctctcttttatttcttcttctttttttttttttttttattctttttaattaaataagtcctttttttttcactttttcaattattattaattcttgcttgcttaattatgattcttgtctctaaattttgatgctgttaaaaatttaaactatttagattaacacaaattttaattatcatattaattttagctacaatatcttttcactaaaaataaaactactattttacctaattttgtagaggtaatcattctttaacttttaaattaaactcacttcctaataaaaatattattcgggacttatttaatgccacttcaataaatgtaacaatttttaaaaagctagtgcatattataatgtttaatatctttttaccctaaatattattttagattctaaattttgtaaaagctataaattagactctattaatgacaatttaaatcttatattttataaaataatacaaaataaacattgaacttaaattttccttatttttttaatataactaatctaaaactagtttttagtacaaataaatacaaaaatatataactatttttgtcataacacttttagattaggttgttattaaattttaatttgacaaaaattgagatcagtgtctatttcatacaattttaataaatataggattcgagttgtcatttaacaaaacagaataacaaatcggttggagatgcaaaaattgatctatatttggtccaaataatagtcttgtgacatttttgcatcaacttttattattatgctccaatacataattgtcaatcttgatgcaaaatttaatgtcatttaatgttcatctaataatttattaaaaatataaaatattaataatcatacaaaattaaatataaatttaatattaattatgaaagttatttaaaattgagccattataaaattttaataataaaatattaaaatagtataatagtaaatataaaatcatagtatttattgtgatgtaaattttgtatcatgctatattgtgatctaaatttagatcactttttattatgtgagatatatgcattaagatttgacgcactattggagtagactttaaaaagtgaactatattttgcatttgtatcaattatttgcattttcattaaaaatgctctaacatttactaaatacatagtttaaaatagtatttgtttttttaatgtaacattgtatattatacttataacaaatatacttccaaaaatttggattaaactcattgtttaaataatttattttagacatatatataaaatataaataattaatcatcttattttatataatttgaatagggataatttagggaattttttcaaaatacatttttattatgttttatttacattgttacattataacatttttatttacaaaaatatatttataaagctttagaattataaaatagggatatttacggcataaataccatacgttttcagttttatacacttaaataccacatgttttttttcgacggattaaataccttaaattacatttccgttacttccgtcac

SEQ ID NO: 111721 - DNA, 6970 bp, Cannabis sativa
ctctctctctctctctctagtgttgaacctcgacccataacctccgtcgtcgaacccagaaccccaatcacaagcccctgctatcgtcttctctcatggtctctctctctctcaaagtctcaccatctccacccaaagtcttaaacttcacgagctcaaccaccccgaaaccctcacccatcgctcatttttttgcatttttatatgattttttagttttttacgatatttgatgatgtatttgtaatgatagactaaatttaaggttagggatgaagtttagcaatgttttgtgatgattttagcgatgtatttttgatatgagactataaaatgcaaagtacatcgctaatcatcgtgaaaacttgagagtgatttagcgacatttagcgatatgtttaactatgttaagttagcaatatttagcgatgtttaacgacattgtgaaattcataaaaaatacaaaaaaatgagcgatgggttgagaattctagcgataggtggggattttaaaggtttcggggtggagacgacgagccttagttagagtgagagagttagagagtgagagaaagttagaaagagaggcctttttaaaatgtaagagtatttttgggggaaaaatagattaaaagtacagataccctatttctaattggctggtattaaaagatcatgctttatatttaagcatgctaagctaaatttcccttatcaaattataagaattttaacgtgtcgtgtttttaggctactctattcatacttacatgtcatgccttcagacttatcatgacatgtcgtgcttaagtctattttttccgtgtcgtgttgtgaaaatttgtcgtatcatgtcgtgtcgtgtttaagctcatattttttcgtgtcaagtcatgcttgtgccttatgaactcgtgccagtttcatgcagtgtcaaaaagttcagcccgtaattacaacacaactatactattgtataaatttaagaatatttatgtaatttttacgaaatgcaaaacacacttgttatgaggagtcttatttgcatctcaaaattttatagacattctattttaataaattttattttatataaaatatatatcttcaatttatatgagttttttttcttttattttattctcaaaaaatacacataaaataaaaatatattatattttaaatattaaaaaaaaaataaaaaaaattctacatgactcaaacaaacatttatgaaaaaatattattaaaattaatacaaaataatttgattatttttttaaagaaattattaaaggtaatttttttatttattatttttgtagaatcacaattgttggaaactactatgcaaatccaaatttcaagatagtatgggttttagattctttgttcattttaatcaagcacttcttgcaaagcaactttggcagatctttgacatgcctaattccttgttgagccgattattgaagcacatatatttttccaacaaaaacttcttataggctaatatggggcattcaccatctttaacatgacaaggtatttgttaaggaagatagctgttaattaaaggacttcgatataaaattagaaatggtttcacaatgaattatgcttcggaccggcggatacctggacatcacaactttcagcccctatcctactttggcccaccatctttaattgttgtaaatctcattacggagactagagagtgagacaacaacctattataatcttacttctcttcgataaatgttgacaagattttatcaatccccttgagtatcttccaaacgcaggatcgattaatttggcatcataatactactgacatttatacggtcaaatcgggattccatttagctgataagttggtggaagtagatgattcttcgacatcaaacactcactaaacatggtggaaaaattttcgggcattacatctgccaccaaaagttaaaatatttgcttggagagtcattcaagatgcgcttccagttgctaccgctcttcgtagaaggaaaatcatagattcaacaacttgttctttgtgtgcacatgcttggaaattaattgggcattgccttgtttacatgtcgaaatgtgaagaaggtgtggaaaaacaaccattgactatcattttgctcaacaaatgaacatgggtgattacattttccatctttcatctttacatttaaaagaagatttagatctaattatatgtattatgtggactatttggactgaaaagaatcgagtctcctatgaagataagagtcgagatggctctaccattgctacttacgtcagcacatatttaaagtcctacatagcaaccaaacatcgtcaaaccactactgcaagtatttccacttcctgccaacatacaccaacaactaaactagctgccactgttggtaatatcaacgaaaaacagtaggttccatggaggccacctgatcaatttggcttaaaaatgaatgtcgatgttgcggttaattcagagacaaagatactgggcgtggggggcaatagtacgagattatttgggacaagtaatagctgccttctcaaagcctatacaaggttattttagaagtgatgagatggaagctaaagttcttttccacaacatcaattaggcacatcaacttcaactcccaattagtcatattgaaactgatgttcttagagtctcattggctctttcaaccacatttgttgatttatctaatttttctaatttaatttaagatgttcaatgtcttttatttttcttccctagagttattgtttctcatgttcgtatgcatgctaatcaagctgcccataaacaacttaaatatgttctagagttgaatgaaaatgtgtgttggatgggtgaaattccccatcctatttttagtgttgttgtaaattacatctaattttaataatagtgatcctttctaaaaaaaataattataaataatttataaaaaaatattaaagttgatttttttaaaattaatttaaatttattttagggtgcaaaaaaactcaccaatgttatcgtaatcagaaaagaaaatagaagacgagtgttaaatttggttctttcctcaaattatattctttctcttctgcacaacgacggtttccatagctagaccagacaacttcaatttccctagggttcttgtacggttactccattgcaacaacttggtaattgttgttcatgcccacttatcaaaattattatcttcttttgtatgtctgaaaatcaatttttctcttattaactgaggaaacgtagggaaaaaactttcgtggaaattttgttttctggactgacatcaatggctttgagttcaaaatttgaatttccctattttttcttttttcgtagttaaactgaagattgattcgtgggttatgtttgcactacacgattatactactttattatttctggtaatattattgcaatagatacgggttgaagaaccatcttttttgttcatataatgcgatttttggttttcttgataggatatttatttttgttcatacgggttgacttgacatgtcttattgtgttcagtgcagttaattttgggtcaagtttctgtaaataatattaactgagagactatgcatctgataatcttatgtgctaaattatcactgaactttttattttgccaaaggaattcatattgtgccaatagtgtcatcattaacttgtcttagtgcttcattgttaaactaaaaaatgaaacttttgctttctttgaatggattgtggatgttgtttttcattgtatgttaattgagggtttttcaattggtgcatagctgcttactctatttaaattaacagttttcaagcaagataataatatgtccggaagaaatcgcggaccacctcttccaatgaaaggagtttctcattctggattaccgtctacagttcatgaacccgcttttggaagaggacttggtccagtgccccatcctgccttatttgaggagatgcgagaatcccagtttgggatggttcccagacccctccctcctcaccctgcaattattgaggaacgtcttgcagctcaacatcaagacattcaaggtcttctagttgataatcagaggctagcggcaactcatgttgctctgaagcaggaattagaagctgcccaacatgagctgcagcgcatgggtcatattgctgattcactgcaaatcgagaaagatgtccaaatgcaagagatgattgataagtctttacgtttggaagtggaccttcgtggagtgaaggaaatgcaggctgagcttcatcaagttcgttctgatattaaggatttcactgctggaaggcaggagcttacaggcaatgtacaagcaatgactcaagatttggctaggatgactatggatctgcagcaggctccatctttgaaggcagaaattgaagccatgaaacaagagctgcagcgtgctaggtaatctttctagggtttttactattatatgaaaattacttgttagttttatgttgcagttattttgttaattttctcatctcttgctttttttttcttttggcatgtagagctgccattgagtatgagaagaaaggatatgctgagaattatgagcatggtcaggtgatggagaaaaagttgatctcaatggctagggagttggagaaacttcgtgctagtgctgagaagagagcacgtgctgctgttgttaatccaggtatacagtctcatatatgtgtctatgctttatgtttttcagatggtttagctttgaatggaagtaaattgagaacatgaatgccttaaataaatgtcatcttcattacaaggccatgtagatgatggagattgtagtgcaagtgttagacaggagtcagcagaagttgtttgtttgactggtttagttcttttgtttaactacgtaatgttagttgtttatatccattatgattaggggctgaattcttaataattttttattctagctgagtggtttgatcgttaatgaaaatttgtggtttgtgtattacacaaatgctttgatgaacttgttttttctttttgggtgttaattccctatgcacatgttgatgacagacattagcattttctcgttcattgtagccttatctattgtttatttacaaaccagtgacttggcaatatatgtgatgattctgtaggttatcctgcaaattatggcaatcctgaagcaatgggatatgcaggaaatcattatcccgtcaactatggcatgaatcccgtaagttctatttcgcacattctcaatggtcctgggtcgattaggatgtgcaggtgttcatgtttagtgccaaaactttacgtgttaaatataatttttttcttttttgaatttccaggggcaaaatggtgctgaaaattttccaccatatggagctggacctgcttcatggggtcaatatgatatgcaacgagctcaagggcacatgaactagctttcctcactacgcgctgcaccgggtatcttgggctgccacatattagatatttcgatttgttttatagacattggtggacctatgattttgtttagttattaagctgtattttaagatatctcaatcatattagctacatggtgcattatttatattctcttggtgtcttccactccaattatttgcaccgacttctccatttctaatctactttcctaatacatgttttccttgcttgttttggtgaagtttacctttgtcatatgaaataaaactgtttttgtttctaattaattttttttttgtggggaagatgttccattaataaaattgcctctgctgagtttcatgcattttaatatcaagggaaaatgtttggttttttttatgtatactttctagttagatatggttcaagtcacataacatgagatttggttagttgtttatgtatactaatctggctttcgaattttcctttttatatttgatttaatgtcgtagtcatattttggcctttgcatttgcctatctatttcatgccacctgatcattctcatttttgtcaacagtagatcatggtttagtaataattttttaattttgagatgaaatattgtgttgctattaatcttttttagttgagtatgaccatgtagtaatataatgtttgtcagcccagtgtttagctcactggtgtagtgcttgaaagaatttgtcaaatttgtatcctttatttatgaaagtgatttcagagtatatatggtatcagttaaactatgagatttttttattcgtctcttcctatgaaacttagcgtttagctaggtgtctgcgtacactataataagagcagtttatgactctgcttcgctcttagcttgcacacttggagactatttatgttctgaaataatgatgttctttagaactttcatagcttactgtgaagtttggctctcaaatgttgctcgatctatatatgatcaatcgagagactagactgcattataaggcagcgcattagtcaaatgctactcctagtaggctttggaaaccaaatgctttatcatctgccaaaagatgcagtaaagttcatattttattgttaattgcacaaagctggggggggaccaaaaaaaaaaaaaaaagaattcatgctggataaattgttgtaaacttggtttgtagtttagattcatacatttacatctaaatctatgttcatcttaaattcttaattagtttttttattagttgtcatgattagttttttggaattgcatagtaacaactaatttgccattcacaagttttttgattttcttatattcctgtaaaggtgagaatttagagtttgcactgccatgtcaaggaagactgaaggttttagtgggtttaggatgaggtttctggaagatgatgctgtggctgtttttttttttttttttt

SEQ ID NO: 111722 - DNA, 2644 bp, Cannabis sativa
tagaaataaataagaataaatattattggcttgaaaaagaaagaagaaaaatgggaaaaagcattacgtgtctaatcaaataagatacaaccacgtggcgaattaaacttttatatcggcgcaattagatggcgaagttgggttttaattggatacggcccagaacgtgaatctctatcgttcttctctcagatttgtctccgagaacaacgagcaaactcgaaccccttttctgggtacgacttgagtctcaccctttttctccgcttcaacagaaatgactcaatcaagtctcctttccctccttctaatactagggattttattgtctacatccgaggctctccaattcgagctccaatcgggtcataccaaatgcatcgccgaagatataaagagcaattccatgaccgtcggcaagtacagcgttgtaaaccctagcgagggccatcctttaccagatacacacaagatcaccgttcgggtctgtcctttttttctttttttttttattcggacccttgatttcatttcgattttgagaactgggtcgtccttggttttgcatgattgtatttaattttgtattgcatttgtataggttacttcgcaatatgggaatagctatcatcatgcggagcacgttacgacagggcagttcgcgtttgttgcggcggaggctggagattacatggcgtgcttttttgcccccgatcacaaccctcaaattaccttcagcgttgactttgattggaagactggcgttgctgctaaagattggtccaatgtggctaagaaaggctctgttgatgtaaggttttttctcatttttattttatcttttggaatgagtaaatttgattgatgcatttaataatttaacttttatgatttttatttttgtactctgccctaattgaaaatggctattcacgatttgtgtatttttgtttattcttttggtggtgggaatttacggagctgaagttatataaatttgtttaggggcttacattttatcaaatttacttgctggcacttgggtttatgaattttagaataaaagaaagattggcacttgggttcttttccaaatattgggttactgagattcgaaattttgatacctctgggttaagtatgtacttagcttattaatttgttcaagttatcccattactacttcaattaatgattatttgtttgttattaatgttatccaccattcaatatggagataaccagtagtggtaatgttgtccaacttttaactttagtagttggcacttgatagtcttgattggtgaagttgctgcaaaagtcttatctgttttgcttgagctaagaacagtgttatatcggaaagcaattgatgtaatcctatctcttcttgcacttgtttgcttatttattttgggtaaatctcttcttgaactttactgacaaggaaagactgctaaaaactacaatggcctttttgcttgtgcaaaattatgtatttgttcttccattatgatgcttgtgtttatcgttttattatagctctgaaggcaaaatttcaggagagcttgtgtagtacaagatgtcttgtagctaacttctttcttttttctttcacacgatttgctcttataaaattgttgttgaagcgtggatttttggtatgaatatatattgcctattctttagtttcttctcaaggaactcatgcctttctatgcttttgtatgccaggtaatggaattagagctcaagaaattgtatgataccgtcacttccattcacgaggaaatgttttatctccgtgaaaggtaagagattgtgttcttgttaggtttttagcttttcgttttatttcttttgtttattcgggagtaagcaacatgtataattcgttacatttcatcttcaattgtggttatttttgtttcagggaagaagaaatgcaagagctcaacaatacaacaaactcaaggatggcttggttgggttttctctcgctttttgtttgcttgtcggtggcaggtttgcaattgtggcacttgaagacctttttcgagaaaaagaagcttatctaatgttatcttttttttccttgtaaattatttcagaagcatttaactcctgaaatagatcaattttcagatgaccttattaagctgggaatttcaattacactgccgaaaggttatgttggttatatgactttataccattcgagtacgaaagtttgattaggctctactagctatgattttaattggattctttgcaatatttaaaactagtcaacaaccgcagttagcagtgcatattaaaaaaaggggttttttctattttaggttaaaattatttaaaataaatatttataccatcctaaggaaaaataaatatttatatttttactaattacaaaaataatatttataaagtttttttattacaaaaatacaatggagagataaatatcaagtgttaaaggagaaagtgagatcacatgtgaataggataggagagtgagactcacacgcgagtggggagagtaaaattttctactgacgcgtcacagtgtggcagtgactttgcggttgccacatgacagtttggacgaagtgagtttgggcgttgttgatcgaggttttcg

SEQ ID NO: 111723 - DNA, 4403 bp, Cannabis sativa
ttttttgctatagtcaaacttatagatattatgttatatttggtatagaaggcaaaggcaaagtaaaacgactgatgaattagttgtcgttagaatatgatctctctctcctcttcctctgcctgctccaaaactcatatatcgcccgaagatccctttctctttcgattgtctattgtttagggtttctctttcatcgatcgttctccatcgtttcaggattctagggtttcaaacctaagttccaaacattaatattttcattcagagagaaagagatggttttgtcgcagaagctccacgaagccttcaaaggaaccgtggagagaatcacaggccctcgaacagtctccgctttcaaagagaagggtgttctcagtgtcagtgagtttatcactgccggtgataaccttgtttccaaatgtcctacctggtcatggtaattgtttcttctccaagtttccccattcgtaaattttgttgcatctcgtgttactatttagggttaaggatgatccaattaagccttatttacaaccgtttgtttttagattaaattttaagcctcatttagggcattcgaatttattttggggttgactttgaaagctcgattataaacttgtaaagcttggtctattgtgggttacatcattggggtgttactaaaggtgttcaatttaaatatgatgtttactgttaaattaggtcttttttctctctcaaaaatgtaattttagaatgttccgtttctgattaattccattagttttgtatcgttgctctaatagcttccgcaagcctggaaatattttccagagctattggtatttgctagaagcacctgcgaccatctagtccttatattttttaccgtatacatccaacgaaaatagtagacatagtttgttacactttcatttgctactgaagggtctttgaaatttatttgcttgtttaggttattattcatctttggtttcaagtgggtttaaggcactatgatcttatcttcttcatgggttttcatcttgttagggaatcgggtgagccaagcaagaggaagccatatttaccaactgaaaagcaataccttataactagaaatggtatggttgcataatcaatattatgatagaatattaatattacgtaggcttactctagtttaacaaattgtagaaagaaaatcacactttcatttatttataatgattattgcactgtgtacaatctaatcctggtttctcttgaaaccaagtaaacgctactgaatggtttttcatctcttgctcagtcccttgtttgcgaagagcagcatctgttgaagaagagtatgaagctgcaggaggggaagtacttcttgatgatgaagataatgatggctggttggcaacccatgggaagccaaagggtaggttatagtaaaaaaatattaatttctcgtttaataatagatgtttactcatactgtctcatactttttagagggtaaaagtgaggaggatgaaaacttgccctccatggaaaatttagagatcagcaagaacaaagctgtaaagttgactccctcatattttggcggggatgacgatgaagatattcctgacatggctgattatgaagatcatgataacgttattgaaagtgatcctgtaagtgtctaatttctttttttcagtacgtatacactatgctttcatgtggcccatatgtatgaatataatgtctgctttgtacattttagtttttatcgattgagctaaattactgcatttgttgttacactttaatataattcatttttatttatttacaggcaaccttgcagcctacatatcttgttgctcatgaacctgatgacgataatattttacgcacccgaacctatgatgtcagcatcacgtgagaatatctttattattattgttaattttttttatcaaggagtcagtttcttatcttgttagaagcctatactatctgaagacagtcaaatgttgatgtaatagttttgtctttactatcttgtagttgcattttgttagggagtactagaaatagtatcttatttttgaaggttaggaattgtagtatagaaaattagcactaatatcttcttgggttctgtttcatctgtgtaggtatgataaatattatcaaactcctcgagtgtggcttactggttatgatgaggtttgttttgtacttgtcttcagttgtaatttgcaaaaagtatatcacatgttttttcgttactacgttatagattttattactgtcattgcttgtccgactagattcttattgctgtcattgcttgtcagattagattcttattgctttcattgcttgtcagactagatcttaacttgtgagatgtagtcaataaaatttacagctttcaactccaaggggtggtttagtggtaaggagaagtgttggaaagtgctagtagtgcatttgttccaaggttctaatccccacaagctcaaaatccttggggccgctaggaggactccctatcgaattgctaggaccaaaacttaagaaacaaataaataaagtttagaaattccaaatctctttctgtttctatgaatctttcatgtccgttatgcttggttagtttacattatgagccaataacttgatgttattttggcctatgaatgtcctaatttttttattatttctcaatgaaaatgcttgtgcaactgatcatgcccatcccttgctctcttagtcaaggatgcttttacaaccagagcttgtacttgaagatgtcagtcaagatcatgcccataaaactgtgagtgctctacatgagcttacatttaacattttacttgaacttcctctggggagtgcgctgttttgtggagctataaagaaaatggatttaacttatgcctttgattgtattaatggtcattcataacaaatgcaggtcaccattgaggaccatcctcatttgcctgggaagcatgcctctgttcatccttgtcgacatggagcagtgatgaaaaaaatcattgatgtgctcatgtcacgtggtgttgaacctgaagttgacaagtaatttttcccttaatacatctgttcaacttttaacaaaataataataaataaacttgtacagacatcaaatttgttagagttgagtgatataccttgttagattgattttgatcacatgttaatgaaattcattattgcagactagcttttttctcattgaatgatgaacgtcttataacaaagtaactaaaataactgaaaagtaaaaattctgcatgtccacaccttgtggtgggaaactagatatattaagactagaattgacaaattgattgtagtttatgcatttgtatataattacatgtggtagaataatttcagttcacattattattcaaccgtaaaattttgaaaactaacaattattattttctattggtgataggtaccttttcttattcttgaaatttgttgcatctgtgattccaactattgagtatgactacaccatggactttgatcttggcagctccagcaactgagccaaagaaatttcgagtaagacgggatctatgtttgcttaatgttattggcataattgaagtgattatctctgattttgtcctttgcttctgaaagggactcaatttgtggtctgatgctttgccgaagccaaacccaagtacatacaaactgtgcatattttcacttgtcctgctccaaaagtgtacatggtactccccgtcaactgatggaaacggggtttaatcacttgtaccccatgctataaattagtgcgtggataatatcatttgtagatcggtcaaacatgtcaaagctcaattttcatgtgataggttttagaataatctgatctgccttgtcaattatcattagctattatttgtttagctgttttaagtaaagggtacatattacgtgtcgttaactttcgccaaaaatattacttggatctaatactcttctaagttatttggaacatgactagtcgtgttatttagctattttggccagtgcgaccttgttgatgtagtgctatttagtgactttggccattgcgttcatgtctatattttatgtctatgtatatgaaactagttaatatagttatagcggttaatttatttttttaatattataataaatagttacttaaaaatataattctatatagtaaaattataaatatattatcttattttatattattttaaataatttactgaaaactaaatgtacaattttttaattattatttagaattattatattaagaaacttaaaatttattatatgtagtattttaaattgttttgttaaaagaaattatttttataaaaataaataaataagatggtata

SEQ ID NO: 111724 - DNA, 5364 bp, Cannabis sativa
ttttcaaaatgtataaatttttaaaataattttttttacatattttttgtaattattttatttttgttgtacatttatgaaaaaattattaattttccaaacatgaaataatgaaacataagggtattaacggtataaacttcataaataaataaatgaatgtacgtaacgtcttttgttggtgatgctaagcttttccacgtgagcataacttggtacataatcttttactccttttggcttttgctttggagaaagttcctagttcacatttcatttctctaatgactcgtatcttcaaaagatggtaacaaatatacaatacaagcacatttcaatattgagaaaattcatataagtctagataaatattatttgatgtctacaacattcttactaaactacatcctgattaccattattattattattgaactctttaaaaatatatatatcgttaaagcatcatgtgatgtggtatatagttgactatagatatatatatacatatatatatatatatatacagaatcaagatcctaaatttcatgtgacataaacttgtatacatggctagctatattgacattttaatcgagagatgtaagataatactaataaaagccaagccaagctaatccaatcccagttcaagccaataataagggacactttagtaaatttctacgtctggaggaaacacgaaaattttgtacatatatactttgttgtatagggataacttacaaaaaaaaataaaattaaaaaaaatgttattttatagaataaaattaaaatctggagaatcagcgccaaaacacaattcccatgcttcttcttctacttattcatatatatgaagtgaagccaagccaagccaacccatgtgtcccttgataactcccctctgtttttgtgtgataagtatagtagttgtaaggtgacttttacatgaaaacaaaagcaattaaccaaaccaaaacactattgattaataattactttgtatatatcataatctccttaaacatttatatatatgtatgtatatgcttttgggtttctctttttgagtgttttgttataagaaaacaaaaaagcaagtgttaatggcggtaggaggatattacaataaggggaatggaagtagtggtaacagtaacagaggtgggagaccatatgggttgatgttacttgtagcatttggagcagccttgtttggtgtcatgattctccataagctcagggaaagacgcatctttaatctactcgtccatgacaaagaccgtgacatcttctcccttcaactccttttgcaggtctctctctctatatatatattgaccaaaaaaagacatgtttgaatggggaggtttttttttttttttagttttcttttgtttcgtcactttatttatgaacaattttcttttttattattaatgtagagggaaagagactacacaaaagaagcgaagatgaagaatgaggagttgaaagctaagatattctctctgagaatgcaaaagatggaaattgagaggagagttgtggagatgcagtcaacaattgagtcccttaaagatgaagggaagaccatggaaggtgccattgaggagaagcaaaacgaaatcaaaatgctgaggctacaacaacaacactctactactactgttaataatgatgagaaagataattcccaagtgatggccttgactcaaacattgaaacagaaggaagctcaaattgaggatttcaaacgtcttcttcagtacccagagaaaaaggatttgtcaattagtactactactgatgacccttctaagggatcagtaaatttgacactggcagaggatcaaaaggtgaaaactgtggtacatggtgaaggtgaaagcttaaataaaaccgttatgggagaggtcagtgatgatagaaggaaaatgatgagcaatgagaaagaaaagtttgaacatttacaagatcgaatgaacaaaagagatggggttatagcaaattcaagtgatgtaacatctcacaataatgggaagcgtacagatagtaatgacgaaaataagatcagaggaaatgggcaaacgagtaaacatgaaagccggaaaaatctagccactattaaaggtggaatgaaattggaaatccaagatggctctagtaacaatgttgagtccatagataggggaacacttggctctgttggtagtaatagtaaggggaaaagatggaggctgatggctaagaacagcagatcagaaaaaaatgggaaacaaaatagagtaaagattattaaaagttcaaggttggaagatgaggatgatcgtgtaatgtcaaggggtggtgttaagaaagcagcttcagtcgggataccaatgcctaacaatcaccgtttagaagccaaaattccagagcctttaagcttgaaaaatagaaccggggatgaggaacaacagccatccaagaagttccaaacttccttagccagagaaacgccattaaatacaactgctgttggggagcagagtgaaacaagaatgcaatttagggacaagaaaccagaagtcaggaaactccaagatgccaatgcagttgaacaaggcatgagcagaacagatatcggcgcagagacaacagatgatctcgaggggttggaagattacatgagtccagaagaaccagaaaactttgtcagtgatgatgagtcctctagtaaagctggtttcagtgctaaagaaaataaagaataccaggaggagattgatgagactgagttctaacagattggcagatttttctttttagcttattgtagtagtttttgttcttgaaataggtcttaaattaaacatatatgcatctgtcatgaatgatgcttttctgcttagttttgtttagaactgtttcaagagcttagttgcaaaatgaaatctagtcttggatataaagtatgccaaagtaagaattgtctttcagactctttcatgctttttcttttcaatgacaaacttaatccttattgaatatcataaaaggttaatgcacccagcgtaaaagcaactatagaacaagcaaatgaagagactctcccgataaaaacaaattgacctttttgtcttaacaaattcaacatcaactaactatcaaagttgcttttgccaataagaaaattatctcccaggacctggtccaagcaaaacattattatcaagaattcctgaacatcgaagcttaaagaacttagtttgttgcttccaccactttctgtaaaacaaacaaacagataactattgtaagtactccagattagtcgctttaacgctcaagtcataaaaaatccaaatccgaaacatactgcaattcttttcacgaatcgttataggcttatgctttgcttgattaaaaaaatatataattaaatttggacatgaaatttaaaacgaatttggatcttatgaaagccattaagccaccatatcatagaatgctcgcctaaaaacatgatggaaaaggaaggagtgtccctgagcagcaacaaagaaggataccttatttaagccttgaccaaaaaggccaccaaaaaccaatatattagacctaaaatcttcaaaagtcttataaaatgaaaattaattgcaagttgtttcacatttctctctgtgaaatattacttgaaagtgacactgcagtgacaaatgctcttggcattgctaaaggtaggaatttaaatctgctcagagcaaattcttcacaaaatagagcaagtaatacaaggccttatcttttcagccttgttgtctataaataaacagcgccatattttagttactgattggcacgataaacatgcttaagtgaggatgctagaaaaaatacgaaacccaacttaagtttgcaagaattggagaatgaacaatttgaagatagatactgcttcacatataaggaagagcaaacaatgatgcacagaccactaaatttgaataactacagtgataacgcacaatgttaccacacgccctctcatactccatagcccatgcaaaacaaaataaataatactaaaccatagaaaattgttaattacctcttccttcttgtctttacctcctgaaaacaatttgtaacctccgaagatgagcaggccccaaccagataatgagacaataacgaactgcaaaagcagaggtaaaatgaaatctgtttcctagacgtacacagtaccttctattgcaaaaacagctgcaatcatagtaataaattatagaaaacacgttgaagaattcatcatatcacgacactgctaaaccatgtaagaagaacctaacaaacccaacaactgttttaaaaatgaattagataaatttcatctgctgtgctattttctaacatccacaaaagaacactcaagacatatacgaatgcaatttcaaattctcattgaaagaaagtgcaaattcaaactgaaaaattaactgaaatgtggttaatagagcatgtactttctagaaaactaggttgatacagctaacaaggattaaccattaaactcagaaatagacatagggcatccccttcatcaaaactaaacattccattgatctacgacaatgtctgtgttagatgagatttattcagattggactatattagttttaagaaattcactgcatcaagttaagctgaagcccagtttagaattgcaaaaagataaagccaaattactacagcaacaccaaatagcttatgatggaaccgtaaataaattgcaaagcataaaattgtaaagtggtttttattttcttattatatttaagacttcgtaacataaccctccatggccatcttgatagaaaccaaataccaatgagaatagtataataatcactttttaaggcaagagaaaaaacaaatcttacatgttcttccttccatttactagggctcattgggtcttcccagacgttaacccttgcggggccatggtgatctgcaatattctccaaagggtcaacaatgtacgatcaatataagaattacaacaaattactcgtaaatttagattcaaatcggatttattactattcttcaacccccaaaacatgggattacggaactttgttttcttttcatctcaattggtttttggggattacaaacaaaagggtttcccgaatttgatacacaaaaataagatcaaaagcaaataaatggagaaaagaagaagaagaagaagaataaggattaagagatttgcttgcctgcagcaccggctagacctcgcttctgaactaggttagcggcttgaaatggggttcttggagtagagatgcgagtgagagttgcggcttgacg

SEQ ID NO: 111725 - DNA, 6797 bp, Cannabis sativa
  modified_base (26)..(30): a, c, t, g, unknown or other
  modified_base (6763)..(6771): a, c, t, g, unknown or other
ctgcaaaaataaaagataacaagcgnnnnnatgctccaaacacgattaaaactaaattaaaaatatactaaaattaatctaaaattaacattaaaaataacctaacagttgctgttgaaagcctttggccacgagacacgctttacaacgttgaagagaaccataagagttgaatttgtggcaaaaaatccacttgttgttgacaacatgcatatgaggtagtctaggaacaaggtaccaagtcttgtttttcttgagagcaaagtattcgtcatccatggcatttttccaaactggaatggttaggaaaatttctagtgaggcaagggtggagagggaaagagcgggtaagtgaggattgtggagaagtgaggcaagaaacgttcttagtttgaggatgcagacttttgaacgtgtgaccatgggatgtgagggagcagggggtacgggtacttgtgtagtttctggtgtggaatgtgaggagtgtatggatgaagatgaatgtgacagaggttgtattggcaggtgtatggctagtggaatggcagagtaggaatttgtcatggatgggctttcatgctgagttttggatggtgcacagtcagacaatggtgaagtgggaggtgttgtgggacctacaaaacaaggagatacatcatttgaaatattaggtgcatcatcaacatcatcatcctaaaaggtaggacaggaaatgaaggggagccaatgactatattggatgtgtggtggtgtgggagttgcggagtctatgggttgcccaaaaccagtagcaaagggaaactctaattcattaaatgagacactatgggcaatgtataagcgaccatttggatggagacatctgtaccccttatggtttggactatatccaagaaacacacacttggaggacctaaagtctagtttatggttgttgtatgcacacagatggggaaaacaagagcttccaaataccttatgaaattttaagtttgggatgactttgaataattcttctatgggggatttttgagctaaggttggtgtggataagtgatttattaagaaagtggttgtgctaaaggcatcccaccaatacctcaagggcattaaggtttgagatagtaaagtgagtcccatttcaatgatgtgttggtgttttctttcgaacttgccattctgtgcatgtgtatgtgggcaagggtgtctaaaatgtacaccaattgattccaaaaatggtgctaagtttctatattcacctccttaatccgattggagagtcttgattttagtatcgaattttctttctacaaacttttggaagttaagaaatgtgtttttaacatcaaattttagcttaaggggaaatatccaagtgaagttgctataatcatcaatgaagtgcacatggtatctatatccttccttaaacagtatgggagaaggtccccgtacgtctgtgtgtatgagttcaattggtgagtgggatttagtgtgtgaggtgttgtagtgtttatattttaacttgcctatgtgacagacattgtagaaaggtatagagtttttgaaaaagactttttcatcaaccaacatgtgctttaatacattgatattgggatggtcaagacgcatgtgccacacattggcatctgaattgaaactagactcagcaaacagggatagacacctactggacaactttgattgactcgatttaactaaagattgtggatgtttggcagtttttctgctcttggaggaaataataaaacttgagctggagttggctgggacatttgatggtgatgatgcagtaagtttcagttgatataacccattattaggcattccccgaagcacctcctccttcgtgattaggtccttcacaacacaaaaatcagcataaaattccacatatactttgttatctttggatgagatatagacaagatatatttagaaatttcaggaacacaaagtatgtcattgagcactaaataaccagcagtgttatgaattttacgtgtgccagacttggtcacggttaagggaaagccattaccaacaagtaggtgagttgtacctttcgtttcaatcttgtgttgtatgttagaggcttcataagtgatgtggtttgcggctccactgtcaatgtaccaagagttgtcaacgtgagcgtctgtggtagtgaaataggctgttggtcattgtttgagtgagtattaatggtgttttgagagacttgtgactgactagatccaggggcttggaatgagatgtcgaatcgatgatagcatcttgaagctatatgccctggtatgctacagagttgacatataggtctattattattagagcatcatctgcctcaactacggccatgagggttataggagcagccaccagaaggctgatttgggttgtgtgcgtaaattctaatgttgggagatctacgcatttgagtagcaaggtgagcagcaggcataaaggagtcaccagaggttgagttcagttgttcaagtcagatttctttactctgcagcatatattaaagttcttgcaaggtgacttgatcatgccttggggttaggttgacaaccacagcctcatactcatgaccaaggcctcccaatatcaatgtattaaagcacatgtttttcattttcaaaatataatcatgtatagtgagattgctcttttttagggactccaattgaaatcgcagttgtaagattctagccttagaacttgtagtgttgaggtgttcgagagtaatcaacagatctagagaggtaagacaacttatcacatgtgcaaacatggattcagagatggagttgaggagccagctgagtatagactggtctatacgtctccacatggcataaccgaggttgagttgtcgagattcactaggaatgggacctccgactgtgctgtccacaaactgcggtggacatggtttggttcctagtacaaaacccttaaggttgtgtgcctacaaggcaggaagggcttgggatctccaatatgggtagtttgttctgtcgagtttgatagtgagaggggctagactttggaaaggagaaggctgcataattggagctagagagctgactgggggtggactgtatcggcagtgggcgatgcatctacagggtttgatgtagaggacatttcggctgaggttggattttccatgggtaggtcagaggatttttcaactctgataccaagctaaaatagaagaaaataaggactgataatactttgtatattactgtgtaataattcttcacttcacaaattataattaatgaatgattccttttatatacacaaggaatgtactagaagctatcaccctattggttgatacaataacagaaatatattctctatggcccacacaatgatatgataaatgagtgaatcattttcccaatgattgtaacggtaagaatcaagcctagtcagcatcattattctcttgctccaattgggctgactttcggcctttcatttcaacatatcacaaatcaatcatttcatatccatacaaatattgaacttactcaacctttcttcagtctgaatcaccctttgagtagccaaccaaagcataaacttgtgtttgggaatgctcaatctgctccaaacttcagccagccattctcactttcggctattctagaatcagcaacttgtagccgttgctaatgaagtactccttcgaaatgaactccaaaatgtcaacaaccatgctagagatatatacaattataatcgaaaggtatatagcattttttaattctaatgtatcattatttactaataaatcatatttgacttggttccgtacccagagtaaagtattgcctaattacgtgtgtatctacatatataataaccattggtactcacaaaaatttattatttactacaaatatagttgcaggaagaaaagagagaattagggggggacaaatagtcgttcttaataactcattgtttgtcaaaatttttgaaaaccggttataaaataattaagtttaagaaagaaataatttaaagaagaagaaagcaaagattttatgtaattcatgccataataagtcttagtccacgagttaatattattgagatagaataacttcaaactatctttacacaaatatttttcccctagcagatgaaccctaatcttaacctttttctcataattaatttttcaaccaatctctttgcgtgaagggacactgttctatttatagggcagaaccatgtatgaaagaacccggacccagtagggtttaaaggtgtcaactaggcccactgatggagtaaaatacaatatatattgacttttggtcaattgggtgaggccaattcacgagataacgatcatccatacaagtggggattgactatgataccatggtcgtgaactgctgtgttggtaccaaaaatgttagagaatatagtgttggacaaaaaggtggttgtcttttggtggtgcatgcactccttaggcttgacataagggacaaacccttgacgtggtggcaccccatgtttggaggacgacaagtaggatgatattcagaggcttctagatgtcatttcgatttcccgtgttagattaccccataaaggcatcccgatagatcttggtggacccttcgccttttgggccaaacaacatttctcagattgtagtggtctggccttctcacatttgtaagctgaccttacatccagattcaaatttgtagcttggctccataacttggtttacttgctaactttattgggctcgggattgggcctgctttgattgattttggatattgtaaaatacgcactttatctatccagaaacaggaataacatttacccccaagactttgggactcaagagttgcggaggcttgcagcctactcccaaatttattgttagatgtcgacccgtgattctgtgtgtgcaacctctttggattccaaagcagttagtggcagaagcttaatcatttccgtgaatcttttggtccagacacactacgcaccccgaaaaaacacgtgaagcctagggatgcaatatgaagtttggttcatgtcagggatatttaagatgaatatcatcattagacgacctcaatcctatatacaacattaaatgcaacccttatgtatcctagactgttagatatcctttgcgttttttaggttttaatttgggtcgtcagattaaaagcacgtggatcatcactgtaaaatcctactagtttaggcgtgttaatatgattctaacttaattgtgctgctcattgatgatcaacgagtttattaaaaaatatgattgattaaaactttatttaattacatataaataccaaaataacatacatatatataattgggatcccgtatacaaaatatttacagaagttttgtagtgcatagtacaaaagttgtcgcttagcgactataaaaaatacaaccaactgtcccaaagaccgtatgctctaggcctaactgcccatacatgtacaatctccatccactcgctctcacggctgctcatccttagccttacccttacatacacatgcaaataatatctgtgagtcgacagactcgataacaaaagcatgatcaataacataactataacttggattataatcaggcacacaaacacccaaccataaccctatccccgtgtcccacacggtactgagtccagaacgttcaaatgatagtactattgaccataatatcaacctatactcggtacgttagtcataatctagtcgtaccaatgtgacactgtcaatagtacttaagtcagcatacatttatcgatatctaatataatactaaatatattgatatcgctattctaatgtaatctagtaggcttaacaaacatgtaaacacatatgcatatcattacactgatcttaccttgtttctgaatttaggtgtgtcggtcaacctgagtggaatagctgctcgataatttacaggcccttaaatcacattattcgtaaaactgatgagtgacacactaaatcacttttcggggacttaaacttgaaaccaaattttccttatcgatggatagcatggcaataccctaaatatcgcaaaaacatgaaaaactagaattccaaaaactgccccaaccggcaagccagttccctaaacagaaattcaattcggtgtgattcctgaggaccaactagaattctagttcctataggttccactgaaccggtcgcccaattcaatgcagaaaaaacccaaaactacctacacacctcaattcaatcccaaatctctcaataacttccagagtacctaattacaccattataaagagaattcatgcaacaaaaaccgaaaacagtctcaaaaactcaattcaccattaaagactaaagtttgagctctaaagctcaaaccttgtccaacaacataatcaagccatcaaacaacatcaatacaactcaaataaccataattccactatagaaaacgaattcaaacatcatactaaaccatagaaccctaaccttagagaaatcacgcaaaacttaaatttgagcttaagaaaacacaaaatgatgagctaagaagcttacgtaggattggaactttaacaatgaagctagaatggctctgaattgcaaaataaaaccattagcacttactccaagtgtaagtacacatcatcgctaattatcacattagtgtaaannnnnnnnnactgatgaaacagggaccaagacttt

SEQ ID NO: 111726 - DNA, 3396 bp, Cannabis sativa
ctctctctctctccctccctctctctctctctctctccctctctctgtctctctctctgtgtaatgtactcccttttgatcaaagcaataaaggatttcattcaacttcattcattgaattctgatttgtgtttttattgtttgattcagttttgatggttaaaatccaatttcatctcctcaactcctctatgttcttgctggcttcattgatcattgttcttgagtgtgttgatctataacacaacattcctaaaaaggagtgggaaggggaagcttgccacgtggaccaatcactatggggatgtttgttatggggtacgaattttctaaaatagaaatataaaaccaaacttatgtttgtagtgattttagtagaaaggttatgtgtgtgtggctctcatttttagtttattttcggagtattctcaaactctttaaacactcgagtttgagattgtcataatctcaacccctctcaaataaagtccatcaactagaaaccatacaccaaacactccctataagttcttatcctaactctcctactctcttctcatttttctacaaatagaggaaggtaatacttttgtagacaacttctttccattcaataattactcttttaaaattgtagaaagagaaaaagagcttgatttggaataagtattggagtgatttttgcatgtacacccagtggttccattctactttttgtcagagaagtaatcttttaagagaaaagaagtgaagaccaatattcatttggagagaagaacaaagaccaacaaccagtacaagaaccttccatctttggaagttatagtttctgggaaatttgaaccaaaacaaagacatatacagctgtatttatataggaaatatttcagggttaagaggttaccaataacaacaggagccaatgatagccataatgacagggggatttgatagcccaaaacaaattgcgaagcagcagcattaaagaatggctccagcgctgttgaaaaacataaaacaaatgtcttaacatttgcacacaccatcataaatattataattctgagtgaaagaaaccatcactttaaacttcatcctctcccaaacaaaatcctggaggctccaaattcgttcttcatatttgcagatatgttacttttagatcagctatagctaccaattcatcatttgaaattatgaaagtacaaattttgttgaaattatgaatcaacaaataatgatatctgccataagacatgccatctaactatctaagccacaacacagcaaccattaatgtattgaaaaaaacacttgcaagcagcctttttcgacgcatcactggaaatgaacacaaacaaatgtcaaatgttgtacctttaattgtatgcgtgaaagagacggccacggctgcaaatgatacattggacatgacatgtccaagggcgtgacagaatgcgaccggagtcaatactaacaacagctccttatcaataggctgcaaataccaagaacaaacaagccaattcaattcaaacaacatagtttctctttgatcgaaatagatcatgtcaaatgcagaaaaactgaaacttactgcacgcttaggtaatccaacagtccatgaaacgagacagtaaaccactccaactaggagatgtataactgagacaaagctacaaagtgggaatatcataagagaagttgttacgaaaagcagagaaaagagaagttattgatttgtaatttgtatattacaagaagaagagaaaaggactttcaataggagtgaaaaaggttacaagtggttatggggataactatctaattaacagaaatgagtcaatgaaaaccgaactaattaactaactaatgaactgactacatctaataaaattcaggcattaaactattaatagttgtcaatactaatgtgatgtactcaaaagttaatgtatggaataaagataagtcattttggaagagttgacttactatggatatgggaagtagttataaaccttcttgttcagtatgttgaagatgacatttaagaagtacctgaaatgaaaacacattagtgattagagacaattcagctaccaaaatggtttaatgatcagtgaatggaataagtaaggttatcttgaagtgaataaaataggaaatataatagattcttaccacatgaaaaagaaaaagccagtgatgaggaaaggaaatctctctccaaagctcttaggcctgcattggatggaatgtgaacaatttaggacattatgattaggctgccaagtttgtccagcatcagctgggggtttagtaaacggttaccaattctatattggaaaatgctaaaagataccagtaataactagtattatgctattggtcacatatttttaatttagtaatattgttaagtattcacaacactagcagctaaaagcagtactctaaacattaacaggatcgtgatgagcagcaattctcccaaatttaatgtccataattaatatttatttatttgaggggatgagagtcatacttgtcggaaacttcacgaccgtcggcaccggcagctgcggccgttacaagagggaattcagtagaacctcgacgtctcagacgttgattcaatgccaaaaatcccaaaaacttgatagacaaattatccgggggactcttattcttgcgacttatgacattgtccggcaaaggcgaaaatgccaagcctgcgacggctgaggctctagaggccactgatcgagacttaagagcaacagaggtaggtgaaatcttaatgggtgacaagtaaagcgaagaaattcgagacgtacggacgggggactgaattgggttggtcgcactcacggaagccatagtcatggactcagaaaacaaagaatggaaaaaataaaagaagaatcctaagtcttagaacaaatatataatgggaaccttaagatcaagaatgtgacaataagttttcttagttgtttcttttttacgtatgaaaggggagaaaacagaaggtttttctttcaatggtggcacaccatatatagaacgatctgagccagtttagaaaacattgtttggagaaggagagtgtaatcaaacgaatgctttttctttagtttatatatttatttatttatttatttttgagaggaaggagaatagagagccttagaatttgtgggtgtagatatgggtcatgctcatgaggtgggcaattgccattgttaaaaaacaatattctaaattgattgatgacaaaatttaactatttatccattcgtggaactaattcaaagaaagagaaaaaaaacaaactattttataagtataaattagtagaaatttaatgaaaagtgctacacatttctacac

SEQ ID NO: 111727 - DNA, 7788 bp, Cannabis sativa
  modified_base (6524)..(6525): a, c, t, g, unknown or other
ttgttgtattttcttaagtgttttggaataattatactaatgatagtttaattattttatgatgatttcaaaaaaaaaaaattgtaatagctcaaaccgcaaaaaccgtaaaaactgcaccgcaccgcatcattttttgcggtgcgatttttgcggttttttagtatcgcggtgcggatgcgatttgaaaaattagaaaaaccgcatgtgcgggttgatttgaaaaatagttaaaaaccgcaccacccgcaccgcgaacactcctaatataaatattgatcaaaatctcaaatttagaaagataaaagtgaaaagcaaagaaacaacaaagagaacatatcgaaagttgcacaaataataaattagtattattaaaatatgtcattaattaacattattgtatccaaatcatagcttcgttctacaccaaaccaaacctcgatttccttttttttttttttatgacagtctacaacgcgtacaacaaacaaacaacagctttctacgatatatataaatataacatatattatataagggaggcgaggaggagaaccattcctcagcttgttccaaactccaacatttcccacctgaatggctggaatacatacaacacttcaggagagctcttaaaaagaagggctacgcagacacagactgcagcgattgcaaccattgagagcattgcaggcctatacaccacggatctacggcttgtaccgtatgccagttttcgatcacaaagtccgcacggacgctgaatacgtctctgctcagaccttcctatctcaaaggtggtggtggccgtggtggtgttggccaactcattttgcttctggtttgcgccacagtgcttttgatcaccaggaatgtcaaccactacgtgcccacttccagaattcttgttaattttcctttggataaggcggatgtaggtgtaatggcctcgcaagcgcgcataatcttcgggtgtagagcctgtgctgtcacgagcactcttccaggcttcaattcccacctgtaataccaaccaggttaccattattagcaaactaaatgttgaaatgatatgaagaagatggtcataacttaagtacagcaaacctacaagtgaactagcatacttgagttttacaatcataggcaaaacttaagcacacaggattttggtaaatacttacattcagactaatagaattcaaaatgagaaaaatagtgaaatgtcctcaagatcatgtttggaaatatcccatcatcaatttcacttttaaaaacaaaaggaaaaatagagcatggtttctcgtgtagtgatagcatctgaagatccatatagaataatatggtgatcccataaagtgccaaaagtatattgtgtgggtgataattgaagaccagtaagtttatatatggatttatttctttttttagaataattttatacatggattaagtcgataaattttaccattccaggatcattggttaatgcatctagtacatcctctgaaccatcttttccagctgcaatgtgaagcggagttaaacctcccgggcctgcaacatcgggtctaaataagaagttggagctgggaccatgagtagctgatttttcttcagattctaactttgataaatcctttggggcatatttcaagagggcttctactaaagccttactatttcttctcacagccctgtgaagaagacctatttcagataatgcaaggtcaagggaacgatcctctccttcacctatacttccatcaattagaatgtccagtagttttcttaccacagcacaccaatcatggtccacagaaaattccataatccacttgaaacgctttaaagagaagggttctgcattaggatccaattcacccaatcgagatctcaactgacttctatgtagaagccagcccatttcgtgaataaaatccattgcttgattgtaagattctggttttccaattccgcctacaactgcatggctttcagtatattccagtacactctcaagcacacggatttctgaacaaacatcctcctccgcaactagaaaaggaaagaagctgttgccaagaccttgatcttcaatctagataattcaaggaaaaaatattattagcttaaacaagcaaaaatcattaatcagtattgaatgaagtaacaacaatataggagctaagatgttacaaagcataagaatgaaaaaaattactcccagaacagacaactttcaagtagttaagagagcatatgaaagtgtggggtggggtgttcagataaggagggtagtgggcaactaagtttcatctttctgtgtaaaatggcaaaaaacaatcctctagctaactactacaccgctcatgtcaagaaaaaattctgatgaggaattttacagataattgatgttacgaacctcttttagagttgtaaatgtcaccaagatttactacttctaaacgtaaagatttaaccaaataggaaaacaatagaaaatggtgttacaaattccttattgccttgacatgaatgaactatacatgtgagaagaatcataagaaaacaacctctataaatccccgtccatttgtaacgtcaatgggacaagaaaaactgatgcaatgctcgtcatgctccgagttatccacaccatccattaactcatgagtggcttcctgaacgagatatttcccttctagagcacagaataacctgcaaaataatataaaggggtattttagcctgtgttctagcacactaatctagtagatctaatctaaatgatgaaattaaattatgggttcgggttaacaatcttaatttgttttgttttgtttttttaatttttgaattttaggccctggcagttcaactgggagacctcccagtgatgccaaggtttttgagtctggggattcaaacgttggaacaaacaaatgcccacaaatgaccaccccttggggttagcacatattaaagaatgatcctcttcaaagaaaattaataccttgtggtaggccgcaccaagtttgtacctctgactagaaactgagctttcttagatgcaggtagggcaataggcttgatacttacaatcttgctgcagttgctacttctgagaggcaaggacgtgtcaactatgacctgacctgcatcaaaagaaatttcaaaattgttagaacttccacattagtcacactaaaagaattacagtcagctcaaacaaagtatactaaaggaccacaaaccattgcaaacaaaagctatttgatgctggacccttataaaggtccatccagtgctccaaaaagtgtcgtctgaaacatccaggagtctactcaatttggaactaatgtcataacatagctgtgaaagagaacagataactgtaaggtttctcaaattcttaaaaagaggcaaaccgcatacacatactcacgccaaggtcacactagcagttttatgcagacaaatcttacttcttcccatgctgaatcagactgacgtagataaatggttaaaatgatacaaccaggcttgatgtagctttcaatgtctgacggactgtgtgataaccagtcaagaatctgaaaagttaaaaggtaatatgatataaatctaatgaggtggggaaacaagtcttgaagatgcttggtttggcaggtcattacctgtgcacgcaggacgagaggaaagtcattaggctctttcccgaagagtttaaaaacaattctatctgtgcggctctggtaagaaaaacacaatgaaccaaatgttagaaaaacaaatcacataaaccgaaaatccccagacagcaaaaaataaaaacttaccagattggaccaactcagcccaaacaaaatcagatcacctcaaattaataaattagggagaggggagaggggaaaagaatggagcacttggctcatataacataagcatttgggacagtcacgggttataccaaatttataaaaaaaaaaatcctagatcactatgaacacttacatgggagactttcctgcatgctctttgtgaaaacagaaattaaataaattaaagtgtggaatgaatgaagcaggaaattttttcggtggagtgtcttctatgtgtgcataagacatgttttgctaaattaatatacctgagcttctccgtttgagctagagggtgactgagcagacgctgaatctgaatttgtttgaggtggacttgactggtgagagtcttgctgtacccacgaagggcaatcaagggagctagtgaccaaattcgtagggggggatgatctctctggatcctcaaccccatcatctgaatcaatatatatgtcattcaaatcaaaattgttcatcttgctatgtcctgcagtactgtctcttgcttctgagtaagatggagggctgtttataatgctgggtttttcggaagtggcttgtacacttccaccattagtgttatgcagatgaatgtcttgttgtggaatttccgaaatagatacagcatgattttgtttggtaggccttggagggccttgagaaccatttgaaagaaaagcagaaacaacttctgagttgccaactgaagtcccatcagtcagcaaattttgggggtcacgcaagaggcctgctacactttttcccccttgctcacttgtttggttagcaaggctctttaaaagatgtgataacagatcctgctccgtactttggtcaggtttattggctgcacaaagttaaagtcactcagctcaacatgaatttagaaaaccaaagaaagcagaatataaagtatcaaaggatcaagtgaattcatagtgttggagaaaaagttaaaaaagtcttctttgacaacatgattagttcatccttcgtttgatcaaacatcactcataccttagaccaattaagactgctaatctcttattcataaattttaattcacttaaaggtcatcatatgagtcttatctagaagatttgatatttgagagcaaaatcacaattcacaaggcaaaaaaaaaaaacgactgggtcaatttatatacaatgactaagcagaacaaatgagtagtgtagctgggacattaattcattggaacctactatcatgcttccacattgcaaacaagataagtgcgaggagatatcaaccacacaaacaaacaaacaaatcccacagtgaatcacatcctcgtaattggttggggtgggtggtgcgtaaagtctacattttgggggttttgataagaaagtctacttacagtgcatgttggacaatatcctcagtagacttattaacagatagccactagtttgatcatcacttagtgaatttccattagcagcagtatcaggatttgtcttccttctccgtttgttgtgaccagctaatcgtctacgacaacttctcttcccttcatcgaactcttgaagggcatgaaacctggcaaaagattgattgtttatatgatattcagaacacaaacaatcaaagtaatcaataaagaaagatgaagaagaaactcaccgactacactgttgacaaaatcgctgcataacgttccccacaagcgccttaacagccttggaatgcatttcacaaaccttgtgtcttctatggtagtccttggcattagtcagatcagctccgcaatcctccacctgacaaatcgcacgacttgaagtaccaccgacgaacttggtcttcttaccactgtttccttcccaattcaccatctccctttcagaagcctgctgatgaagatgatgaccacgtcctccgagcattagcgttagattacccgttccatcgttcaaattctcgtcttccaccgtattatcccttctccgcttctccaattccctcttccctttctcaatcaccagattcccctcgtcagagcaagaagaagaagtgttggagttgcaggaacctccggccgggaaaaactgcctacccataccctccgacggcaccgccggattgacggaactagcaataaaaaggtccccatcccatttccattgattcaaatcccactccatggtcctcttccttacagtagtcaaatccgcagagctcatcccgaagaaatgacgaggctcgcccccaaatctagcctccatggatgaaaaccacaagtaaaccaaaaagatccaaatccaacaattgaaattccactcaagaatattagaagagctaaagaacaacacagatcggagctgagagaggcctgtgcaacaaaaatcaaggactaaataggcctaatcagcttcggttcttccccaaaagtagagaaagtgtatagcaacgcaaccatgattccaattaaggtcgacacacatagaagaatctcaactcagctcagctcagctcagctagtagaacaacaacatagacacaattagacgaaacctcgtcctgttcagctctaaaacatagcaaaatacacatcaaattggcacagtaataagcacctaaatctgaattcgatagagagagagagagagaganngagagagagagagagagagcagtaccagatgatgagaaagagaaaatcgatggccgccggaagaaggtgacagtttccgatgttgatgatgatgatgatgattatgacagtgacagtggtgatgatgggaaatgtgaattgtggtggtgcgtgtcgtgggtgtggttgtgtgtgtggttgagtttgggatgtatgtatgggtatgtaatgtaatgtaactatgtactatatgatatctaacatccattcactccaatcatcctcctcccctctacttactcaccctgtaatctattatgtatattctacagtaaataaaattacaatataatttattcattcaatacaataaaaataaataattacaatataacgaagccgtcgtcagctcatacaaacagcgcagctcaaactctaactcactctcggctccaccccacccaactcaaaattaaattaaattaaattggtaaagtaatataagagtaattctctattataggactgtttttttgttacgctctgattcagtcttgaaaaaagaaataaaattcaaatatttttttgttacactagtttttgccaattattcaaatatgtatttgtaagtaattatataattatattttattttaaaatataaactgttgttaaaaatagcacattttacaattttatatattttatattaattaattacaaaatatgtaaaaaaaaaaaaattattactattttttcatacattttttatacggttaaaaaaatagcattttttttataaaatatatatggtaataattatttaccacaataccttgcctctattagattctacaattttagccatagtaatataatcatatattttagttgttctttttttttttttttttttttttgaaatattaacttcattgaataaattagcattctgaatacaaaaaatataagagttcaccagaaatagaaatatcagagatgctacaatcagattgataccgagaatgtctagcaacataatgtgctacttggtttgctgatcgtctaatgaaaaataaattaacattcgggagggtaaataacaaaagttagtagtctttgattaaaaggccgaaagtggacttcattgcttggttgcttcgaatagcttgtactaaaacaagattgtccatctcaatttgaacatgttgtcaattattggtctttacccaacttagagcttctttaatccccatggcttcaatgacttcagctgcatatctt

SEQ ID NO: 111728 - DNA, 5875 bp, Cannabis sativa
  modified_base (3599)..(3606): a, c, t, g, unknown or other
  modified_base (5850)..(5850): a, c, t, g, unknown or other
aaaagaaatgaaaaatcaaaggaaaaaattaaaaaaaaaaaagaagtgattgatggtttattgaagagggatgggggagatgcacgtgtcatatgtatgggggaatgtgcatgtggtatatatgtaataaaataaagagaaaagataaaaatgttgaggtaaccgtgtgtaagtatttatgtaataaaaatttcattttgtatttttggtgtaaaactttcaaaattttatactttgtctaaaatgttaccactaaaataattttttttagtgagttgtgggagggagaatcgtgagagtgagagccactatttcaaacataaggttattaaggtatatagctggtataatgtgagggctgtttggtcttagaatgaaaaattagcatattttaataaaattggaatgggaaatattttttatttatgtccacgtcaaggtcaagcgtataaattcaaattatagaaatttatattcataagatgctttatttactaatgtcaaattatagaaaatttatttttatttaataaataaatagaaaatttctaataaattataaattacattggtattatattagtcacttaagctaagctggtttggtacattgtattaggttatattgtattatattgtattgaattatatattatatttttatataaatgttaaactttaatttatatatactaaaatattatatatttaggtacccataaaaatcaatatcacatatagttttacataagaatattgcatgaaatataattcaatatataatactatacaatagcgtaatacgacataccaaacgaaccttattgtattatcttaaattgagttatatattatattattaatttattatgttgttatattattatataatatcatgttaaatttttatttatattaaagaattatatacttatatgtttataattgtcaatactaacagataatttctcaaaggaagctttaatatcaaatagcaatggtacaaattatgtgactcaacaaattaaaaaaaaaaaaaaatgtacattatgattgtcctacgaggaaggccattccacatgtgataatgagcttcatatgctatgattacagaagcaaaaggcagtcatatatgtatacatatttattttttatttatatatatatagtagataagagaaacactctaaatgactatatgaacattctatataattattgtttttaagccaacagcaggcgtgatgaatagcaccgtagaatgaaagtttcatgaggaaaatgtatctgcgtttggtggttgttatcattatatatctcatattcttttccccacatatatatacactttatattcttctattctcttctaccactacatatctctgcctcagactttgtcaccgctttgctcaatcatctgttccctactatactatatatatatatatatatatatatagtaaccatcatgatatcacctttcactattcccacaactcaatttcttataatcactatatatgtaattactacaaaacattttaatacatttttcagcatgcatgtcatctcttgtcacacacagatatatttctcaaatttacaattttttttttaatttacttgcaatttgtgaatttcaccgtgagaaagacttgttttgaccctaccacacactactttttacttttcagtttccaatattccatatatatatttagctaaaatgtcttaatcaacgaagggcatcttcatcatcatctgtttataataattaagcatctctatatagatatatagtcaactgagaaagtagagtctcatcaaattctatcaagtatccatccctataatattctgaaaactatatactagaactaatataataaattaacggttttattaaatataaaagaacacttcataatgaacatggacgtgtatggatgcatgtctatgtattgttgtattgtaataagagagaaaaagagatcatatatatcacataaatatatatgcaaacagagattattaattaattagttgattattatgagataaatttatagaaataaactttctaagaacccaaaacatggaaaattaaaatacatgtacagacacatctaagagaccaacaatttcctttcttactttcttttgtctatatactactaattcagtaatactaattaagtcataataaactatattaatataaataagaaaaaaaaaaacatagaaaagtacacacccatttataatttttatatatatctcagaaatattattataaataaataaaagaagtagtgtcgattacattaagaacaaacaacaacaactgcgagtacctcttagtgatcaaccacatctacagtagcagcacaagacaaacacgtttggaagattccaaaaagagcagtataagaaagttccttaactttcccgagaaacaaacacttctttttattactactgctctgtgactttttattaatattattatttccctgctgttgcttctcttccctcttcttctggttcttattcttcttatccccatgattatcacgatcagagtggtcttcatcatcagccattttcttaactcgaccaaaacatttctgggttttctcggggacagtctctttcctggaaaatgtataactccgaaggtacatttgcctgcatgaaatgctgtcaaccactctagggtggccataacgcacgtgacttcccggtctgcagccacgcaatgagctgacagacctcacaaattccgcgtctgactccggccacttgtaaaggtttacgtaagtggctcggagccggactgggacgcacggatcacgtgcgtcgttcacacagttcgctatgcaaactgaggtcatgatctggtctttctatctctctgccttgttttgtttcttctttctcttgctatctctagggttttatcgctctttatgttctctggcttgctttaaatgggttttggtgttgtaaaagtttatataaatgaaaagtatatgtgtaataaaataattgagaaaacagaaggcttagattgcaagaaaagataaatagctacagagaaaatggggttgtttggtcactagtaatatagtagtggagatttatgaatgttataataatagagaatgattatttggtatattaataattagcaatgactgtgtgtttccattttgtgcgctgttaggcatgaattaataatggcctaaagtaatatcattttctttttcaaatatatatatatatatatgttacaaataaacaatcaaactagaaaattaactggaaaagaaaaatagtagataactaaagtaaagaacacaagatttttatacaggttcgggaaaatcaagtgcctacaatttctgttactcgtctgagttatcttttccattaaaatgatgaagtacaagtttgagttgttaagtgcaccttagagaacaattacagatgaatacccttgaagagttttaaagaattataaaaatgatactaatatactaggaaagaaatacaaacctatactataaaatttaaatgtataaaaatattaaatnnnnnnnnaattaaaatattatatattatttattatttaatatactaattattatacaaaatataactttaaaaaattatataaaggatattaaaaaaatacaaacatatattataaaacaaaaaattttaacaaacaaaaactatatacaaacacttaaactaatgtaaatgtgtatttatttaactgtttaatttaatttttatatataatttatacttaatttaattatattaataataaaataatatatatatatgaaaaagaataaaaatagacttttagtaaaaataaaaaaaaatattaaaacacaaaattttatagctgaaaaaaaaaatataggaaacccctacggagtcggttatttcataatcactgacgccgtagggtcccttttagcatcacctgaaacagcgtcagtagcgaattttgccaaaactgacgctgaatggccttaaaaatcgcctcgaaagcctaattttgtagtagtgttaactcaaagaacaatgatcttggtgcagttttccaattctcttcactttgtttttctctctttctatgtctctctccaactcgatttcactctctctcaattcaatatgaattatgttacaatacaagaatgactaaaatcatttaaataggaaaattaaaactaactaactggtgcactaactaagacaaaacctcatggaagtgatccaactatcttcaagtagagcaaatattcagtagttccaaataatgttagaacttgctcactaaaagaactttagctcttgtctctgtaggattctcttcactaggtgccttcttaagttctatctttccatgcatcttgattattatctctaatccaaaacagcctgtcgtcaatgtattttgatctcacatgatagactaaatttttgcaatgatgtatagaagactggttgtctaaatatataataactttttcattatcatttctagctgaattaggattcccttgatccaaacaacttctttgaaagcttctgtagttgccataaactttgcttctattattgataatgctaccactggttgcagctgagatttctaactaaagcaccagctatttagttgaaaacaacaactggttatggacttccttgtgtctctgtttgatccataatttacatccactatacttccaattctaccttgttcccactctttatgaaccttaaaccaatctgagttgtagctttgagatacctcaacaaccacttaagtcctttctaatgttcttctctaaggttcgaaataaatcttcttagtatactcacagtatgatcaatgtctgctggtctagtctagtgcttattatagtgtacataacactacctatagcctctgcatatggcatatcttccatgtccttcttccctaatcactcttgggagattggtctgaagtaagaatgaagtgacctgctagaggtacatttacttcgtttgaatctatcatgttaaatttctacagaaccttttcaacataggtgctttgggtcaacattagtttctttcttttctatctttgacaatgtcaatgcccaagatctttctagctggtcctagatctttcatctccaattctcccttgagaacattctttaattttgtgatctggcttatgtccttgcccattatgagcatgtcattcacatagatgagcagatatgttgtatttttagtgtcaaaattagtgaaatacaaataagtatcatgcctagacattgtgtagccaatctttgtcataattgagttgaatttcttgtaccattgtcttggacactgcttgagtccatataaagatttcttcaataggcaaactaggtctccttctattgattccaccttgaatccttcaggttgagacatgtaaattgtctcttcaaatagactattaaagaatgtttttttcacatccatttgctcaatttcccaatcaaactgagctgccaaagctaacatcattctgattgtcttcatcttgaccattggtgtaatttttttagtataatcaactcctttctcttgtgtaaatactttcgatacaagcctttccttgtagaacttaggatcaacttgtaaaactccatccctaactcttaaaatcttcttgcatctaataaatttctttccttttggtttcaaaatcattatccatgtattttttttctccagtaacaccacctcttcatacatagactgttgggttttgtgccntaaataaaaccaatttcaatataat

SEQ ID NO: 111729 - DNA, 3045 bp, Cannabis sativa
tggaggcttaatgtgaaaactttataaattctaaattgattcaattatatggaagacatcttttcattttttgaatataaggcaacatgtggcactatgtcgttggttcgcaaagcacctattcgttgatgaggcgtgtgcaacgaagtaagtaaactagcggttatttacttcagtgcgagtctcgagaaaaatatcataatttgttttacctcggtcccaaacaaggcattaaatgcttgattgatgggatacagagccgttggattatttttgttcttctggagaattaatctgatcctttgatctgatctttacacgaattgtaccttctaagtagaaatactttgtaatgccagtgtttaccacttttacccaacttttcaaatttccttagagttttcagagaagataccgagcatggatcaaataaatctaaagtgtgatattgactattaaatctattttctacttcaaatcagggcttgagagtatacagaagctccacccccagtgattacgacttcttcaccagagaaatcggtaaccctagatatcaattcagatatcgattctctcatggaccataccaataccattatagaaaggctcgaccgtcttgaacatcttgaacgtccttcaattgaagaactttctctaaggccatcattcggcgttaatgtgtgcttttccataccatatttttattcaaatctagcattatcacttgatttatcacgaggtaattttttttcttatttttcaatttcttgaatcttgttgcatgttcgtgattagtgttcaatttaggtattgtatctgatttacttgctacttaaaaaatagtaattaaagcctgtgattaaagatgattgtaggccgaaataggatgttctgggtactatcttggttagatttagcatctaataaaaactagaattattttttttgtttttattgttatgggaaaatccccaaattattgcacatatgatggaaaaaatttcccttctttgttcggaaccctgatggttccagatgattttgaatcttcctttcccctcatttgtgttgttcctaatttggttatttggaacgtttgttctttaataattttattccagatactagattcggtggggacctctccaagcagttatgggggaggatttctcaatgcccttactatcttagttagtttcggtaattaactactttttgttgtttttctttttccaaaatccatcatgtatgaaggagatcaccatggggaagctgaagtggaggaggaagacttggttgtggaggaagttgttgctccaagactgtattgaattcttctccttgggagatggatcaatactagaacaagttccagaattacaataatctccaaaagtatgagatgaaacgagagcttcagagtgttctaggtctgttctagaatatgctctttgttctcagagaaaggcctagccaatgcgctgaagggggctttggaatctggagttagggccatgtggagatgggagcgcatcttccaccaagatgctactttgtgaagttctgtgctgttgccgaagtggctccattccaattcgttccacaagtatgtcatctacttgttggatggtttgttttgtgcaagctaaataaggtggttgtccctactccagaggagattttgtatttctacaaaataaaagaccaaaatatgagaaaccacaaggagaaagtgggtttctacaggctgtagaagtaatccaaaagccttatttccctagttagttccgtgaagtacacttatgacatcatgggctattggttctacacctctggcttcccaataaaaatggtgctaactatcagtgtcgactttagtatcgcgagtaagtatattcatttactcaacttttcttttatttcttttcattttgggaacttatccaattctgtcctcgtattctttctagattccattcctcatcatctttaactctagaactagaggtgaggcaaagtttctaccaatctttaccagtaaaggagatacaagtgggggagctcgtgactaccaagactctcagagaggctgacctattgactccccatcagagtattgaatctttgacagtgaaagacccattcaaggatctccattatggggatccagccaaagttaaagaggctattgcagtagttaccgctgaagtaactttaaggatgtcaaggctgacctggcatggttggtagattggagccaaaagttcctaaaggttttgagcgaaggagaggaacttgaaatccaatttagagacattgtcctgtacgaaggtactcttaaagcaattacattcaaacgttgtaagatgcccttccatctagttaatgctccattcttggcctacttaaatcatttcatccaaggcagatttgaccttgactttctgcgtatagatggtcataaatatccaatgattagatatatagatatcattaagatagactcctttcatgaaataatatatccaagattcttccactatggaagatttttagatagggaagacatcttctagttttctagagggaaccccccaatatgctagaataaacgggttggactgtatttttgtgtcatttcatctttcattgtttaatgcttctttgggattaacatttatatgctttattttgtagagagcccactcacattcgagatggatttggtagataaattcttgggcaccattgccaagaggtcagatgaaattagagagactgtcaggagtggtcgaggtaaaaggaaggttgtgcagccttttaatgttggagctggaagccgacacctccaaccaaaggccatgagggtattcctaaggctccaaccttataagctgctatttgtaaaggtgtgcaaaaagtcattcaatctaattacaaccaactgatccaatcccaaccgatccaatagaattggatatctaatcataattcgatcggatcggatataaatttggaaaatctaatcagatcggatcggtt

SEQ ID NO: 111730 - DNA, 3041 bp, Cannabis sativa
ctgatagtgggatcgtgtgtataccatatccacgtaaatcgctccccgagttatagggattgtgctgatgactcacgatgtgaaagttgatatcgctcagtttttgttgctctgcgtggattgcgcagtacttttctctgggcatgccaacgaggtgtcctgctcggactatgcttcccgagcaaatgttccgagtggattccatgtgtcactattcatgtgatgccacgtcagagtgcaaaaattgggataacagagattgacatccaataaccgatcaaatccaattagaatcctaattttagcatgcaatccaatctaattataattggattggattggatcagttcggttcaattggattttattggatgatgcccacccctaggcattaggggtggtggtatttcctccgaccaaaagcaaatatagttcaccaaaagagcatactttgctaaaacatgaccaacaatatttgcagatctattaacataagagatctacagtccaggaaaattggacgctaaatgagaaatattagttaacaaactatggaaatctaaaatggaagcttgagaagattgcagcccttttaccactagtaaagagtatgtttcaatgtaatgtacttgtaagtgatgatttttaagccattgtagatcatagattagagcccaagcttccataacttccggtttaaaacagccaggtaggggcgtggacattgcagcaacaacttcaccattgctgtcacgtagaattgcaccaaggttggaggtttgtttttgtttgttaacaattgcatctgtgttaaatttcattttgcctaatggaggattcatccatggttgatttttcgggggcagtagctgatcgttgttgagctattgcagcagttggcttagtagcagattgtgctaagtgatattcctcgaagtaatttaaagcaaaatagagtagaacataatgaggcttcagttttgtgccattaagttctttttttctctcattccaaacacaccaaagagttgtaatgaattgctccaattgtaaatcattccatatattagaaacattgagcaacaattctttgagactcatttagcttgaaaataaattattaagagagaaaggagaatgtttccaaactttcttgggtcgttggcaaaaacatagtgcattgttggtggtctctttatcacagcgacacaaagaccaattaggagaatcagcaatatgtcatttatggagaattctaggaggcaatcatgaattgccctccatatgaaaattcacacctttgaggggatggaaagagcccagaattttgaagtttgagaacaactaaccgtagaatgttgttcttccaagtgtgtagctagaaagtaaccagatttgactgtgtatatacaatttttttcatggttccaaatgtgatgatctgggtgagagtacaaggtcaaggggatgctctgtattttttctacatcatacccaataaatagggtcttcaacaaaggagtgtcccattgcctcgaagtagtgatgagatgtgagaccttcaagcttctgtgaatgccattaaatattaatggcttggaattagaaatacctggtagccatgaatccgtagcacaaagtatattttgtccatcaccaactttctatctcaagcctttggataaaagttctttaccccaaatgatctcttgccaagtgagtgaagggttaaaaccataaccagcatctaaaaaggaagaattcttaaaatatctagccttaagaattcaggtcaatagtgaatctgggttggaaaaaatcctccatgccagtttagcaggtaaggtctggttatagtgaataaaactcttaaatcccacaccaccttcaaccttggattggcaaagagctttccatgtcttccaattaatacccatgcctgaagaatttgaaccccaccaaactttattcatcattacttcaatttggttaatgatagacttagagacacgaaaaagctcatatcataggtcggtattgattgagccaccgctttcagaagaatctctttgccacgaatagaaaataactgttcttgccaggcagaaagtaacttccaaagtctgtctttaatctcacgaaattgaacttgtttatctcttcccgaataagatggaagacccaagtaatgttcatgacaaggttgaattggcataagtaaaagttgctgaaggtttgcttggatcgaaggcaaagtgtttggtgagaatgaaaaaatagaattttctaggttaagtttctgacctgaggcacgacaatagtaatcaagacaccgtttaactgcattagccgatcttggattggcacgacagaggactaagctatcatctgcaaagaagaggtgagagacagttggagcaccatgagcaacttttaatccatgtaaatgaccacaaatttcttcatgatggaatcatctggaaaggccttctgcacaaataatgaataagtatagggaaagtggatccccttgtctaatcccacgacttggattaacatgtccttgaacagatccattgataaaaaaaagaataagaaacactctgaatgcatcataaaatgagtgacaccacagctgtatgaaaacccataacatacataactcgctcaagaaaataccattcgactcgattgaaagctttactcatgtcaagtttcatggcagcgtaaccttctttgcctctctttaaattcttaagagagtgcaacaattcaaaagcaactaaaacattatctgtgatgaggtgagattgaatgaaagcactttgtgaacttaatatgatatgagataggtatggtttgagtctgagcataatagtctttgataccagcttgtatagaacattacatagactgattggcctcaattgagtcaccgttgtaggttttttaaccttaagaatcaaagttattaatgtttggttaaaacaagatgggtcactgatgtcgcccaattagttacactgcggtcgcggtagtaa

SEQ ID NO: 111731 - DNA, 4628 bp, Cannabis sativa
gagcaaaatggaactagggtttaggtagtttagctgccaaaaattcgatttttggggttaagtgttacaaactgtaaaattcaggtagtttagctgccaatatccctatctataaatattcttaatacaacaggtagtactattttctattacaattattcttactattagttatttaaaaaagcaaataatttaaatttataatatttatggtagatgattttgatttaatgttgcttcttaattgtcagttgtatctttattagaaagtttgagacaaaaggttcaggaatggtttgataagcatcatttggaagcaacaagcatatttacacaattatcaacatgggtagagaatcaactagttgagcaaaaccgtttgggtaggactatgaatgtaagtcaactttagctattttgtttgttttatttgagtataattatttcaaaggaaactatataaatgaattagccttaatgcatatatttgcatattgattagtgctatttatacacaggtaatctctgttggtctttagatttaccaagttgttgatggcagcttagaatttgttgttaatattttagaacgaagttgctcctgttgcaagtgggacttacatgaaattccttgctcgcatgcatgtgctgccatacgaaaagcaaatttgtcccattatacttatgtgtccgatttttacaagaagaatgtttttattaacacatataatggtttaattttccctgtaggatttgaaaagttttggaatattcctgaattcgtcaaaaatcatgttaagctgccacccactaaattgaagcgaagggctggtagaccaaggaagacaaggtttcgttcagctggtgaacataagaagcaactcaagtgtggtaggtgcagagaatatggacacaatcgtaaaagtttcacaactatcattcatacaaacctaagaacttcaaaagagactgaaagcttctgatcatgctcattgaacttttgtttaagtttgaatatttttacgtcactagttatttattgtggtacatcaatttatcttccaattatggttggagtatagtagaacaatttcataatatgttaactttttttggttaaacatgaatagttatattctattgaatgagtaattttttttgtcgtttttttttattaacaagtgttaatatacatcaactataaaactagttatcgtgtatatattaatatgaatcatatatttcatgctatcttagagaacgaaaaagttatgatatatcaattgtttctattaagaaaaaaattgatagaatatcatagtctatggtatatatatattttttttattatagtatatacattttgtgtactacaatataacttttagaaaataaaataataaactttagattgtataaaaatatacaactattttaacctaatataccattgtgaaaaaaaataatatatatgtatagtgaaaaaaggtatatgtatatatatataaggaacacttcttaatgggtattacccattgatgagtactaaataaatttaactataaatattaattttaaaaagattaagccattagattgtgatttcatgacgaataataaaagaaaaatttaaatttctacacttaaattagctacttaattaaagaaaataacaaaaatacatctttttacactatatcaaaaataagtttatatgacaaatatttaagtaaaactcaatatttttttatcattttttttgtcgattttttttattattattttcttttcagctgatggaacaacctctgcccatataatgaaaaaatgagagatttttctaattaaataaaaagattaagcataaaaactcaattttttaatattacccattcatgagtaatacccattaagagtgtacccatatatatatgcatatataatattaaacctcaaatttaaactaatattgcacgtttttttatttcactcaatatatactatatcacacaaaatgatataccttaaaacaatatgaatatatcacaaaaataccaaaaaattggtttaatattctacaagttttttattttttcttttcttttttcatataccatggaaataaaaagaatatataccaataaaatataaacatacctcaaacttaaactactatttcattttttcttctgtgttcgttgttcaaatacaaacgcacgtaataacaaagtaccatactattaaagaaatatattaaaatattaatatacttaatatattatctttcattcttcatataacactccacttaaaaatattacacaacattgttatagtaatatactggaatatgaataaagttaaataacaaaactcatatacctaaaagtaaaactaatatatcattgttttgaaaaataatttaccacaatattaaatctgtattccatgtcaaacctaatgcaaaacttacaataaacacccaagattgtctaaaaaatgtttcaaaagctaagatgtggtataaggtggtaaattacatagatgttgtatgatgttggaagtccctttttttatctattctgtatcacactgttacaattatttctcactttttccatttcccaatcatatagttcaaccgcaagttttttttttcgaaaaaatagcattcgtttgtgtgtgatatcattaatatatgattttgacattaatgtttcagctcacttgatgatatacattccgcaatcaaatctacaaataagataagatataccaaaagtattaaatatatgaaataagaaaaacatatatgtatatgaaaaataaaatattattacttacccattttgttgaacttctaagttgtttacaattttcatagtaaaatctcctctttcaatgtaatttcttttttcatagaaacttatagcttctaagagcattggaaccatcattgagtatacagctgtggctgccttcaccttctaattatgcacctccccactcaaactatcatatatttttattatcttgttcatcaagctaatttcaatcagcacccaatgaaccatatcttctacaaagataggccaatagatgtactctacatcagtccatggcttagcgaaatttaataagaaagaaaaaggctttgttttctaagagaattgctcacttggattatccatgtattttgcaaaaacttggcgcatgtaccgatcacaagtagcattcatggttgtacaacttttattcttgtgtctgaactttttatgcaaaatagtaaaacgcaacatccatgtgctgaaacaatgactatttcagtaacattaataatttgtgtaatataaatacatataggaaacacatatacatagacatacatataagaaacccatataccatatattttaaccaatatactatagtagtctttgtgaaacaatttcacatgcattgttacatacaattggtatactagaaatttaatttaatatatcataaaaaaaaaagaaaaaaaaaacatagcattttaatttgttcatgatatacagtagcacataaaaagtataaatcctagtaaaacaaggtatcaatcttatatatattgatataccacttattgagtgttttaactaattttaattggtttcatatcacataaaacatgaaaaaacacatatataatacttacagaatcattgatttttttagcaggtgttgatagatcataaaatcaagttttagacctaacttcatcttcgacatagttaaatggtggattgatctggttgtttcctacatttgacatgcaaaagacaaatagagacgatcactgtagttttattaatatttttctatgacttttaacgtataacaaaattttatataatttcatggtataccttgtttgattatgaaaatcttcttgaagccaattttcaaattctttgtatgttttgtcctctggagactctgctgtgaatggttgctggggcttcatttgtttagggtcagattccaagggtgatattcccaaatcaaatgttggttgtgactcctcttgtgttataggactcactaacttcaccctttttggtcgtataggctcctctccttagctgacccaaatttagtagtgtaaggagattgttcaacaagaccttgttttatcaatctctttccaatttgtttaggtacttataacaattaaaacacttgttttgattttaactaatataacaattcatataccaaattaacattgtcatactgttagctttttaaaagtgtaatatataaaaatttataatatatatttgacacatttaaatttaagtattaaaatatttattacaaaagtttaaaaattcacatgaaatattgaatacaagttattatcattaaagtaatcatatcctaattcttcttctttctctttaagggacctgcctgttggttgtcctcttttttcttgcctttttgtacccttgttctttagtaacatctttttttttcctgtaaaaaaaaatgaaaaaatcagatgaagaaataaatttagtttgttgaagaaaaatatcttacacctgtaatatccgctaactccgaaagggtatttttgtaat

SEQ ID NO: 111732 - DNA, 5453 bp, Cannabis sativa
  modified_base (5355)..(5367): a, c, t, g, unknown or other
aacatagtttttatatataaacaaaaatgaataactctaaagagaaagaattattgggagacttacactaacaaaatgttctgaatttgtaatgagattaaacttttaggtggcgtttggtttagttgggaggaatgaaaatatagaaataagaataggaatgagaattgaaataggaatgaaatagaataagatttgaaatgcataaaaaattgataaaaaatgttattaattttttttttaaatcttgcattgaaatgatctttcattccatttcaaaataaaccaaaatgatggaaagaccatttcattggaatagtattcaaatttaaatgcaacaaaacaaaagaatagaatgaaaattgtttcctttctattctattccatttcattacatccaaccaaaaataaactttttagtttttacaacagtttgctgtgcttcaaactacaaatagaagtttagcaaaacaagctctttcaattctataagttaaaaggtcgcaataatcacattgtagtaagttaccttcaagttcaaccattctcattttcaaataaaataaaatgaaaaggaaacatttctataatgtgttcaacgcttcccactacaatatagaaacattattctttattaaaaaaaattaattaattaattatttgacaaatgtgcccacaaaaattgaacaaattaaaaaaacatgtcttggtgttggtgttcttcttcatcattttttgttttttttattattagagtcctttcattgagttgcagagcttccatgtgtctaccttaatttgctaaaatgccgattcagagttttttgatgtagcccgaacccaaattcaatcatcaatcataacacacgaaagcagccattaacgaccatgctttctctctcacctcttcacatctcattccccaaaccttcatctcttcattcttgccttcatcacccattattgtctctatctatctcctcctataaagctcacaccgccactcgcttttgtcacggctttcgccgatgccgacaacgtaggctcaaagttcaagccatcgacgccgcccaattcttcgactacgaatctaaactcgctgcagagttttatgattcaaacaagctcaagatcgctgtaattgggtttggtaacttcggccaatttttgtccaagacattcatccgacatggtcacaccgttctcgctcactctcggtccgattactctctcacggcacaaaacatcggcgtctctttcttcaaagacctcgacgatctctgcgaagaacatcctgatgtgattcttctgtgtacttcgataatctccgccgagttcgtccttgagtcactgccgcttcagagattgaagcggagcacgttgatcgtcgatgttctctccgtgaaagaattccccaaaagcatgttgctgaaggcactccctggtgactttgatctcctctgcacgcaccccatgtttggacccgagagcggtcgccgcgggtggaatggtctttactttgtcttcgacaaggttcggattggggacgaggaatctagggtttccaggtgcgataaatttctgagtattttcgctagagaagggtgtagaatggtggagatgagctgcgccgagcacgatcgattggcggctgaatcacagttcataactcacactgttggaaggctcttggagcggctggagttggattcgacgccgattaacaccaaaggatatgagacattattggacttggttgagaacactgctgctgatagctttgatttgtattatgggttgtttatgtacaataagaactcgcttgagatgttggagaggttggatttggcgtttgaggctttgaagaagctgctttttgggcgtttacatgatgttgtgaggaaacaactgtttgggaattcggaaaagttgcagatttcccgggaaaataacacggtgcctaattactctccgaatggttctgctttgtcacctttttcggatgctattaggtaaagtaacacaatccattgacttgaaaaaagaagaaaaattattctattcccctttttgtttgattgagctcgggaatctgaaatgctaggttgaaatacttgttagccaaaggaaaagaaaaaaaggttttatcttcatttttaatctgctagtaatcaatgctgaaggtcttttctactagatgtagaattgggattctgtattctttacttgtgtatcatgtatggaaatggatttgtcaatattcattgtgatctttatctttcaggtcacggaaatctgttgtacccagtgataataaaatccagatttttaacaacttagataaggacttaaagcttaagattgccattattggatttggcaactttggtcagttcctggctaaaaggattgtgcgtcatggccacaccgttttagcctattcgcgatcagactactcggatgttgctcaaagattaggggtttcctactttgctgatgttgatgatctttgtgaagaacatccagatgtgatacttctttgtacttctattctatcaactgaaaaaattctcatgtcattgccaattcaaagattgaagagaaataccatgtttgttgatgtgctatctgttaaagaattcccaagaaacttgtttctgcaaaatttaccgcctggtttcgatattctctgcacacatcctatgtttggaccagagagtggtaagaatgggtggaatggcctaacttttgtttacgataaggttaggatcggaagtgacgagccacgagtgctgaggtgcaacaggtttcttgatatctttgcacgagaagggtgccaaatggtggaaatgagttgtgctgaacatgataaacatgcagcgggatcacaatttatcacacatacaatgggaagaattttggaaaagttggggttggagtcgacaccaattgacacaaaagggtacgagactttgttgaaattggtggaaaacaccgcaggagatagctttgatctttactatggcttgttcatgtataatgtaaacgcaatggagcaactagagagattagacctggctttcgaatcattgaagaagcaactttttggccgtttacatggtgttcttcggaggcaattgtttgagaacgctgaacctgaagttttgatggaaaaacctgtgttgatgctgtctgaaaatggtaccatgatccaatcttcttcggagacttataactttgagaaagaatgagttcaagctttctcccacaatcccactgctggtaaattaaaccgaaacccatccttttaggttttcacagctatattggctagtcttctgatttgatatgaagggttttctatcaagttcaagtattgtggtagcttgattggtccatcttcacagattaaatgctgtgcctccccttttgctcattgttccattagttgtattagattttgtgcagcaataggatgagctgggtgatgcattttaagtagaatattcaatacattatttgataaatttgtttaagagaaataaggaaataaaagttgttgccctctatataaattaagtggaggcatgcatttagcctgaagttttgataagtttaaattggtgggagggttttttttttagtgtttccttcatctgcggttctgattttggttatatgtttggttgttgtaacttggagttatatttttagaatgcacaagcacaagcacaagcataagctacattgacacatttgattcatttttgttcttcaaaatgacattaatgaaataataagaagtttttctattgttggcctatgtgagtagtgatcggtagtgctctaaatacaagttatgttttgacaacgtgcatggcttggcattaaagaatatggacttggagaatgatataacacgaaaaataaaggtaaatttgataaaatatcatccattaggtttaaattttctcctaaactaaagctaactaatattggccaaggtcaatttttgtctattctttaaattactcctatttttcaacacactgtcacatctcttcctaatatctctctcgctctattctgggaccaaaggactactactaatccaacttctaacatcaaacattttggactctctcaccaacccacgactatcacggcatttgagactctctccaactaacgaccattgcatttgcggccatatcattgcaatgttaaaggaaagattttgggccctctctttctcattttatttcactgtattttttggttaaaatgtatgagtttattgatttaagattaaaatgtatgatgaatttatgtgatctgtgagtttatgttagatttagggttgggtttggttgaatttgtgttttggacaaaaaattagtttttacaccaggtccgatgcaggcctgacacttttctgttattaaatgagtaaaggttgaagacgtaggtccgatgtagatttgatggtggcccgatgctactcatttttcttattttatttatttatttattttaggaaaaattacggcaaaaattctcaaaaagtttatttgatgcagataaatctccaacctcaaaaaataacaacaatagtccccaagctcgagattcttgtaagttcgttagccctctttttaacaagtctgttaatttctccctataatgtcacgtgttgataccaaattgtgacataagtttctaaaaagttcattttaatgcagataagttcctcatctcgaaaaattgtgacaacagcccaaagctcaaggttctcgttagtccataggacctaatttaactgctttatttgctgttccaaaaaatatcacgtgttgattttttattggtccaaattataattttaattaaaattaatttaaaataataaataaataagttattttaaaaattaattaattaattttttatattttatatttttaatttaatctttcttcttctaatctactcctagcccaacatccctagctctggtctgttctaaaacctcccaacttgtattagcaagaggggttgttctctaaaaaattgtaagtaaaatttgaatcagagaagctaagataaaaaaaaacccaccacccaccggagacgaggactggcggaatagattcagggagagggtcggagtaaggtgtagctattagatttttttcatttttttttgcttaattccttttttgggctttttacagggatggtgggatgggatgaggaagaaagtggggatgaatggatgacacttatcggcactaagcctttaccactgagaagggtaggtggcgaatcgtagaagtttatatatatatatatatnnnnnnnnnnnnnatagatgttacgtgccaagtcacgtatgttaattttatttcagtttttaattttttttaatatcataattttaaaattaataatat

SEQ ID NO: 111733 - DNA, 2388 bp, Cannabis sativa
tatatattaagagcattaccatactgagtgaaactcttttttcatagtttgttgctgcgacgagaatgttgtacgttttcaaatggggaatatgtaaagtcgggtctagcagaactagagaaatggatagttaatgcaggggacgaggtaaacttcaaaagcacttctctcggcatgtcccaacagatatctgaaacatttactctattttgtttttgctatgtttagttcgcaggaacctcgtggcatgagctcaactatattagacaagctgttggttttctggtatataaaggcattcacttcctttttattttcttttgttcatgtatatatataaatatatatatatatatatttatatgattggttaaggtcttttttattgcatcttgtaggtaatacaccagaagaggaaaaaatctttggatgagattagacaggatctttgtccggtacttaatcttttcattgatttttgtgtataatttatttatttggagactttaatattgaattctgaatatgcagaaactgacagttcgacaaatctatcggataagtacgatgtattgggatgacaaatatggaactcagagcgtatcaaatgaggcatgttgcattttcaattcctttcttttgcaatatttggtcatttgagtttttcctttttggtttctgaagattaatcgtcttatttctccaggtggttgctgaaatgagagagattttaaacaaggacaatcagaatctgacctccaattcattcttgcttgacgatgatttaaggtaaatttttttggccctatcaacaatttatttaggagttgcaaatataatgtctggaagagtgatgctagaatactcttaatttttacgcaaaatgttcacaacaatacagttaactgagaaaattgaattaaaacttgttaaaatgctgagaaaacctttgggcaattagagtgactttgggaatcgttcgtgaaattagactgtaagatagatcggaaattgtcgtttgtatagtagttaagcactcttcaactagaatatctgaattaaagggcgaatttataacacaaattttctacttttctcattgcagcattccgttctcgacagaagatattgatatggctattcctgtgatagacccttcagatatacaacttccaaatttcttgtccgagtaccctgttgcgccacaaaattagctattatgagctatttcagtgtcttaacatttatctgctaagttcaagtgtacagaattagaatcaaaatgaaaaaaagaatgcatcattttagaatgtagctagacagatagatagctcctatgaaagattagataacatgaagctctcgcattttcgggtcggtcatcacaagaaagaatgttccaacatccaaagggtttctcattctttgatgagaagtagaatttttcaatgtttagatttttcaattttttcatttttgttaacccttctttcatcccgaagatggtgcttcacttttcatgaaagcttttatcatatatagtttgagaatcattgaattaggtctaaatgtactttataattatatatatatatatttatatatagttaatagttatgttgtacatttgttgctttgtacatgaacatctattagtagtgtaaaaccttaagtataggcaattaatttgattttacatttgtttttatgtatatttgttcttttctaatttaaagttcccttcacattaaagttgaaagctctttcaacctttatacactttgatagatattaagcagtgtgttgtgttgggcactagttttcttttagtaattctcttaaatatttacttataaaacccacacacccacatagataatgtaaaagaagatattttatttcaaattttttagaaaaaggctgaaaatatgccctttcatgaatctatgataattaacatatgtctcgtattctattttcatatatcctttttattattgtttactttgaaataaatatataatagtgagtgggggattttggtaaactgaataggttgtataatgatgatatatatatttaggagccattttagagaaagcaggtgatgggagagatcattgggtttgaataaaggaactgaatggtaaaattttcaacaaatcaccttacgcttacctttcgcatgttcgtgagagagatcaatactgtcatgttgctcttttgtggaacaagctttgaaatagcaaaacacaagaatgacatgaagtgctttggtggagtactctttccaatgcccttctaattcgattcatccttagagaatgaatgaacattgaagttttctcttgtacgatttttgggaagagaaaaaaaaaaaattataaa

SEQ ID NO: 111734 - DNA, 4337 bp, Cannabis sativa
attatctcttgatgaggttggacgagtactccacgagctttttcaacttcttctttatgatgctcacatttggaagtaagtatggagaggtagcagagtgccctactcggcatggggcccaaactatgcacaaagccccgtgccaggggtatgagccaactagtcctctctctacagaaatgatgtaacatctccgactaggcctttggtgtagaggttgttcagcctcttaatggtaagcttagacgacagtaattcccaacgcgactatggcttagatttgggcggcatctgtaatgcctccaccaattccatgttagtataatcctcgccaaggataagtaaatggccggatgaagaaaccggttgaccgcctcattgaatctcccatagggaagttcttcttcggcatcaagttccacctcctcactaggggcctcagagttctcatgctcctcctgctccttgtgctccacaggcaccgcgactttcctggaagcatccatgaacctgacaatgtggggatcgttggtcgatatagcacaaacagtttactttattcgggccagttttgatttgacctcaaaagttgacaagcaactatgactgccacttcagcctgcacggaatttctcttcaaagatccgagccgaccaataggcaacgtatcccaaacatcctcttggacattgtacgtccacgaggctggaagaaatttcctccattctctgttcagctcccacacgaagcatacattcacttctccactaatctagccaaagtagtgatggtgttgtatttctagtgtcggggaaccaccgctgatttcccactcagagaaacttgaagtagaagaagactcgtttgaagatgaagatgatttttttgctctgagtctgggttgattctcgtgaaggagttaagtaggtcatcgtctattcagaaatcacctccacagaagtcaactgggttcatctataaaaaagaaaatagagaggtgagtatccgaacaggtccagaacacctttcaaaaggaagattatcccagatactccgaccagaaggaaaagacaaaataaaacaaggtaaatccatcctcatgacgaaaatcctgagtaaaatatcaaatttgagatttttgaaacccaaaagctctgaagagcagaaactgaggtaaagaagtggatttttctcacataaattcctcaccaaacatttttataaggtaacacatggcaaatatgttataacctagtcactttatatcgctataattaacagaaaattcagaaacaattaatacttaaatctgctaatatattgctaatattattgctatatgtcgcgtttaatcgctatgttctcataggactttgacaacacaaaaaatagttctatttctatatgccacgaataacatcgcaacatgttgttatatgtcatgaaatattttcctgatgataaaaataaacctacaattttggtattcttattgttaccatgtcgataacgtcatagacatatgtcgcaaaaatattgttaaaacatgtacagaaagtaaaaaactacaaaatagagttcataaatcatactactaatgcatgcaattaatatactaaaataatgctcaaactcgggcttcgcatgaagctttgttatggcccaagccgtcacaatttgaacaacagtgatgttccataacgtatttactgttagatggatattgattactccgtattcttcttgcattgctcttccttggacaaccaacgagtttcttctccactagtattcgactctcatgttctgaatgtgttcaggaagtacccaatcatcctcctcaccgataagattaattgttgcatcgtacgtattcttccacatctcttttgtgtaatatggggaggtaagagcgtacaggctgacattctgagtaactgttgtgacacatgcatgggcacaaaaaactttcaataattggaacatgtcgcatgtgcatgttttctcaactaagttcacatcaccacctctctcactcttaggacctctaccaacgttaaacaaatgtgcactattatgttggatgcttctgaacctaccatccttgtgttgtgctaccaaatctttctcaaaactagttgccaaaggggtagtgcacttacttgcctttttgagacgggcagcgaaccaactttgaagtgccaaccttatgaactcaactagagtagtgattggatatttctagaattcttctgtcatgttgttaaggctttcagcagcgttgtttgtcattatattgtacctgtctcctaaacaataaggacatactaacttttccaatcctatactctcgacataagcagcgatggcaggatccatttgttgaagcacctaaaaatatctatcacattccctcttcgatcatgcataagtggccaaccatatttgcgtgttacatacatcagtcttaaacttgtgggtgatattcataaaaatatggttatagcatgcgcagtggcatgcttcaaggaaaacaacctcaacaacatgtttaatgctttgatacctatctgatacaaacactaagttttcaatttccccaattgcttcccttaacttttacaagaaatacttccaagagttgtgattctcactgtcaacaattgcaaaggcaataaaaaacaattggttctttgcatcgtatgttgcagcaactaacattgtgccgccatatcttgtcttcaagaacgtttcgttgatactaatcatatgaagacaaaacttaaatcccctcctagaagcatctagtgaccaaaaacaatacttgaacttgttgtcctctatgacaatgtctgtaatagtacttgaatttttttgttccagcatgtacaagtaaccaggtagctgactataaacttctgctggcgtacccctcgcatacataagtgccttctccctgcacctccaagtcttctcataactcatcttgatgtcatagtcctcaaacatatccatctgtatgtcttttgccttgtacttagttccatttgatatgaacttattcttaataaggtggccaacaacccaaagtgttgcttgacagttatcagcatgtctagaattcaggttacttgtgcgtttgttgtggaacatggtgacatcaaacatgtaacaatgtgccttcttcctccccccactctccatttgcaatttgaatccttgcaagttgcgtaaaatacatcagtgctaaacttcctcacaatgaactcaaaatttcattttcaatgcaaatattcccactatattttcaatttagtcttgtttgcgtacaactcgccaatgtgtatttcccttgaatatgtaccactaggagaagttttataaacataattttcctttatgtcttcccttgtccacacaataggtttgaattttgtacaaacttcaaaatcagatggtacagtactacgaggaggacctggtcggctactactagtgtctagtgtttggtgattttcactatgaggggtttttctttcttgctctattctctggttccttggaggtacttggaggtagtggaggtagttcttacctcaaagcaattacctctacagtttcatcaacttgcaactctacatcaccatcctcgttcaaatctatcatagaattattgttgtaaaagagagcatcaaactcataaaactggtcaaatgcattgtcaaccctgtcctcatcaatattagtaggggcatgttcattcaaacctatcgccggatctgtttctgggacaaaactctcaacaatacttcttagggtgacagttggcggagtaggccccaaaatcgcatgcattttaaccttagtcacaaacagtggcagtaagtttttcacactcattttttacttcatttttaagaacaatcttacttgactatatttaactaaaacctccagcgatatcatattgcctttcatgtacatgtaatgcacctctaatttcagttcatacacaagagggtctatatccaactctttatacaaaatttcatgcatcccctgtaaagtagtgtcaatctcaaacattaacatcttactttttggattattaaatattcaattgaaacattcaactgcccaaaccccatcatacaatacatccagaaatacagttgaatcagcaaacaaaaatgagaaaaaaaaattaattaagatcgaacatatgtcgagaaatatccccagcaacatcacaaaatatcgtggaacataatatagcaaacaacatcgatagaaatggaatcaatagaacacaaaactacagtatgtcgcaacataca

SEQ ID NO: 111735 - DNA, 5582 bp, Cannabis sativa
gaagcacaaaaactcaaatggaacgatattacggaataatttttttaagttgaattgcaaactaagttgttctttttaaaatattcgtgacactgcccatgtatgtacaaacagttagaaaccagttgtatccacgataaaataactcaatcgaaataacactatattaaagttctattgcacgatactacataggagaaaattcttaaaaaagagctgtggaattgtttagtaattttcaagattctaccggtatgtctaactatgtttcactattttattttaaaaagacaatcttaactaaacataattgtttattagtgtaatttttatatatggcactagcttaactaagttgccgtttggggaaaaaaactcttggtagctagaaaaggaaaaccctaattaactgtttataacgatctcttgagaaggaacagacaagacagaacacctccgttcacccgatatttctttctttattcatattattattattataaagaaagaaaaaagaaatcgtgtgtgggtaaggaaaggacacgagcaagaagatattaaccaataagaagagaaagaagaagaaaaataaaagtgaagaaaggatagaacagtaagagcacacgtcggccttctcatattcaataccaaaatcctccacgtaaccattttcaaccaataaccttctttcactagatctttttctctctctctctctcctattcatcattttttagtggttccttttttttattaattaaaactaaaatattctctctttcaaacccttccaacatatttggtacctatatatatttaagctgagaagattttcatgttaatggcgatgatgagcttatattaaataagatatatatatatatatttgtttgtatataaacagttattgtaggagtactgactgaatggaaatcgcagcggcgacggcgacggcgaagacgccgtcgctgtggccgtcttcattggaatccatttgcggtttcaggatcagttcttctcacattaacacaaccaccacttttagattccaacaaccacatcaccgtctgcttctctcttgttctcagggtgctcgtgcttctcagcctatcaagaagaaaactcgtacgactcgatctataaacccaaacccaaacccaaatccttagggcttgatactcccactaaaaaagttgactaccaacccagaaagactaatcaggtggaccaggtcagttatcttttgcttaattaaactgttgttttgtgtaatttttagttgtagctcttccaatcgtgatgggaaaaatggttaatgctgtactggttgttaggactcagatgagtttttgttttaatggctttggtagtgtgagaacttgttcgttgtttatttctttatttgtttgtcctttggttttatgagaaagatgaacctttgctagaattttacaacttgggaagcttcgcaattagtatagtgaagaaaatttttggtatcaattaactgcttcagaatgctgtcaaaagttctaatcaaacaaagaaggattcaattgattgggtcagtaagcaatgtgcacaagtagacaaatctttcgtagttggagatttatcctgattgggtcaatacacccagctctaagctttcaaatcttcccaccacatttcattctaaattctagttttgatttagttgtatatgttagcagaatggattgatattgtatttaactgatcaaatgtcacttcggtttcctgttcgtaatttagttgcgcttgagagagagacatattcatcatatgataaacgagaaaaatcattttcaaagtaaccatttttagtcttctgttgactatattatcgtgaaaatgtatctttctggtgacaccatagttatgtcagcttatgagagcagcttagtttagcacatttggattaatgtgtaagaaacatcaacctacttttgtaacggcttcagtacaaacttcatttcagtttcctttttctgatgatgattgcaggcatcaaaacagcaacttaataccaattcaaatgcggatcctcttggccgcagggaccttgggaagaaagtggtgaaatggattacacagggaatgagggctatggctgccgattttgcctctgctgaggttggtaatgacaatggcgatttctctgagatccaacaacaaatgggacctggcctcacctttgtaattcaggcacaaccttacctgaacgccatcccaatacctctgggcttggaagctgtctgcctgaaggcatgcacccactatcccactctgttcgaccatttccaaagggaactccgtgatgttcttcaagatcttcaacgaaaatcgttggtatcagactggcgtgaaactcgctcgtggaagatgctcaaggagctggctggctctacgcagcacagggcagtggctcgaaaggcagcagggcaaccaccaaagaagagtggccagagcgtgttggggatggatatggggaaagccaaggccattcaggacaggattgacgagttctccaaccgcatgtctgagcttcttcgcatagagagagattctgagttagagttcacgcaggaggagttggatgcagttcctacaccggatgtcacctctgattccacccgaccaattgagttcttggtcagccatggacaagctcagcaagaactctgtgatacaatttgcaacctgaatgcggtcagcacatccattggacttggtggaatgcatttggtgctgttcaaggctgaaggaaatcacaagttaccgcccacaactctgtctcccggtgacatggtctgcgtgagaagctgtgatagtaggggcgcaggtgcaacctcttgcatgcaaggttttgtcaacaaccttggggaagatggctgtaccattagtattgctctcgaatctcgtcatggagatcctaccttttccaaactctttgggaagaacgttcgcattgatcgcattcctggcttggctgatgtgctcacatacgaggtgtgactcttactattaaattttgccgaccattttatatttgattcttcttttcacgagtgatgagtgtgcctttgctgttttcatttacagcgcaattgtgaagcccttatgctgcttcagaagaatggtttaagaaagaaaaatccttcacttgcagttatagctacactatttggagacaaagaagatatggcatggttggaggaaaatcaagttgtggattggggtgaacaagaattgagtgaagaatcgataaatgggactcttgatgaggctcaacgaagagcacttggcttaggtttaaataagaagcgacctgtattggtaatccaagggcctcccggtactggaaagacagttttgctgaaggaattgatagcacttgcagttcaacaaggtgaaagagtgcttgttacagcacctacaaatgcagctgttgacaacatggttgataaactttcacgtatcggtttgaatattgtccgggttggcaatccagctcgtatatctccaactgtagcatcaaagtctctggcagaaattgtcaattctaagctcgccgattttcgagatgagtttgacaggaaaagggcggatcttagaaaagacctgaggcagtgtttgaaggatgactcattagccgctggcattcgccaacttctaaagcagcttgcaaaaacgttgaaaaagaaggaaaaagaagctgttagggaagtactatccagtgctcaagtcgttcttgccactaacacaggagcagccgaccctttggttcgaaagctagatacctttgatcttgttgttatagacgaagcagggcaagcaatcgaacctgcttgctggattccaatacagcaaggaaagcgttgcattcttgctggtgaccagtgtcagcttgctcctgtcattctatctagaaaagcattagaaagcggcctaggagtatctctactggagagagctgctagtttacacggaggccttcttaccaccatgctaacgacacaacatcggatgaatgatgcaatagccagttgggcgtccaaagaaatgtatgaaggtttgctcaagtcctctccagctgtctcttctcatcttttggtagattctgcatttgtcaaggtatcacagcagcccagcccactcgttatttctctgttcattttccatttctttcagaaactgtggtttatgagttcactcatactgactggttttgaattcactgtttaagcctacttgggtaacactatgcccacttctcttgctggacacgagaatgccatatggaagtttatcaatgggctgcgaggagcatttagacccagcaggcacaggctcattgtacaaccaaggggaagcagacattgttgtgcaacatgtcttttctttgatatattctggttagtttaaccacttcatctaccacattagtgatatttttatgcagtcacttataatatggtattggttaccatacaggtgttaggccatcagctattgcagtgcaatctccttatgttgctcaagtgcagctcttgcgggacaggctagaggaacatcccgaggctgcaggagttgaagttgccaccattgatagcttccaaggtcgggaagctgatgccgtcataatatcaatggtatattccagtcctaaaaagaaatgctatatgctatgaatgaaccataacatgtggtatttattacttgctgattctcttttgctgctataacttaaaggtacgatcgaacactctaggagctgttggatttcttggagatagtaggagaatgaatgttgccataacaagggcccgaaaacatgtagcggttgtgtgcgatagctcaacgatttgccacaacaccttccttgctaggcttctgcgtcatatccgttattttgggagggtgaagcatgctgagcctggcagttttgggggctctggactcggcatgaatccaatgttgccttccatcagctaagacagtttcggtttttgctccaaaggaccatctcatctcctctccatccttgttactgtacaggtctttttgttttactaccaaagtagtgattatagtaatacatggttatcaattagtttactgtatatacaacgatccaattcattgatcaagaacttgttttgaattcgtctataccagtggagaacgaatgcaatttatatttcttcaccactctcaaaaaaattaaatatatatgtatatttactcctctccctctatataaatatatatatatatgtatgtatttaaaataaatgatttagacttgatgcacccaaactaggaaatcagattgcctaattgtgttcgtattagaatcatacctatgtgatttgtttccataaagtctggagttcgaagccctccttggatagttataggaatggcaaaagaggcgggggctgccccggcccgctactgacccgacccgactcgacaagcaattgtcctggcccgtcacgtcccgattatctcagaaatttaattgggtctgacccgacttctttttttttttttttttt

SEQ ID NO: 111736 - DNA, 4498 bp, Cannabis sativa
  modified_base (49)..(55): a, c, t, g, unknown or other
ttctctttctctcttcatcttctacttctttcttctcatctactttatnnnnnnntatattattttataacaattataaaatttttgttgcatgatacacacggctgacacgtggctcgagagaaagttcaggccacctggatcgggacgaatagcataactctaataggttataactttttacctttaacaaaataaacataatttaagattttttttatgttaaatagtaaatgccattctattttattaatttttctttaaaaaatcataataattattgtctatataactattatttatgaaaatttcttattgagaataatataaaataatttaaattatttaaatattttattattgtaaaatttttgtattgctactacaatcgaatatggtctgtttgcttttatttggtcaatatagtttgttttcttggttttgtatagtgaggttggttagtttttatcttcaattctagttttgtacaactagtataacttgttttagttctataagacgaatattgtctaaagaaaatatcaaatgtattgtagacactttcaggaacgtaaatgagcacaaaaaaagcgtaattattacatcaaaaaattatgtgtagtcataaattagcaaaaaaaaaattgatattaaaattttattgtctaattttactgaagtatctctccatgtcctccttaagatagagaatgaatttctataaatagtaaaaaatcttccacttttgtgtaacctagttatcaaagttattttacttttatgagtttttcttgagaaaaaagaaagaaaaaaaaaatcaaaacttaatgcatgtattctatcaacatggaaaaataaaagcatttacattctcacagatatgatgcacacagaaactatgatcttctaagtcaggtttcgctcaatggagagaaaaacagattgaaaatggaagaagttctaacccactctctctcttttttttttttttttataattgaatagcatatgttattttgcaccactaaaatatagttacaattataggcttgtttatttttttatttgacaaataaatatttaaagtgcatcttaaaagatataaaatggaggataattaaacagtatttacctccacttcactgcaagctacttcattttatagaaagataactggcacaacacgcttgcgtgcagctaaataaaataaagcagtaaaacacacgtgaaattaagcacaacacagctgagataaaatgctccaatgcaatggacaatctctggttacttttcaaaattcaggctgcactatatcgaaataaaaatgctaactcaatcagatgatgaatgaaaagtaaatcggaatagatagtatcagatatgatttgattgttgaaccacatacggtttaaattcatgctacaaacacatacatatgcttacaatttcattatacttacaaactactctttcttctaatgtaacttgaaaacaacagatgtccttatcaaggaagaactaacacaaaaaatgattttttttgttcatattagcacaaaattaggagaaattagttaacatgaatttcaactaccaaactatgagtttagctacagatgtaaaattcctaacaaaatgactaccagcatactgaagcaccgtttgtatcaagaaatctatgacactggatgcaaaaacctaaagaaagtgaatgatcactagaactatgcaacccttttcttgacaatccatccagcaattcagcccttttaaacaattcctagtttgtggagagactaatgggtccatagattttactgctctgctcatctttgcatgaagtagtctagggtcctgtgagaattaaaaagtggattggcaagaccgttaacatcagcgtgtacacaaggtatattgtacaattatcgttttattcatcatttgataagaagcaatagtattaaatgaggaaagtcagcccacaagataagcaatcacaaactacaacaaagaaacaattccctcaacaaatcataaaacatgaaagcttataattctttttcattatttaccaactaaagccaaaccttaatactgtcctaaaaactccaaacactactatggtaacacctaaattaaattcagaaaatggacaatgtaaataaagatatcaaggatcacattactatccttgcatatacaaccaacttcgtaaaaacaaaatatatgctctatgtatcatcaagtcacgaatattattgttaagctttcatgaatgaagatccaactacacacctagaggctagacattaggagaaaatggattttcccaataaaatacgaagactgcaaacatgaaaatgagcactaaaacatggcaaaaaggatttactttcaggtaccccaaaactatgtaaattcataaacttactatcaaaaatcccttcacaaactaatactttgcaagtccaaaaatcccatcacaaactgatacatcataatggattgcaagtctaaaagacttataaaaattctgtcatatggatcctttaatatggaaagctcatcaaaatccccagcaatacacctatgggccattcaaaagagaaagtttggttgatcatatcatagttataccaaatactgaaccaaagaaaccaaaaattgaaaagggtaatccccaacagaacagatttcccaaaaattgagaagggtaatccccaacagaacagatttcccaccgtctgggcaaacaccactgtggttacttttaatctagtttacagtacatgtttttggtacactattagttgaacaaacatttaaaatctacatctcttctctttggccattttctttgtttttatgacacaaagagctgcattttgtccacaaacaactttgatcccctatgaatgtactaatgacttgttcctagagttattaaaagttctaaaatgattttcatcttttgtgaacaactttgcacttaacttttaccataaaagcaatgttcaattcaaggatggttctttgcacacactaatattagtaccatcagggttccaattctagttaaacaacaatgttaagccttccacgaagatactcaagcagagatatataattgaaatcaatattttgaaatcaatctgctcaatatgttttccactgaacataatcttttgctaaaacaaaagaagaaaacaggcagaaatgaaaatagaataaacacaaaaacatgtgattaaaagattaacaagacatctttaattccattacccaattccaagaataacaagaaccttagcaaaaaggaaaagagaaagcatacccaagcaacctaacgctgtatattgagcatctgtttggcctcggtctgctcctccaaaagtccctcactagcatacttgctcaatagctccaacttcttcttctccaccaccattctctcaatctctctgtcatcaggcaaaggcacatgtactataaactccttttccttctcactgctctccctcaattccctctctctctcacttctcctctcttcctccaccacatcctcctcctcctcaaacaacacctccttcgccaccatagccacttcgccgctctttactgacctctttgcctctttccttatctcctccatcctccgccagtccgccaccgcccccgccctcattttatcctccgcaggcgcctccactctccccagaaccccatcctcatcgtccctgtatccataatagctcgcatcgattctcttgtaaatgtcgtacctcgtccgccgcttcctaagctccggcggcttctcgaaaagctcccgaacccccggtaacttctttgccgcgccaaaataccggtatccagggccacggccgctagggtttggaacgtcaacaatattgccgtctaagtcagtcatcttggccgagttcttagcgtaattggggccaccgagctccacgatacggcgttcccagtgagatttctcccgtataagcttgttaatctcgtcattgaggtcccggaggcgatgctcgccgaggccctcgttctgaatctcggcaacctttcgaccgatctcgcgcatgatctgctggcgccacttgtcggcgtcggctaagtctcggcattctgatgccaagaacggacgacgctccttgggcttcttgttttcttcggctttcaaggtgacgaaacgattgagcatagactgagccttctcttcatttcgagccattgttgtcttcctgcctccgagttcttcgtcgaaacctaatcagggaacgactgtcagattacaaagtgctgtaactgatttcggatttggagagggttttaggactgttacaaatacacccaaagaaacctaactctgcttctccttcaaattcaaattgcaaggggactggttgggctgctattaagcttgatatggaaaaggcttttgacagagtggaatgggcttttctaactcatttgttcaatc

SEQ ID NO: 111737 - DNA, 4647 bp, Cannabis sativa
aaaatattttcacttttttaatttcaaaaataaaaaactgattaaaaaagttttaccaaacgccacgataattaattgaatgatgttttttttattaaatattattcatgtatttgttagaggactttaccaacttggcaattcatggtagggtaatgtttattgtatgtgtggaaaaaagttaagatatttcaaattttctttttgtattttatttatttatctatttattagtaatgaatgttttttttgtgttgatcatctccaccacttggggaagataattgggttattatgacagtaataatataatatatcattggtaaaaataattaaaattaaaaagtattttgtgtatgagcattattatttgtagttatataaaataaatatattatattatacatttattttatataactacaaattaaattgacaatttaaataaatgtatatatttacattattctaagtaaatttattacataaatatttaaaaattattctaagtgttcaagagttatcaaaacatagaaaaaataaaaaaaaaaaatattcttatatacatgtgttctagtcatcaccgtgaaccactgcaagcaagtttgctaacaactctcgctctaatggtcataaatcttttttatttttgcatcgtatcgagtctgtcccaaaaagtattgttaaaattacataaaaatatttttattagtatatatattagattgtttgataatataataaataatatctaataattagaacttacaactcttttttcaattatgaacatttgacgatctcacataaaaatcacattcttaatttttaggttgttttatgaaaactactagcaagtagcacggttgacacggtagcaagcagcacagttttagacaaaaaaaacctagtccgaataacttgaagagccaagcattgcctgttcggaagaagttaacatgcaacatgcccatatggatgagttcaattgtaacctacctcaaaacaggagcactcccaaatgataaaaataaagcctgcaaaatgataaggaaaagctacacggtaccaaatcctagacggagtgatgtatagacgcagattttctcgacccctcctaaggtgtgttaataaggaggaagttgcatagttctttactaagaccatgaaggattttgtagaagtcacactcgcagcaaaatgtatcttcaaagatacttaggcaacagtatttttggctgacaattatggaagattctctcgctcaagttaaaaagtgcaatagtgccaaaagtttacaaaaataccccgagctcctccaaatgagctgactcaaatgcaatgtccttcgtcattttccatctagggagttaatatgatcagaaattttccaaaaggaaaaagttgagttcaatatgtagttgtagtgatcgactacttaacaacatggacggaggccgagccgttagctataataacctccaaaaaggtctcagattttgtggtgaaaaacttatttgccaatatggactccctcgaagcatgggattgtcaaaagcttcattgtagtagcctaccccctagcaaatgaacaggtcaaagcaatgaacaagaccctcagacacacattaaaaatgtctcgagaaagcaaaaggaaattagcctaaagaattacttgaggtgctttggttgcatagaatagaactacttaaaggatgaccactggtcaaagtccctttgcaatgacatatgggtatgaagcaatgttgttcgtcaaactagaattgtcatctaatagaaaagcaacattcaacgaggttatcaaccatagtctctttgttgaatccttagacctagttgaaaaaatgggaccaatctaatcaaagattacaagcctaccagctaaaggttgccatatacttcaataagaaaattaggaaaagaaaggttgttgaacctcaacataaaagataatgctataggtgtgttatgctatagctggcaaggactgtaagctggcttaaagtgtgggtctctctttgaagctttcctcattgtttgctttgtccgcatcattattctacgcttggaaaaaagtttaggttcaatttttggctgagcaacggttacagtttactcagcaacgacagttcccttagaagatatggttgcacgacctttacgcagagtgtcaacaatactgggctagactctgtacgtccaaaaagtaggcaaataacgcctctaacctttctttaactctcagatgaagcgtttgtatccttctccacatattaggttggggtaccagtgatgttgcacctcaggctctagggatagcgttgttaactacttatctccccaggcttcaaaactagagtttgacagatcatcgttggatgatgatgaacttgcacagagccgatgataatcttcatataaaatttgtagtaagtcttggtcaatatggtgtctgcctctccaaaaattactagggttcatctacaaaagatgggagacaggaaagtgagagtttgatggagtgaaagatcgatgaaaaacaaattttagatcagatcagattcaggataaaaagaaagggtttcattcaaaaatggaattcccaaacctagaagttcaaaactttgagaggtacctgaaaatctttagagtctcatgaacgagtggaaatcaatgattacgtaaaaatcgatacgtagtcagagaattagaagttataattaaatgtttgttaaagttacaagccctaatatcatctattctacgatcagtcaagaacagtttaagaatagataaagttgtggcaagaaacccaaaaaataattcgtacattcaatggccattccataaagtaaagggaaaagtaacttactcgctattcgtagctttattgatctgctaaaagggtagcatcaatggatttcccagcaaccttcttcgaagatctgagcgacaaatatgaagaatttttttggtctgattcttttagaatgaaaatggctaaaaaggttcccacgaaggattaaaccccttttataagcacctaaaagagtaaagtaatttgaaatttgagttttcccccaaaaagtgtaagttcaagtactcattacaaaggacaagacgtcacgcatgctgcactcctcaaccgtcagtgcgtgattcgaggaacaattttgaagaggcatttaatgcctcatataccaaagagactctaaatcaaagtcacgtcggatcaacttcaacagtcaggacacgcgtcacccatttggacaagcttccaagctgaatgaagtccacatgcgaccaagaaggtcccacgcagactttgggggaaaatgttatcttattttttctactcttatgtggcatctacttcgatgacacgtgtcttgcattttccaccgtgggtagatggttttactcctagcagcccacaagaattgatatgaaggtccaagttgttcttacatagcaggatgtctggatagagtcatcaaatgacatctgactagctcgattgtgtgatcaactctcatgcactagccaagaaatgtgagttgtcaatttcagcagtgatcgatgatatctctaagcttgcatgacccgaagtaatctgtactttcatgagattgattcgtaccttcagagaataaaggcaatcagcctgaacttgcccaattcttttattgtaattatagaaacatattaatttcctatttatttcttatacattaagggaaaccattcctatataatgagcccctataaaattgtaatctcacctcactattgcgggacacgaattgtattagagagaacacttaagagagaaatagtgatctaagagagaattacttaaagatccattgtcagagctttagagagagaatacgttgttctttgtctcataagttaatacaatctacaggggagtggactattaccactatcacagggttgaacctctaaaaattctggtattttttttatttacagttctttgctttctattatttattttatctaatcgctttaattaagactcaatgttcttacctagaagcaaggttaacaatatagtagaccagaaattggaacgaagagaaaagagaacgtgatttttttttttttgagtttttgagtatttgaaggttttgtctcttccttaaatcctaatacatatgaagggtccacgctaccataaataaattattttttttttatttttacattaaattagctttcttccaattatgttactacaagtaatttatttattcctctatgtaaatatttaaattatttttcttgtaagcaatttgtttctcttctttactgaggtccacgtacatgccacaacttttactaatagttattgacattccatggttttaaatattctctctacttcaacatcctcacataatataataaagtgaatattactcatttgtttttataaaagacttattattattatattatttttttaataacaacatctttattctattgaaactatcatattttattgttatctttttatctttctcaagtatttattagtaatctaataaatatttactttcattttttttttatctttttatcttattaattattttt

SEQ ID NO: 111738 - DNA, 9101 bp, Cannabis sativa
  modified_base (1679)..(1679): a, c, t, g, unknown or other
  modified_base (8977)..(9012): a, c, t, g, unknown or other
ccactacacccaatgtaaggtttcctaagctttatatgtgtttatttcgttttcctggaaaacacaagcaatttggtggagtcaaacgtaaatattttgtagctgagttaaattgatcagagaagagtatattttttaatctagagtattggaaggacttatctctcagacataatctcgatgtaatgcatatcgagaaaaatgtgtgtgacagtgtacttggaactctgttaagtatcgagggcaagtctaaggatacaaacaattaaagattagatttggaggaccttaaaattcgtcgtgagttgtggttatttgaagaccgtaacgagaattggaggaaaccccatgctagttacatacttactcttcctcaacgacatgaattttgcgaatttattaagtttgtgcagttcccaaatatattcgcttcaaatttagagaagaatgtcaatgagactgaagacaagatttctggtctgaagtctcacaattgtcatgtgttgatacaacgcttgatgctaaggggcattagaaagcttttcaagaaagaagttagggatacaataattgagctatgtgtatttttccaaatattgtgctataaaacattgaatgttatagacttgcagatcgtgcaaaaaagtatcctggacattttttgcaaattggaaactatttttccactagcattttttgacataatggttcacttggtgatgcatttacctaaagaagcgatgcttgggggactagtgcactttaggtggatgtatccaattgaacgagccatgtctgtgtacaaacaatatgtcaaaaattgatctcgaccagaaggatctatttgtgaagcttatccatttaacgaagccttaaccttttgttcaatgtacttccgggaagttgaaactcgatttaattgtcaagatcaaaacagtgatgtcctcccaaataagcctgaaagggaattctctgtatttaagcatgttgggcgaccaattggtgagaggactattgttgctttaccaatgcaagataaattgaagacagagtggtacattcggaacaattgtaatgaagtggagaattatatcacataagatactttttccacagtcgatttagttatctttagtgacgacgttatctaacatttttctcactttttgtgtagtgagcattggaatgagctacaacttaggggtcatcaaaatcttgacacaattcaagagaatgagtttcctagtttgtttaagtctcgagtaagtattgctttctactaattttgttattaaagtatgctatattaatctagtattaattaattttttttacttaatgatagatcaatcaacttcaagtagataatcctggagaagtatcagatgagttgtacgacatcgcaaatccctctaacctaacatgttattgttatcctggatgtatttttagcggtgataaattcttagtcgaggatcaggatgaaaatcgtaacacccaaaatagttgtagtttagtgcctggagaggatggtaacaatttttatggcgtactcaaacaagtgtctgggacttttaagatgaggatgatgataagacaacgactatacaagaaagaaactttaatcgtctaactagcactgttggatgatgttgaatatgttcgtgatgatgttgacncaattcaagtgaccaacatgggtcgtgaacagtctaaccgtgaagatttagatggcttcatcgttgatagtgacgatgaagacactagtgataatgataataaaaataatgtacctgttaataatgatgatgattatgatgacttgtagactttcaagtattgtaatattagaagccactgctgattaaatgaaatacatgtctcttttgttaacagtatgattaattaattattcgtagcttgtatttgtagaatggctgatgcagcttcaagtggaggtcggaaaaagggagttagggaaaagtataagggaaaaaatattgaacaagaactggccaagcagcctgcaggtcaaaaattgaaatttagattcctatggtgactgtggcccctgtagatgactatgacaacaagtttaacaattacataaagtttcttgttcgcaatactattcccatgaataagtttgagttcgaggacgttgaggaaacagtcattcagactatatgggatagaacagcaataacattctaatttttttatagtacatcaaacaaaagcattaaataaaaaatataatatatatgactttagtattttttttcagaccaagtttgagttgccaactaataatcctatgttcgcggattatgtcaccaaatctatgtcaaaaggattacgtgactggagagcagatacgaagaaggcatggaaggagattattaaaaaatacggggaggaagaagcgaacaagagatcacgtccaaatatagtgacgccagaggtgtgggcagaagttatcgcatactggaaagacccgaaacaacaagtattaattgaaagttgtaatattttttttttctatatacttaatatgtttttctcaattttctaacaataaatataggttaaattacaggcaagggctgaacaaaatgcaaaaaaccgagctaacatgaaagttcaaggttcatgttgatctaagaccatagttggtcacattgtgagcggggtatgatattctcaatatgactataattttgttaataagcaaattttaaataatatttttctaatttccaattttgtttaaaaataggctgatccccagacgggggagcttcctagtgttgtggatacttttgtaaagtttcactgcaaggacaacaaatggtgcgatgagcacacacaacaactacatgtaagtatctttaaatgtttaataaattagatttatattttaaatttctttcactctaacaatttcataaactttttttgcaggccaaaatggtttagattcgtgacactcaaccaacactagccaatgtcctgcgctagtacaatgtcaactccacctaatttcctatagatatgcatgttatgacacaagtattgggtgagtggtcacgccacttaagaggagtgggccagtttccaagacttaggacgggggcaaaaagagaaactcccaggccaagtccattcgggcagcccactgtcactcaagaggagtatgaggcactgaagcgaagggtggaagagcaagaagcacagaatgagtggcaacaatagatgatgatcactcagaatcagatcatgagtgcgttccaacaataaatgatttaattggccagtgccgttctaggatttaacatgccggagatgcttccaattccaccgattccaccatttcagcctcctggccatgcagttggttcctcctcacagactgcccctcccggtgatgatgacaatgacactgtcaatttgtaatttttttttagtttgaggtgtagataatattactgtttatgaatttaaaataattttatttaatttatgacgtttaatatagttttataataacagtataaattttagttttataatatatttaatattatatttaatattattttgatttttaattcaaatttaatttatatatttcatatttatataattttttttaaaaaaattactaatacttttaccgacgcttgaaatgcaccggtaaaagtattattttttatattatataatttttgcatcataactcgtcagcaaaacgtcgttaggggcacatcagctagcggacctgttgccgacgatgaccttatgctggcaaagaaatgcgccggtgtaaatacttttaccggtgcatctactaacctcgctggcaaaagttgttacgttaacgagctattgctggttgcttttgccagcgagaaaaggtgtcggcaaagctgtgatctcttagtcattgtaatactattcggagatgttgctcatgcttattttctgtctaagattacacaaggatatcgtcgataaacactatgacacaattatcgaggaaatccttaaagactctattaatgagatccataaaggctgctagagcatttgtcaatccgaatgacatcaccaaaacttgtaatgaccatacctggtctgaaatgcaatcttcctctagagttgattggataaatcattaatcttgggcaatggatacctattcttgattgtcagcttgtttatttctcggtaatcaatgcgcattagtagggaaccatccttctttttacaaataaaattggagctccccaaggcgatacactgggttagataaatcccaaatccagcatcccttgaagttttatttttagctccttaagttttgttggagccatcttgtatagcgcttttgaaacaggttctactctaggtgccaaaccaattacaaaatatatctctcgctgtggtgacaatctcggtgattccttaggaaatacatcaagaaattcttttacaactctgacattctttggtccaaattttttaggtctgctagagtcaattacaactgctaaaagtcctacaaatccactgtgttaaaattgaaacattcaagattcgagacccctgaatagatccaacataaacaaatggatcttcgccctccagctgaaaagttaccattttttgcctgcaatcaatactggctgaatacttggacaaaaaatccatcctaagtatgatatcaaactctgttagttccaactctactaagttaacactcaactctttattttccaccctaattggcatagacctaattttccttttggagataaccccttccccgctaggcaatagaatcccaaaccctctctcaatgaaatcataaggcctacccaactgattaattactcgcgaaaccacatatgagtgtgtcgccccagagtcatttagtacattaaaataggagttgttgacaagaagctgacatgtcaccacggaaggattggctgcaacatcagcttgagtgatagcaaacacccgagcaggtacggattttgcttcatgcttatgttcttctttcattgcctgaggaaaatcattcttaaaatgccataccatgccacattagaagcatgttttccaattgcactcttcgagatgatatttataacatgggggtaagaataaccctagcatcaacctctaccttagttccctaagaagtgcttgttctgtctcgatccgccagacaccggggtagtctttcttttctggtcagtggtggaatcaccattattcctaccttatctaagagtaggaagagcgggggttctaccaacactaggagtctctcgatgctcctgaagaaatgtcattgcaccttcggctcgtagacccctttcaactatctcggcataagttgttgtttcattagttgtaattaccaaatcttgtccaatctttacatttagacctgccacatacttctctttcttgctgaagtccgtgggcattatacccaaagccaacatggttagacaatcaaacttcattgtgtactccgctactcacatgccatcactctgaaccagatcagtaaattctttttgctttgcactgtggactacctcattataatccttgtcattgaacaaatcccgacactctttccatgtcataatggtgacgtcttaggtgagggacactaactcctatcacacgagtgcgtcttcctggaactaaaaagtgatgcaagtcactcaatcattctcgatgactcccataaaattcaagattctttcaatcatagtgagccactgtacgaacttcataacatatgggcctcccaaaaaaactagagacgcctacttacgaaacctctcatatatggctccatacagttgctagtaacaggttaatccgctggcacaggaacaataacagccagaacttatggtggaggcactgtaggaagaccctactgtcttaacctttgactctcttcatcttgttcgagaatttgatcctgcatttccaccagtctttgctcccaattcagaggagcttcaggtgggttttcatgtcaaccaccctgaaaccttctacggactcagccctgtccatggggattcgggggattttgatctccgtaaactcctccagtctcaactttgttaccctaactcctcaaattttgtgggatgtccatttaataggacttagcctcgaacccataagtcaagtaggtgagattgtgatcccaaaaactttatgtactacactttatggattttaaggcaatgcacttaaacaattaattataaactattatacttcttaacatgcttttctaattataataattactaattaagtaaaggcttattgaatcgtgagtcaagattttctctgacgatgattgttcatgtcctgacaatctttagtagacaaacctagcgtctctcataccaaaattgtaatgccctgatacctaggcgcactacagtgattttctaatttatgtgccacctttgctaatcaaagggttttctttaaaaatctttccaaattaaatttttgatttaaactattaaactttattaacatgtatataaatttacataagtcgggaccccgcgtttaaacttttataatctttatcaaaatacttttacaaacgtgtcgcacaacgactacaaaatatagcccaagtcatcctaagactgaacattccaagtcccactgtctcaacatgtacaatcataccccaagccgaaactcactcctgttcagcctttgccttttcgtttacatacagacggaaataatatttgtgagtcgacaaactcagtaagaaaaacacataataaataatatactaccgacttgtatctaggtgtcaatacacctatccaaaaggcttatcagataagtaagaacgttctttactaaggtacgcccactgcactacatgcactacatacccttactatacaagtgttggtagggtttgcccgtacctgagtacccctaagtgttgtaccacatacactttgtacctattcgtactagtgttggtaacatcatgttgtactctttaaacattgtacattataccaatgcactcagtaccactaccgtactagtgttggtagtgtaagaatcacaaaatagcatgcatatatcacacatacacataatcacatatataccatgttctatgctagtcttaccttgttttcgaattcaagtgtgccggttgacctgaatagaaaattatgcactgaacagagaccctatgtcagaacataaattttataagtgtttactctagaacatttctttaatacccgaaaagaacctagggtttatatactgaactttgtggtgaagggtccttaaaataaaatacatcatttggctctagtttacatatactgtagagctcgttattaactttaaaacagtatatagaacatctgaaatagacaccggaggaaaaagttatggccaaaatacaaaaaatggccttccccaatactgtccagccaaaattctggttggaacagccttgaagcaaccaaaattctggttgtctgagtagatttaacacaaaacttctcaaacattaagctttcaaaaccttcttaaatcttccccaatcaccatcaaactttccagagcaacaatatataacacattaaacatattttaaagctcaaacacaacaattacaccaagaattaaaaagtgtcattgtagagcaagctttgagttcttgaactcaaactttttcgaccacacaattaaacaataacaacaactaaaataggtctaaaacatcaaacctaacctacaaaaaacaactccaatcaaattcttagcaaaacagtgactaactcaacatttcatgcaaaactttaaaacttgggaaaacatattagttctagggctcaccttagcttttacgttccaaaagcttcaagctattccttaaattcccagcaacaatcatcaaagataataggatgaacccttagttctatagctgctagaaggaaatgagggagagaatgctagaaatttggtttttctcttgaattttgtaattgcataaattaaaattaataaagtattgttgtactattcttttaattagaaaaaggctgactgctacctaaagagggaagacacctatcctaccaaaatcaaattccaattctacccttgccttaatgcataaatcaatgaatggcttagaggtaaaatggtccaataccataaccccacctaaactcaatattttaagtatctcattgtttgtcccactaataattaggttctaaatttacccatgtgattctaacagccatccatcacattttctatcgtcgccgagcaaaaattataaaaattgtataattcatatttaacataaataattctcttagagtttaataaaatctccagaattgagaaattcttaactcttatgcccatttctaaaatagggtccacaacaatatataattatacaaattaaaaaatatcaatacttaatgctaattgcctttgctaatccataatataaagatgcagtcattacaagtaagatgttagagcatttttttaatggaaatctatagaagcttctcgacttctagacttagattttatttatctaagaaaaagtttcaactattccataaatgataagaccaaagaaagaattcctaaggattaacagtgagaggtctcaaatatgcttttgtatgcattagaccagacacctgctgttgagtgggagaaatgaattggtatcagattaatcaacgaatagaacatttgaagacaatcaactgaattttaagataaaaaacaaaaactatatgttagttattaagggtggtattttaatactcttagactacactaaattaggtttctagactcatgttaatgctaaaaatgttgggaatattttaccagnnnnnnnnnnnnnnnnnnnnnnnnnnnnnnnnnnnncctaaatatgaattctctaaaaccatgaaataaacacataagggtttaaaaaaaccgtacattgaatgtagcggaatataatgactcct

SEQ ID NO: 111739 - DNA, 4731 bp, Cannabis sativa
atatatagacgaacagcttattaaaaaccgacctactaatttctcggttttccacacaataatcaaacagattaatcaaaatgaggggaattttaaatcaggtaagtaataacagtgtagatttaccatgttgttttcttctggttcttctgaatcataaggaaaatcaaatgggttatttgatttgcgatcggttgtatgtaactgcgtttctccctgttaaaatcagaatggttaaaacccaaaagatgttcagaaatgtgggacaaaagaaaaagaaatcactaagccacaatctatttaccgaaaaacatatagaaaatgctaaagcatgcaggaagtacaaaccgttaaaggaagcattggaggagtatacgatggcccgatctcaagagatgaaataggaccaggaggttcaccgttagaagcagtcctttggataccgtcaaaactggagttctgtaaagaatattttcaataataaaaagggacgaaaaaataatgacgaataaaatttgaaagcagtataaggtttcatgcaaccaacctcggaagctgtaaaggccaaatgctgattagcagttgaagaatgcccatctatgcccactggtggtccgccatcctgtttaaagccctccaaaggttgcagaccaacagtatcttcaaaagcattccataactgtttcaaacactccaaagcataaattaagcataaattacagagtttttcaaacactccaaagcccataaataaaccagtttgttttattgtaacacgtacctgagtgtttgagctatcgggattggtagctgtcacacccggcaaactatcactccatggactagctatattcaaagagctgtgaaaactagaatcttggaatgatggccattgcatgtttgtatcgaaggatgaaaaaagatcaaccttccctagagactcttcactattagagggtataattccagggttaattgtctcggtacttggaacaggagttgtggacgacggaggtgtatcaaatgttgcccatccttcatttttaggggcaggaaactctggtatcttttcattgaagattgttgtagactgtagctgatccgtaacagcaaacaagtccaaagaagttgtcgacgtagttgatgatactaccaatggatgaaacagagctactgatgaaggagctgctggtgcttctggtaactgaaacaagtcaattggtgctgacgaagatactgtttctggtacagatggggacgtgaaaagatccaaattaccagaacttcccataaccgatgatccattaaaggatgcttggtgttggactgttcctgcagcttgttcagagtgtgagccaatatctgttaaacctccagtactaaatgacttatgaggcacaaagttgttttcaattgatccaaaacttcctgtggatctacttctctgaataaaggaatgagcaaacaatattaacaaaaggggcacctaaacaataagatgaaagtatttaatagtaaaagtcaatttcaccaaagctatatacctgcggaaaagaatctactgcttggcgcttaacatcctcactcacaacatctctagaagaatgaaatggcgggctactgaaaccagtatccttctgataagtaggggactgcgtatctgatctaaaactaggggaatgtgtacctgatctaaatggatcccctccactggaaatagaatagtctgaaactcgggaattagagccatcattggcaaatctatcctcgtacatttgctcacttaagcgaccaggactgtagataaagctagacattttcccttcatagcggcctcggtctgatccaggcttcctggtaagcgcggatgcttgttttccataccggcgatcctcatattgatgatcataaggaggactttgagaataagaatgataagaactggcacgtcttgtatcatcttcatgaactccacgattctgcaaaattaaattaagaaaaagaatgaaacatttcaagctcgtatccttggctcaaataagataaatgagattgtattatcttctttatcataaacatattacaatgtaaataaaatactaaatttcctaatagctatctcttgcctgtgtatctcttggaggcttgtcggttgattttcctactgcatactttctatcaacatacacatcttttatgaactgacggactttgtcaacattactgcaaaacataaatatgatataagaaaatctacttatttatgtgaacaacaaatgagggaattgtactttaaagttccgacctgctgtctggaaatcggtgcctctgaaggtcccaatccctcaaatatacttctctagctcgctgaaaagattgaatggctaatcaagagaaaaatagtgactagctgtttctatatagaataataaaatagtgttaattgtaacgaacctgattaccaccattttgaagtgcttcaacttcctgagaagtaaattttgccatcgatacagacttcactcgatgagtaaactctcggctggataaacaaaaatatgaaatttcattacaaaaaaatacatccctaaatgtaatgtctctttaacaaataaatgaacatatctttctactgccaacaagttaagtaaatttttcaatgtatatagaagtttcggatttttattgtagctgataatagcaattgagaaaactgaagaaacaaacttatggtcggcaccaatacttaaaacaaataaatatgaaaatagaaatatcaagagatggtagcatccacgtcttaaaatatcgaaacatcaagagataggattttattctaaaggggatacggctgcagcacttggtgttagtgtggtgagttgctagtaaaagaccacaccgaaattctattaaagggacctttttataagctgaaaaagatactagaaaaatataaagcaaaaattggaatttcaacccatttgaacaaaagttgtgccagaatcagatattaattctcttgtgatggaactcttgcaatagaaaaaataaaggtttttactagtaaggctaaaccgacataacataattgaattcgaagaatcaaatccattttaagatgaaagaaatcacagaatgaatgaaatcacacaatatccctaataggttagagcctcaaaggaaagatgaaacaatccaatgtagtaagaattataaagttaccagtaatataatcttctataataacatcaagaagaagaaaaaagcacagctatgtgggcaagttgagtggtcatatccatggttcgcggtgtgagggtttgatccatcatgagaaactctacaaacacctttaattacagatttaaagtgtttaacaggaacacaaaactaagaaggcgaaaaatacttgatgaaaaggttcaaatgttgaatacgaaaactaaaagaacaatcgttcgcctttatagggcgccatatagggaataaattcataacggtcgactcgagccaagtggccgagtaggaaagaactgtcactaaatttttattctagtaaaatattaacaacataagtgttaagactgccttgccacaattttgattattcaatttttctccctaattactactctaaattcaacatgaacataaagacaactaatgaaatttatcaaatataacaataaaaaataaggtatttaagatgataataataatcaatatcaaacatagaatctaaagtaggtataaaattaaaaacttagaatccaaacaattataatcaaattgattgaatatataaaatcacactcaaatttcaaaatgtaataggacaaacacattttgcaaaaagaccgaaatcaaaatactcactgtatgccactgcatgatatacaaacgaagctccaaaaattcgtacaaacatactgaggaccctgtaacaaataatcacatgaatcaataaaccaattaaaaaaccattcttttgatttttcctcttaattaaacagcttcttaagctttctcgaaacccaaaaagttcccttttttcaaaaaaaaaaaaaaattgagaaaatgagagaaaatcgtataccaggctattacagttgatgcatttacgattaggagggagcttcataagacctctaataatcttctcatttctctcttcttcctttctacttcccatattttcccgagaaaatgaaaaataaaaaatggaacttttccgagaaaaaaaccagaggaagttgtggaaatgagtgattagagtgcgaaactaggagaaattgtgggttagattaaggatttggggattgagatttgggaatgagaatctagggtttatgattgaaatttgaaagaaatgaggaaattaataattaataataataataatattaattcgaatcagctcgattggacagtcagaacgacccatgcctttcaattttttttttaaaaaaatttattattatttttttttaatttaatttgatttattattataattatggttttctatttttgataagtacttctaacggataactttattggaagttcaaatcaaaaattgaaatataattaaagaaatataataattatattcaatagttcaaatacttttagggcccatttggtacgcaggattggactgaattggactgaaaaggattggactggactgaacaagattggattatgctgaaagtaatcctgtgtttg

SEQ ID NO: 111740 - DNA, 4841 bp, Cannabis sativa
tactagtattttataaaaatacagtatttttgaaaacttttccgtgtgacagtatttttgtaaaaaataacctaaattccaatatttttataaatttttcataaaagaatatgtacatatcggcatcggttaccctcctaaagtgcatgatagaattttacctattttattatttacttttgttaaaagttagaatgattactgtagttttgaaggctttttagaccaaatttgatgggccaagttgggtttttcagcccaggctcggaaagcccagcttaattggagtgggttgggtttgatgagcgcatactccacgtgccgtttggtgcagcaaccagcaaatagggtgggaacgaacccggacaaagttggccttaattcattgattgataaaataataataattaaataaataataaataatcggcaaagtccattttgccactaaaatgaaaaccctcttgtcttctctttagttttcttttctcactttctctctctaaaaagataacaaaagaatagaaaaaggaaagaaaaaaaaggcttttattggcctcctactcagacgagtccaccacctattccttgaaaattcccaattccgattcctcccgcatttttctttctttcttcctttcttcggcaggtaatctaaatctctaatccccaattcactttgtttctttcaatttcattgtttttaatatgatttattccggaggattgaaatttttatatttatatatattaatagaaaatcgaattgatcgtttcgtgtttctaaatttccgaaattgttcttcactgtctaggttttccttttttagatattgagttttatttctatatatgatattatctttatcggactccttatatgtatgtatgtatgccttgtatatatatacgtctttactctttatgtgaagtggttgttagagctagtgaaaattaacctgaaagagcttataattctatggctcgattgcttctaaattgtgtgctggaaatgaagctacaattatgaatcgttataggttataaatttattattactttgattcatctcatgatgactggtgattttatgatgatattaagggattatggttttactcgaatttggattttgtttgcaattctcgtaccaatattttaaattcgtgttgccttttactcaaaacggctgtttcagatttgctagttttgctgggttttctgtaatacgctgtcagtggctgcttcagattataaaatttggttgatgtgtgtgtgtgtgtgttgagattaaattcacctttcatatcaattatttaataatatatagttatatttgtgtacatattgtcaaattttagtttttgtagatttcgtatatgataaaccttttaggagtgaagactcattgttgtttatttgcagaagctcttgtggtgtcttacttgattgagaatttgcttcgaaaaagtgcagattttttcaaggatattctattgctgtcttatattataaagtttcaattggcctatcttagtgattttttgacggaatttgttcgaattattttcttctttcttgtgctgaagaggacatgctgcatgatcaagtgacaaaagttttagttgcgaagcagagataagtaaaagaaaatgggaggttgttgctgttgttcctctaaaggaactgaactcactagtgcacctacatactattatgtcagtataatacttcgcttggattagatgactgcctttctttatcttgtttgtgtcattcagataatttgatctcatgatcaattcaaaatgattatgcattaccattatcatcaattcattcaatttgaatctttatacagtatccaaggacatcagaagagcacttgcctttgtcatcacatcgtaacccgacatctacactctctactggtctcttggtggatactaatttggatacatccagcccagatacttacagaccacctcctgcaccagttccatatgatgtgcctcttggacgctctaattccccaccaggtgctcaagaaatttgtagtgataagaatggagcagtggcacagtcaacaaactcggattctttccaagaagcagctggtggaaatgggcaggatcgttctcccaagtgtgaagacttgaaagattcagacggcaaggcgcaaagtgtttttgaagttgagacagcaaaggacttggaagttgaactttcaaaatcagtggaatctgttgttttgacagctgaggaagaagatggttgtccaatctgtttggagggtaaactgcatactgatttcttttcctgctaaaaccctgcaacttttttttctatcttaatctatgatgcgtctttctatctgtgaataatactcagattttagttaatcagagatatatcatttttttctgttttttcttctacattgcagagtatgacaaagagaatccaaaacttaacacaaaatgcgagcatcattttcacctcgcatgcattctggaatggatggaaagaagtgagacctgtcctgtgtgtgatcaggttagccataccatgttgttttgaatagcaaatgacaaatgtataaggtgataaatccagtgatctccataatgctcattagaggatctgttttctttctgatgcaggaaatgatatttgatcctcctattgattcctagcggtgaacagcatataaataagtcaacttcatttctcgaaggtcttacactttctttttatgtacgcatttagaagtggcagccacatacatggttattgattggttttgttggtcagatcactgtgcattcatttctttttaactttgaagcagaaaaaaaatgacaaggcaacaaaagaagttagggtattttttcggggggtctttgtttttgttttttggtgggtaggagggaggaaatgggaaattttgagaaaggcgtgaggccattcttgagtttcattttctattaagtcatagttattgtccaaagtgaaaggtttagttgttcaagcatataggaggtgaaaactgaaaagtgaaaaaccatatcttcttcttttttcaatatatgttttctcttaatgtgggtatagtgttttgtgagtctgtttggatactagtgttttttttttttttggcttcttgcttgaattggttggtcctgtaaatggcatatagtttacacagtgggttctttgaaggtgggtagagattttgatgagagtattggaaaatgaaaggttggtatgataaagtacattggctgtattttcagattattgatgtaaatatgtcttgttcttcttgtttttttgtttcattgtttttgtttctctcccttacctctttcgtggggtgcaaatcacatgaaaaatgtctcaatgttaaaccttgtgatttcactataattaagttggaaagccaattacttcacaaaatggtttcaaagaagataaaaaattgaatgaaaataactcagtaaacaatcaacaactaagaatcaagctagagtcgctaatgtgggcaagcactgcaggtgtaattttgggcagagatgaacaaggtaaagataattattatcttttatattaccttttgtatcttttgcattgagtagtcacccaaggcttatatatttattataatcattgattatattcttttgtttaggttaatttttttttaattaaattaattaatttttaaatttaaatatttaacaaaaaatttttagcaattaatatttataagtaattttatttttatatttaaatttttattataatttttttgaatctaattatttttttcaacaaatgtttgctcatctttattctttataaaaaaaaatctaatttcaaaaattagaattttagtttgatctaagttaacattgcaatttcttatatttctgtcacaaactcatttttttaatttactaactacatttagattagatatctctttgatttttagtgatttgcttgctatttttttattattaagcttatttgtgaaaaaagtaacaacaatctcagttataatgatagtctactttggttcggtaatttgtttgtacaatctctaggttgatgttctactttgatttttagtgatttgccaactatttttttactattatgcttatgtgtgaaaaagaagtaacaatcttagttataataataattattacaatctctagattgatgaagatttaaatgaagaacaaaactaattaactaatatttaatttttttaaaaaataatttgaattaatttgggactgacaaattgatttaaaggtatttttaataagaaaattgggtgtaaaattatttctatttagaagtcatttttactatattttattaaataaggttgtgcatgtaataattttaaattataaggagttttgctataaatattttaattatttaagttcaataaaaattaattgttaaaatatttgtacttaataaattgcataaaattaattggtaattattagtaattttattttaaatataattaattttaatttaatttttataagaaaataaaatattatgttaaaagttatttattatttatttttattttaatttttaaattaatcgtaatcatctagtagtgatttaatgattaaaagtaaacataatcataataattacatattttatataactaagggtaaataacagcataagtactcaaagttttatatttgtaagcagtgtaaacccaatgtttatttttagcggcataagtacctaatgtttgtaaaactgtaattttcttctagttttgtcagtacagattc

SEQ ID NO: 111741 - DNA, 3273 bp, Cannabis sativa
  modified_base (147)..(155): a, c, t, g, unknown or other
  modified_base (535)..(548): a, c, t, g, unknown or other
tgcactaccatgttcccaagatgtaagtattgggaagattcacttggtcaattttaacaaacaattaaaagaacatgaataatacatttaagcccgaacctaaccatctcaggattaagatatattgacctaagatcaactaagtgnnnnnnnnntagaaagatataacgacaagtttatgatatcatatctaatgtcaatatcggtccagttcgatgtatactctatacatccgatactaacatactttgccaaatgctctagaaaacacataccacttatctaaggtgtaagtaaattttatcgctgattatcatgtcaatataaattcagtgtactaataaatcatgaaactaaactttaaaacatataattatgattatattccactacgtagacaacactataatcatgaataactatatattctgagtttaatataatttatacattaaacatacaatcatgaaagtaatcatattcaccatgcaacagaaaataatttatgatattttattaattagtaaatctaatnnnnnnnnnnnnnnttttatttagggtataaaatcctaataaactttcacttgcactaatataaaactaaaagtatattttaattagtctcaacaccttgaaatctaaatcaagtgtagtatgtagtattatctatgtaatagaatctgacaggttgtattcaatatcaaccttctccaccgttacatctccttagtcataaaatccttcatattataaaattcatttctatatgtctactcctcttagggtattagattctttattgtttggtagctatatctatgttatcaagatgtaacactagtagttaattcatgactgaataatgccaaaaactgtatagaattttggacagactgaataattatctagcagccttctgggccattttaacattctttcactagtagagttagagacttcagataggtttttacacttctctaaaaatcactgctccacccctagagtaatcaccatctcataagtagactttctagcattagcacaagtctagaaactaatttggtgcagtttaagagtactaaaataccactcttattgactaacatatattttctcttttgattttaagatttatttgattgtctttcaatgtctttcctggattaaactgatactcataactcccactcaacactaggtgtctggtctaatacataccagagcatacatgagacctctcactattgatgcttaagattttttttttcatgacttaccttttttgaaatggttgaaactattccttagatacactctatgtctaggagccaaaaggcttcctttagagttagccattagaaaaatgctctttcatcttactaaagtaagttgcttgcactacaggaagtaaattaccaggtataccacaagtcataggtttagataattttaaacctatgatactaggatcaggaagttttgttaagtccaatgaatagacttattattgaaatttcctgtcttctccttgtaatagaaaactttggttgctccatagaaatagttttaaccatagttctcttgtccttgtgtggaaggccgtaacaacatacgatgtgtttgacgatgaaatctaaggccttttttgaggtaatcatgttcataggctctacttcaacccacttagtgaagtagtcaacgacaacaatgacatgtttcactcgtccttttccagttggaagagcctaccaaatcgattccccaaatagcaaatgaccaaggaatgttcattagagcgatatttagttggtggagttcgcggaactttggtgtagtgctgggattgcttacactttaggatttaatcaatgcaatctttttcataattggccaaaaatatcctttttagataattttctttgagaagttgggtctgaaagtgtggtcttcgcggaaaccttcatggatctcatggataatagtgctaatctctattctggcaatacacttcaagtatggaactgacaatcctttacgataccatcgtccatccagaataacataccttggagcctgctattgaatttttttagcagtagtcttgtttgtcgatagctctccagagttgataaattggtaaatctgacctatccatgagttggagtggttaatgacacttactcccagcactctggtactcaagacttccacatatatgtaatcggcactactctgtataattcgatttctaaatcatttgctaactttgctaatatattcgtgaaggtattctgatccttagggacatggtagatattgtatctcttaaagttttacagcaacactctcgattgagacacgtaagcatccatattttcaactttggcctggtactctccgaataatttatttaccactagttgggagtcactatgcactttgatattttgggcccctacttcttttgccaggtagagatcaataatcatttattcatgttccgctttattgttagaggctgagaatttgaaacaaggcgctttagagttgatgcccttgtggagaaattaagattacctccgctccaacacccttttcattcgacgctccatcaatgtagactttccaaatatctagttttggaactggctcttttggattgttagtcattccagtgcattccacaataaaatctgccaaggcataccccttgatgggaactctgggctgataatgaaagtcaaattggctaagttccatagcccactttaacagtcttctagaagactccaatttttgcagctcttggaaaagagggtgattcgtcaataccttgatggtatgggcctgaaagtatgctcttagccttttcaaggcgattagaaagcactaataaagtttctcaataatgggatatctagactctgcgcctagcaatcgcttggttacataatacactggaagttgtacatttccgtcctctcacactaaagcaacacttatggcatggttgctgggtggttggctaaaggttgcatcagacgaaggtttcaatcagatgaaataactattagcaaaatatttaggcaactgtaatgcaattgtaatacaactattgtgaaacattaaaaatcagaacaatattttcatgtacgtaactctatctacatgtctcttaatgatttaatataaatagattaaaaatttggaaaacaacaaaaatacatcaggataaatattttactatattattgatgtaattttttttgg

SEQ ID NO: 111742 - DNA, 2551 bp, Cannabis sativa
tagttacaatagaccagaacttgagttgtgatatgtcatctgatcattgattgatttatagagcaatttcagtactgaatgaaagagatttctttgttctaatcactcttttacaagttgttttagagacatatacatagtaagatcaagaaaaaaaaaatatatatatcaaaataaaaaaaggagacccttttatcaggaaatatcaggctaattattgagcaagcaagatcagaccattataccctttgaagtaattttctccatcttgcaaagaattctagcaaaaatagcttttttttgttggttgggagggaccattggaatcggataagcttcttgatagacttactcatcaacctattagcatcagaacaaaaacagtgctgtcatttcaaaactatgtgatggtgacaaacaattacagctatgaaatttttctaactaaaaaagatataagaaaatgagtagcaacagaacacctttttactagtttatgcacacatatatactattatcaagaggagaaaatgagtattatcttgtatctattaacagataatgtttaaccaaaatagagaagcaacacaaggattttcatggggccaaagtgtcaaacttgtttcagaatcatactttaagtaaaggcaatgtagatagacagaaacagctattattaagtgctatagaatcccaccaagtagggacagtgtcctaacaacaattcttgaaatgggaattctttctttatgaatttacttacccatcttgccagttaaagctccattagttggaattccagaatttgaaggtgcagtattaatcccctgctgctgtgctattgattgagtctgttgtaatgtttgtggattaaatctgaacaagttcataggctgcagaaccagaatttccaatcttcttttcatttagtataataatattaacaataattaacataactaaaaatgaaatgctatgaatatgacatacctgagaaacagtttgcataggatggaaccccatgtaacgtgcgtattgctcttgaaaagaggcgttttgcatctggttttggtaattgatggggttaaaagctggggtttgacacaaaacagattggtctgtagtttgaggcccaatcatggattgatcaaccactgggacccttggcaaatgcattgggttgtgaatggaaggcaaggaaggtggacccattgccatgcccaaccgcgacatgtagtgctgtactcctggaaacatcattggtgccatgccacttcccatccacattaccttaggaaatcaacacaaaaaagaaagtgttattgattttgagtgttacaaaaaagtttaataaggtcagttagtgttgtaagaacttatgtgattttttttcttacttggagttgtaattgaagtgacttcaagtattcaatagcttcatccaacattgatgctttatctgtctgcaaaagaagaaccatatttcattcattgaaacagtaagtacatgattaatatgatattatgaatacaaaaacaactattattgggaaaaaatgaatggtttaaaaaagcttatttgatttgatttgatttctgtttaatcatacagctatgatgtaaatcattttgttggcaattgagaaatcatatttgtctgtaactggtttggcccattacatgaattagcctagaaatttctttgatatccctttctaatatcagcatcagaacttttgtaatcattggtgtttaactgtacagataggttgacttaaaagaatatcatctttaatcatgtttaccattagcactatcaatactttctcttgttcaaatcccttttatgaggtatgagctcttattatgtatttaaactcaagaacaaaacttactaagaaaaattggaaagctatgtatattaatttaatgaagtaagaattagacatagtaagtaataaaccttgttactatgaggtatgagctcttgtagcgccttcatcttctcatttattcgatctctacgtctctacatgatgaaaaataatacaaaaaaatataaatagtttaaaatacacaattaaatgaatcaaaaaccccctaaaaacgttggaattatgttaaaatcctaccctttctgaaagattatgaacttcagcagctctgctctttcgggatgaaccagatcgttgggaagatttatttgcagcagcagattcatgttcagcagcctaaaaaacccatgtcaccaacacatttattatccacgatcataacataaaaacagacaataatacataagtgaaagaagaagataaattttgtattacatcactttggcactctatttcctctgcatctctattctttcttttgttattgttattgttattggcactggttgtagcagtagattgcttgcaagttcttccaaaactgcttccagatccaccagaagatgaagtaagagttggctcaagagtctcagccttcccactctcactagtcctagtcctaggcaagattttctgaacatcatccttaaaagctc

SEQ ID NO: 111743 - DNA, 1359 bp, Cannabis sativa
aattaagtaaatattgtcctattttaccaatataaggtattttaggtttaaggaaaaaaatttcccttaatgtaaggataaaaaatcaaatttcccattctaaacaactgccaaattatttttctattttgctcttaattttactcttactcatctagcaaactagactttgccgcctttcataatatacaaaacttcattttatgcccaattttattttattttccttagagcaaaattaattagctcattgaaaattaatctgttttcacaatagcttttgttcaacaaaaagattaacctcacccaatgtcaactccctaacggtgacaaaagtagatctcgacccagacaagaaagtggcttaccagtgctcgaaagaaccaccactttgagcatcctggtacatccacatataattaatggcccaaggactaaccatattatccgtcaaaaacttgtgatcatgaacaaaagtataacacctttgccaaataggccaaagtaaaaaactactccaaatcctttttgctccaaatatgcatgtaacccaatagaagctcataaaagcaagaagcaatttttagagaatcaagacctttaacaactcattcaaaacaaattaacttaagcgaagaacataactaaagcgcatgaatggtagtctcattgttctgaaaataaataggacaaaccttgcaaacatgaagaccatgacaggtcaaattgtcataggtcgataagaaatttaaactttctttctaagaatttttttttttaatttttggtggaagattgaggcccccaaacaaaacaaactcataacataagtagaaattgcttggatgatatatttttaaaggacctcctgcccccagaggagaaaagcttagacttccacccaaaagcttgttccatatcttatactttatcgattgaaaatgaccactcttgctttttcccgtaaaataatgcgaaccaagctatttatcatgtcaggaaacatgagggacccccaaaatacgagccaaaaaattacaaaaatccattggcatactagcagagaagcaaaccgctaaattatgcaaatctattagctaacccaaagcattttcatcatcaaaagaatttctataaaacgagtacaactaaccattgaagcttcaaggaagaaaaaattatcattcgcaaataaaagatgagaaatcataggactcctcctttcgcacgagagccctgaaatagtgcccagaccaactaggggtgttcataaaatagccgatccaatccaattcacatgatccaatccaatccaatccgcaaagtgcggataccctcacttgtgcagattggatgttg

SEQ ID NO: 111744 - DNA, 3116 bp, Cannabis sativa
aaggtagttagggtgttacatttgtggtggacaacctatcctcaaaatgcccatcagtcatcctttcgtcctagttgacagaatcactagattggtttcttcgccccttggacttcggtactttcgtacttttccattttggcatggttttgcctctcgaagtagaagggcatccaggctcaaaagaactggtggccttctgtgtccccgagggctaaccgatcatattcatgtctctccgaggaggtttaggagaagacttctatggaggctaacccaccttgcctttaccttcctccttgtgaggattcgaggttttagcctcagtttgcccatgagcatgctcttcagcaattactttcaccgaagggtcattgtcgaactccaccaagtcgtcaaccttattttgacacgctcaattattttcttcattttctcagtgagttttctctattctactaacttcatcttagtagcctctagttctttagtcccttgcaacaagtttgggtcatgctcatagtactaacaatctttgtaatgcatgtccttcacgtagctatcgctgtcgtcctcctcttccctatcttcaagatttcggtcatcatcgatggaatcaaacaagttctcagcatactttcttcggttttcggcattggtagcactcttttcttttacaccatctggttggagactagaggtaggggagtccacctcctccatgacagtgtcagaggggttttcttgcttatgttctttcaagtaaacaccatggttgaggtggtgcagcgaccagcaatctttcctcatctctcaatgaaagcaccaaaatatttaccgtaatttgtagaaactaataaaatggaccttaagaaagaaataaaataataaataatagataggtaatttttacatggtttaggagttaataatccctagtctacgagtcgttatattggccttatagggaagtgtttacaatataaaccctagctctgcactccttccatttctcttattaaagaggaaagctagtagaaattttagcattggttcagacagtatcaatttcttcaccctttgtacatagaaaatgaaggtatttacaggcatacatgtgggtaagggcatacccttcacccacctagggtttcatacttaacatgttgcatgggctgatactacgacatgacaatctaacaattggttggtaaaaacttctctatcatgtggtgtacggctacaatgaaggatttcatgcgaaataagacacgtgtcgctcaaagattttaccttgtaaatttgtttttcagagaagttgtttggcaaaaaagaggtttcagaggcacgtacgcgcactaccatggtctgacacaggggacaagatctaattttgtatcagaatttactaccagaagataggtagtcgtcgctttgtgctccagataggatactattaaataggctccatgatcattgagccaagtccttctcggatcacactaacctgctaccttcctggaatactcatagctttgaatgactctaatcctccctagttgtggatgaccggttagagtcttggagccccatccttactcactagcatcggggatccttgactgccttccaaaatatagtaccctccataacgtcattaagcaaaaagtacatactgattgcagatagtctaaggtgacacccttccgtgattgtcacacagtaagcatctgagaacacagataacagatgtaattaaagataattatatagtttatatacatcaaagtaaagaagatgaatttcaccgttttatgtgttattttaaattaaatataacatttttatcaaattatttgaaataataatgactcgtcatctaattaatgtcaagtcaacataataattaaagattaaaaattaaaaaatatgtagataactcacaaaataaaaaatctataaaagcataacaaaaaatcttcaaaactcttataaacctaacataatacttgaactttcatgtttgtcatatgatttaatttgttatgaccacttaaaattttattataaccagcaagaaggaacaacgaaaaaatagcaattatttaatatatatatatatatacatatatattgttaataaattttataaactgcccaaactaaaccgaataaactaacaaaaaatacaacctgaaataatacactgaaaattcaaactgcccaatgaatatattgagtggtttaaaaaatattttaaaccgcgctcaattaagccgaataaactgaattaaacccatttatatattttatagtaaaagtgtatacattaatatattacataaataatatttattagttaaactattttgtatttaaagtttggatataagagcgtttaagttaaaatttataattaataatttttacatgtatttggatattgaagttgaagtttaaaatatacactatattattactctttttattattttattcaattattttatgtttactcaattatatatatttatcttatattaatgttcacaaaatataatttagactatagcattttttagcttgaaatataaataatatatttttgtttttttttaaatctaattatttgaatacttgaaagtaacaataataattataaaaaaaaaaaaatatcagtttggactggttaacccgaccaaaccgacaaaattattgggagggttgaactttttttaatttttaattgagcgggttacaattaaatatttacaccctgatatttatattggattagtaaagatatactataagccgaccaaaccgaccgatacaccctaataactaattacttttatgaaactcatatatatttatcaagtccaatgactctagattaaaatcataaataaatataacaatatatatatttacaaaaagacacattagtcttaaattaaaggtttttttacacaaaatgacaaatttgacaaattatttacattttaatgcaacatgttattttttacttttatacaatttaactttttcatttatgcctttttaagttttttaaaattacaattatacgaaacctctttttcctctatctttta

SEQ ID NO: 111745 - DNA, 2982 bp, Cannabis sativa
tttttttttttgagaaaaactaataatgttatatttattttttaacagattctatttaattataatgagtaataatattaatataggtacgtatgtattttgaaaatgagagtctaaaaaattagaagtttataaaaatagcatcaattctatacgagattttaagaaaatacgaatcttaatttttattatttttttagtgccactattgattattttgggaaacaaaagattttatatttgttgattatcataatttataactaaatatgtatttgggttagatgatgatacgatttagataggaaacgatcatttttctgatattatttgaatttttcattgataacggggagttaaattttaatattataataatatggtatcagagctaaaaaaaaatctaacaaatatcttatatatatatatatatcaaaaaatcgatccaaaatagttacttttgatttaggaatagtcaaaaatcatcatttgtgatcgaaccatctaaaattagtaataaaaatattcagattgttacaaactttcacattaataatatcataatctacttcacacatatacttctttccatatagctcaccttactttactttctaaataatttcacattttaatcaatgttttatctaatgtttaatttttttaatagatacatatatttaaattaaaaacaaaaaaaaaaaatatctatcttattaaataacatttataaatatttgtataaattaatattggatcttatttattttgatttaataaataatataaaaaattgctaactattgataacgcgccacatcaatgtggtaagatgcccaataacaatcctcttctcccatttcttttccaatgtggggtcgggcttgggatgacactccctcttctgcattgtctctgtttatattttttattttattatttgtatacatattgtaaatattatttttatatataatttataaattatacaatgtattttaaatcttatgtgtttattgtgtgtgttatggtagcaataatgcatgtgagcagttcatgtctcaccacatacctaggaaatcttctcaaactagatcaccgttgctctgtgtacgtatcttggtgattttctttttgtagccatagctgtaaatacatgtgagttgtactagcttggcttatatttttcgagctttttaaaatacaagttgtattgtattaggccataaaaaaatatggttcatgtcgtgttgtgccataaaaaatataggcggtattgtgttgtgcaataattttataaggtaggctcgcatgatttgtaagtccagtaatttcgtgccgtgctcaaatttgtgtcgtattttattcgtatttcaattataattgatgagctaaaatactaaaatataagtgaattttatggtttcaattatttttgttggaacttacttaaaagtttacaaaaatatataaaaaatggagtgtgtgatagtgttttgagttgtgatagaaatgtacacttccttgaaagtgtatataaagtgtaatcttgagatttgagttcggaccctaagggttattcagttttgtgtgcatcggtgaggactcacacaccggaccatcacacatgccatcgccgctgtctgaccgtgccgagctgagcttagctggtgggttggttgtgatgtcactttattttttacaaaaaaaatatttaattaaataaatatttttatttattaattaattatttttatgatgttattatgaagcagtaaaagcgatcacattactgttttattttggatcgactttttatataagtcgtatcagaacaacagaatagaagaatacacctcttcaacccaaaacattcatttctcttcaaaatctatacaatttctcaaagcaaacattttttacgtgttacaaagcgatatcgttcggtacagaacaaatcgtatacagatgttgttttattttggggacgctttggttaatagactgtcgtgcacacttcgagtagggccgagaaacatgttaaagagagggacatagtctgtgacccagccagaatcatcattcggtaattcgttccagctttattttttaattctggtatattaacttttatatcttttttcaataatagtcgtacacactcataagtattataatttaaatattactatcattttaattgataaataaatatttatcattgttattattattcaattattaagccttttaatgtgtcatgtttttgaattaatctattcgttcttacgtatcgtacttttgggtgtgtcgtatcgtgtcgtgcttaaactcatattttttgtatcgtatcgtgcctaagctcatattttattatatatgtcgtgttgtgttatgcctaattaagcacatatttttttgtgctgaccgtgcttgtgtctctcaattcgtgctagtttcgtatcgtgtgaaaaaaacctcactcatatttatttacaacattaaagaagactagaagtaatataaataaaaatagaataaaagataagtttctttcagtttgattattaaaaaacaaatcattattactcacatataaattacatgcggggaccaaataagatgtactaaaaccatatataattttttttttacaattcaattgaaattcatgtacagaaacaataataacaaatgtaaattgctaaaaaagaagaactcatatatcatatatgtagggtaattttcactaattttttcaaatatattttgtaagaaaggtcaccttaacatgggaaaaatatacaaagaaaattacataaatgcggatatgaaattttttttataacaattttacggatttaaaatcgtcatttcaatgcttttcaaaaaaaaaaaaaaaaaaaactcttctttcaaaaaatacgaactattactttttacggactttttcatttttacaatttaaaacagttttttttt

SEQ ID NO: 111746 - DNA, 4491 bp, Cannabis sativa
  modified_base (4436)..(4443): a, c, t, g, unknown or other
agccacatagttgacataattatgatcttcattccattgtccattgctctttatgagtactggtagacgttccattacctgtcattgttccatatattacatttatgtgtctggtttcatattaaaacaacagtaaaacaatagtacaataatagtaaaacaaccaaacaaaattacaaaaattatttattattagttttttttatgctatttttctgatacatataattagaaatgtttctgtattaataacgacaaaacaacattataacagccctaattttttgaatgaacaattgtagtagtttctcaagtatatttaccaatcattttgtgttagaaacggaaaattaacaatagaacaaccctcatttatcaattcgcatcataaattaaacaacatcacattaatttttttttcgttttttttaaacttcagatctaaatctgggtttgattttttttttttttggtagttttttaagaattaaactaatttgggttttgttgtgtttgcctctactttttgggaaaaaatcttctgtaattcttgttgttcgttcttcgattatccttagatttagcaaaagcccttcgccgaatttaatgattttttcttagttatctccgactccgacccgttcccaaccacaaaggagttcccgtttttttgtgttttttttactgttcacagtataaaagttaagttattgggcttgggcagtataaaagaaaagaaaacgggcttggacagtaaaaaagttatatttcccatgttccagtatatttgtaaaattttggtgaaaaagcagtatatatgtaaattccctacctaaaaccctacctaaaaccaactcggctcgtttttttaacaactctaaagtggcttttggctgaaaggaacaaaaacataaaaataagaatgaaaataaaatttaaataaaaaaaatggtaaaaaaatcattaaattctttctcatattacattagaatgatctttcctttcatttcaaaataaaataaccattctaccaaaatgataaaaagaacattctattaaaatgatattctaatattttaaaatactaccaaacaaataaatagaatgaaaattatttcctttccattccattacattaccaaatgctccctatgttcatccctccatttataatgatcacctcaacaaacataaatcctgcaaacttgtatttttttttttttttttgagataacctgcaaacttgtattgaatacagttatattttcaaggaaaataaacatttttccttccaaagcaaaaacgccttctcttacacaaaaaatggagaattttttcacggcaattatttctggaataaaatattaaaatgaaccattatggtcataagactccaatgttcaaagggctgaaaactaaaacattctcagactgagatcccatagttgctaatctttgtgacctccttcgtcaaagcgtttctttctcgtttagcctcagaagcaagattcgaaacctagcagaaagttaagagtttaatttgacaacttccggcatagagaatacatttccagaaaaattccagactgtacaatgaattaaacaagcggtctactcgaataacgtaacatccaaattcatgatctggatgtgaatgagatgaactacttaggcaacactacaagagaaaagaaaacagaactaccccctacaccactatagtactgtaagagggcaataattatagggaacatctggcagtctatcagatgagatcaagagaacaaaatataaatttccaaacaaaagaaaaatgtatgatgaacttctatgaaagtaattccctaaactgtttataatcaagactcttaacttctcaaacacggtacagtagattatgaaaagaaattacaaacttaaataagaacttacttgtgaccggaattgagatgcttctcttctaggaagttcactaagcatatccttcaagcctgatacaagaatatataaaaaaggtagacgaaaagaccaaatgtaagacaaaactcctgttgactcaagtttaattttgcacatggcataacaactatgacatatcataatgcataccaccagcctgtctttcaatcttataagctgaactaatcacgccttggatttgcttccccgcctgtctgtaattgaaaactattaggtcgaactggatatcaatgacacaagctgcagtgaactctttaattgttcttggattataaaagcaaacctaagctttgtccttcctcgtttcaattcctcttctgcttgttttgctcccttctgaaagtgtttcttaataacatgagttgtatccttaggaatgtaatgtccactcatatagaagtataaaatgctacactaaaattttcaacacaccaaatgatatttgcttctggtcaaatgcagtcaaatccattgtgattctccttttttttcccctcctaaggtaaattatgagtctagtagaaatataaacatgaaaacagttgcatgaaaattgaaataatcttgtttgaccaccaaaaaaaaaaaatttaaataatctacactcctcaatgtaaatcctgatactttactacatatttgtactattacgaccttcaaaacataattgtctaagtggaaaaagacagtgttagaaaactgctttctcccgctaaaatagaaaagagaaaaaaagtaatcttaaaaaaacaaaaggctgcaaaaaaattgaagtttaatttattatacatcaatcaaaactaacatgaaattaaaaaagttacctccaacttctcactttccgtctttataacatccagtgattgtcgcagtgcccttacttttccttcagccctggtaattaaggtctgcaagcaaacaaatgctaaactaagtgcagtgttgaattttgtgcttcaacataaccagttaaaattgtgacataacacttccactgtttcacaatcattagaaaagccagagagaaatggtaatgaagctctcaaattccgtacctcttcactgagaaacaagcgcagggccttgtggtacaaaacgcgccgtggttctggacaggaattaaattttgttagcaatacccataacaatagtgcctgcagtatcggccatttagcccacttccctccacatttcatcaagtagttaactttacaacatctgaatatcacaagttcacaacataaactatcacctagcttaatgaagatcatggtactatgacattgtgtaacacctaaaagaacacagttataacattgacaagtttactgtagaaattaaatcatacttttcagtacaagaacacccaaaccagtagcaactccgcctgtaagaagtggatttgaggctgaaacgataacaccctctgcaccaaaacagtagcataaataaacatttatatgtgttgtctcaaatttcaactcgagtacacaaacacgaataagctaatacaagcgaaaaaagtgacctttaatcttcccgaatataatattctcgtaagcaccacactcggatttaacatcttgtaaagagtcctacatccagagtttcaactcaagtaactacaaatgaatcgttaatcaaaacaaaacaggacccttggtttcagtttctcttacaaactcttaattagatattataatgcagaaactatttagtccgctttaattttttcgggaatcaatcaacctaatgccaatggtaacaaacaaattcgaaatgagaattgaggaaaaaattcgaatttaccagagtttgataaaaatgagcagaagaagtggatagaatctgggaaaggcgagacctggatgcttcaacggcggaatcgaaggtctcctctacggtcttctggtaaagccgaccttgctcaattgcatagtccacccatggcttagcggactgccctagaattcgggtattgtaggttgcgggctgctcagggagtgaaaccgttggctttgcctccgacatggcttctggaactgtagccattggaaaatcttgatttattccttctaacttcttcccccttcctcgctcgctgtcactggaagaatgaaaagctgaaatgaattcgtgttggaccccgtctgtgttgattgtcacttgggctggatcaaaatgtaaatggcagccttttgggccgcgagctaactggtagagctttcttcattcacggatagagggaaattttacaaaaatgtctcttcctttctaataattttttaatcagttttcactactaatatttttttaaacgtttttctcttaatcaatattttgaactctaacgaaaaccggacccaaatctctccacggccctcgtgccaaacacgaccttttgaaccgaatccaaattcgatctcgaacctaaacccgacttaaataaaataaannnnnnnnaaataaaaataaattttacagaacatatttttattttttgtttttaaa

SEQ ID NO: 111747 - DNA, 2280 bp, Cannabis sativa
taaataagttagagggtaaaggttcaaatcccactaactacactttatattttcttttaaaatttatttatgccccccctcactttaaattttgggcgccactggccctagctatagagtagtacaaacaaaatgaagatttcaattttattattgctttgtttcactttaatgcctttgacagcatatggatttacaattgacttcagttgtatgcaacattttatatttccaaccatgtacttttcaggttctcaatatgcaattttgggggtcttcaataagcaacaattgttgtgacaaaatttccgaattcgccaagaatggttgccctcctccacttccttacaacttgtttctccaaggtcggagccaatgcattaggctttcaactccaccgcctcctccaccgtcgccctgtgtcaacagtactgatgtacctcgtgacacgaacaattgcaacatatttccatgctttcaagagattgcaagtttctacgtaaaaaaatgtcccaagattagctcgcagtgttgtgagtttgttcctagggttttggataagtgtcccaataaaaagaacaaattaacactcgaggtctataagtattgtaaaaaccctaagaaccaaaccgatcattaataatcattttagttattagtgttaaaattatttagtttatgttggtgtcttttaataatttggtcatcatattatgttaataaataattattgcttgttattactcaaaatgttaatttctttgctctatgattcttcttcaatcaataagggatcgtctctccacaataatcacttaattttaacaaattattttttttaataagagaaaatccacaacttacaattgtattgacagtgattattaatttagattttgaaatttttaatatatattgattgagttttattctttaatattaatctccattttcgtctaaattcgaaagtttaatatttagattgttattataagttatcttattaattaacctattatattttaaaatgaacatttattatattttgttattgaaagtggttgttgaccaaatgtttctttttgttttttttttttttttttaaggtgacggtagtttttgtttatttatttatttatgatattaagttatctttacataaatttttattcttaaaattatgaaccaaatttcagaaagtaatatgaaaatattttattaaagtataatcaataatcctaatacaaaaagtaatgaatatcaaacaaaaatatgtatatactatgaataatgaattacatataatgccaatcaacatcgaagaatatttaataatattattattgcattttttatttaatcattgtagtaataattgtactatataattgtacaatatgaattaaataattctaataattatttcaatcaatcaacctcgaatatatttaataaatgttgcatatcatatatcccatatgctttattgaatcacaataattgtactatataataattaatacaatgaatcaactttacttaattttgttgttgaagcactgaaaaagaaggattaacaatagtcataccaccatcaacaacaagattatgtccactcacatacctactctcatcactacccaaaaacaaagctgcattagcaatatcatcagccttaagtgtcaaatgttttaaattagcaatttcaccagtcacaccctcaatcacctcctcactgaccccagtaaactgtttagccattggggttgcaaccacgaaaggcgatacacaattgactcttatcccaaactgccctaattccacagctgcattcctcgtaagtcccaacacagcatgcttcgagcaagtgtaggcgtacgagccagtgccacccaagctaccgctcacactagctgttgatataatgctccccccaataactcctttattggtcgctgagatcatggcttgggctgcgtgtttgatgccaaggaatacgcctgtaatcaacaacagagttgtcacagcctcacaaattaagaagggccaaatcattttttttttaaatcaacataatttagaaaaagaaaattgaggctaagtagggatgcacattttctttatgggacgagaatttccccgaaatcaatttttgttctcgaatattaaatggggcagggacagggatgacactcttcgcctggccccatatagagatacgtttaatttattaattaattttttatgaatattttatatatgcgtttgtgtttttagtat

SEQ ID NO: 111748 - DNA, 3488 bp, Cannabis sativa
aacagaacaattaaaacaacaatataacaactaaaaaataaccgtggaacaaaaataaaaacttaacacagtacacagtataaaaatacacaatatttttaaataaaattccttttcacaataaaaaaagaaaaaaaattaaaaatttcagtatggctaaaaatctctttcatcatttagttttaaaaaactctttaattatagctaaatctagtagctttcacaagaaaacttgaagtagcttattaggcatgtcactttgcatcacaataagcaacaaaacagatctaacaagtcaattcgacgcgctctctccatttatatatgaatatatatacagatatatatcatcacaaaattaaattattccatttggtttggacccctcatcactcaaaatctaactatatatcgatatcaaacccttgatcaataaagaaaagttaaaaaaaagggaatcatataataattttgttgttttcacgaaactaggctaggtaagagccaacacatagaaaaacccaccaatcccatatcaccttatattaattcttctaataacttctactactttaactatatacatatatataaacatgaatcatgatcatggcatcaagtactgacccatctcagttttacacctatagagttcctattcactatctatcaatatcattttaatctttaacttattaccaaatcatctatcattactttttaatccccaattgaactatgacatatatttatatatatatatataggacaacacatgcatgcgccctaagtaattttggtggagttattatgaaaaatccatttgagtataatttatagaaagttgtatctttcatttcatttcatttctttgtaatatagtactattcatgttaattactatacttttatttttgggtgttatgtatatatatcattgcctttattctttcacatttttattccaattaaacttcctttcatttcattcatgatttatcataataattaatgagtacacttacaacctccaatacacttctcttttacctatatatatatagctctattaataataatgattctaacatatatttatgtatatatatatacaaggtttatagtgtttgtcatttgataaaagaaagtggtaataaaaagaaagtggtaatatatataaagtggtaatatatatatttatatatatatatatactcatttaattattttaaatcaatacctacttttctaaattttttgatcatatgtatatatatccactctaagtgccaatttgccaaatgatgaacaatcatgatcacctcatagaaagacaaatatttttagatgtaatttatgtattttaattttcatatataatattaatccccacaaatctaaaaacagacacaaaaattattcatcaaatggttccaaatcaaaatagtttttaataatgatgatgatcataaatagtgtattgggtgaaatttctgctagctatatatattaacataacttttatatatataaatataaaggtctacaaaaatatatatagtatgtaagaattagtatatatgtaggtgtaattatagtgcatatatatatatatatgtgtggccgaccctttgaaagaagcttatgcttcacacctcattatatatgatcagtatagtatatttatatatgtagggagagtgaagctcaagtgttgttgtacactccagttaaatatatatataaattctaattagttataaataaattgagtcaacaaaattatggtgattaatctctcttcaccaaccaccatcaaacctttgttattaaatatataaattatatttaaaatgtttaaaaggttatattgtaattttgttaatgaaagagagagagatgagtttggagaagagtcagtgtcaaaagggttaagatcctaataggaccctcaaaggatctccttttcttggttacgctaacacaccctgctccatctcaaaaaaaaaaaaaaatcatttttatttttattttcttttaatttattaatgtaattttttttatgagagagcaagaggagttacttcaccggcccaaatagctagccattggcccatgtggggcccagttcgtggtggggaccacagtgaagagagtgagttcaatgatgcggtccgccgcatgattggcaaacccggccgaccaccaccgtcctacgtggactccgcgtccacatcactaaccattacactattattattattattacactataatctgcattactagttacgacgtcgtttttgggatagcccacgtggtttttgcttttggtcagcaaaactagtaattataagaaccaaataacctctatgagtactgtaactatactttaaaatgaaattttaggattttcttttattataattatttatatataatatttgaatcagattaattaggaaaaaatcaagcgtgctctacgtacagttccacacgttcatgactgaatccacttaaaaaaatggacaaaaaagatcagaaattatatattaatatatatatataataattaaatatatattatgtaaacattataggccaaaccttttcaaaaaaaaaaaaaaataacatataggccaaattaagttgctattttcatttcaaactactatagatttgatacaacatgtataccacgtttttgatagctttaaatttggttatgacatttgtccaaaaaaaaaacatgcataccgctttcacattttttttctctcttttcttatatcacttgattaattagataacacatataaaattgtgtttgtgtaattatatattgtgataaaaaaagttaattaataaagttattttgctaccaactcagtcttacatatattatatagatatattataggtaaatctataagtttatatactggttgtgataacttattcagagctaaacttaataataaaataatacttgaagtcatatcatgaagagaaaaaatttaagtcaaacgatcctctacacttttatagacttctagtatttctttatttgtgtatatataataccaatgtgtacacgagtctaatatataccaacatagtataaaaaccttttgtttaatttgagggttattatttcaggtgtctaacaccatattgaataagtgaaattttaataattagttaacaattttttatattatttattacagaaaaatgataaaaaacactctctaatgtgtaatatcgctatattaatgcaattaaatattaaatttcatatattttaatataataaatttgatagagtattgttaaccaattgcaacgcgtcaccttaggcaccactagtatttgataataatactctttattaaattgaaatgtgcaatttagaacccaatattaaaatgcatttttagggctcgtttggtacgctgtataagggtcgtatagtattaaataataaa

SEQ ID NO: 111749 - DNA, 5351 bp, Cannabis sativa
aataattttagggcataaaactcaacaaacatcaaactttttttataactaacaaaatttaactcaaacaaaacataaccaaacaataacaatatataaaattactattaatcatacaaatgtataataatatatgaatgattatgattaatttaataaaaatatttatgttaaaatttattaataatcaaaagaaagaataaaatattataagacaacccatattgaaagtaatatttgaaatatattagaactacacaatgcatgtgcctttattttaaacacacaaacccaaccttcttaaaatgattacaaacgatatacataattataatattactaaacaccaaagggatcgtatgctttttatattgaaacactattgggaattcccttcccagtaagtccctcgtcactagtaggataaagcaaagtgtaaggaaccttaactggtccaactctgttcttaagtttctcatcattgttcatattcataattttctcttcaatcttagcaagtttcttaccaaatctatcaaaggcctccaatggagctgtgtctgaagtccattgaggagtgtctctttgaccaagatagacctcatcagaagcatgccttgataaaatctcaatgagagcaaccccaataagggtaggaagctgagcagtgattgtcttcaagaaagccttctcaggattagattgaagctcttcatactcaggagtacctttttcgggcatgaaccgtctgcttagtgtggggcggtttggaaggtaacctgcataagggtactgtccaaagttgacagctgcgtggagggcagaagcaatccatatgattatggtgcaggagtcaatcaactcttgacgagtttgcattttgggccaccaaggttcatttttcttgtcaccgtgaccctcttctctaacctctttccaccatgattgaagctctgagtctttttgaatggcttcatcagtcttgtagtagaaagagcagtagtcttcaacccatgttttgattgcataccatatttcaagcccatcaacaccataagggtagtcctgtatcagtagccgaagaccatggggcgcacttgagtccttcactgccattcctctgcatatgttgaaaacatgatcaaatgcaaactcaaaaaccatgatttagaaaactatgatgaatacttgaaatgactgtaccgcttcatgagttcttctggtagagcttgctctgggaaaacccagctcttataaactgctgaactcatttccatggcatacttcgctggaaagacagtgaattcaagaatgcctccagcattaatgagaatctgtctggcaaatgcgttgatattcatagtgtctcgaaaatgtggttgcaagagcttgtgaattgggtgaagaacacttagctgcctgttggttgctattacaaatggctcgatggcagcatgagtgttcaacctgtgattgaaaagatcattacaagaaaaccaaaaggaaaaacttcccagttacaaaaagtaagagtaaagttgtttaataccaatgactaatgagttgatgaaccccagagtcatttacagcagcataggctttagctagctgccaaatgtgactctctacaccttcttttgtcggagtgaaaactttgctaacagcaccaaattgatcaccatctggatgtggcaagcttaattcgatcgccaatggctttaaagtgccatcatttttcaagaaaagaagtgtccttgttgcatagatttttgaggaagttgagtttatcctcctcaggtaagggaacaacatatcatggtggttcaatataaacaacttgttcttctcaagtgcctattaaaccagtataaataacttgtcattgaacacttcttttgaaacaacaaactctaatgcgttaaaatttgagcagtggaatttagttacctcattcacagtgagctcatctaagttattcttgatgtgttcttcagttatggtacttgtttgatcaccataagtgtttttgtctagcttgcttgctggtggaaattcctatataaaagaaaaagaaaaatagaattcattgaatatgaaagtcaatttactttttcaagtaaattcttaactagttttgagaggttgaatttacttggagaagactaatggaaacggggttaactccagccaacatttctcttgcaaattcttcatcagtcctccaagaagacctactctctagtccacattaaaagataagaaaatagcattgagacaacacgtataaagtacagaatataaagcctaaactcctataatgaccgcccatattatacctttaagaacttgaggaagagggtatttgaggagtctttcaccatctgttctaaaaatttctttaagcatctcagcaggtatgttttctctaatgtcatcaaccaaccctttaggcagctcaatccctccatcatacatattcaacacatcttggaagctatcaaactcagaaggagtgttgtcaaacttggattctaactcaggtttaatgacttgtgctacagatttaagagcataagcaaggaagtcagacatctttagatgcccaaatctctcatctcttggaacataaatgttcaaactcataagaatcggcagcctgctctctgtgttaggatctgtcaaattgtatatttatcagaaaattgaaatttagagtaagaatgataaaaataaagaaaagaaaatatgcatacagataaacaaaagtttaacctgtcttagttggtggtcttccagttcttcctctacgaggataagggtactcactagaccctccaagaactggacgagcatactcagggcccttatctggattggccaaatcattgtaataagcatagtcatatactctatcccactcttgaagctctccttctctatttcctcttaagctaagtagctcttcttctctgtatttgagcagtggagatggtgtttcacttggaagatatgtctacaccaacaccaacaataacaacatatattatgtaacataacatatgaacaatcataccataccatatagtctaatgttgaaaagtttacattattggtgaagaaaatgcgatctttttggtaacgtttagccgggtacacccatgagttgcaaacaaaatggaccctagtttgatcaggataatcaagtgtgagtgtcttgaggtagaattcactgtggtgattatttcttatcgaaaaagcccatgcaactcctatatcattatcttccaagtcaaaagtgaccttaaatgcagactctcctgctgtcaatggggtaatggttgttatccagtcctccaagtatgctgcttttcccagcttcccttgcaacccattttctacacataccaataaataaatactcaataataagcatataaatcttttgtcagtgtttctaattaacaaaaaatcatatttaaagtaccaaaacaaaaattagatttggcacatgtgaatacattttgtgcctaaacatgcatttcagagcctttcttcttttattaatataatgaaaatttgtaagtttatatacattttattaattaattataggaatacttatataaaatagtatttttttgtaaaattttatataaaagtaacagaaaaaaaaaatccaaacaacatagaaaaaaatagtaacatacaaataacaacaaattaacaagagaacaacataaaattacatcaaaagaccgtatttttcataaataaaataaaaaaatcataaaaatatataaaactccgtgcaaccgtatttttataattttattgttatttttgtgtatttgtaaaataattctattatagaaataattatataaagcactattttttaatcccttgattataatagggttaatatcattttggacccagtattttacaaaagttactaaaccctctgttttgttaaatgacaaaatagatcttgtattttctaaaattgtagaccctaagctcaatttttaatttttttttaatataaccaacttgaagacaattcctaacacgaatagatgcaataaacgtaactatttttgtcataagacctctaaatcatgttattattaagttttattttaacagaaaatcagttcatggtactatttgtactattttaaaaatacaagatcctatttgtcatttatcaaaatagagagttcatgaatcagtagtttttctaaaacacatgatccaaaataatatttatccattacaatatatgtataaaaaaacttatttacaatttattatacattttgtatactattacaaatatattctcatctttatatatataataatgaatttgtatataatattattactaattcaatttagttatctttattattaattaactaatttaattataatttaatcgtacctaacttttatgggatcacaatttcatattcatattatttaattttttctctaacatatatttataaacataattgttaatagtacaaacataaataaaaaattatttttaataaagttaaatataaatcttatatatacatttgtgtttataatttttactttatattttattatttgtttaatttataataaatcataataaaatggactataaacattattttttaataaaaaaatatttactatgtttatttttataaaaaacttaatctaacttttaattaatattataaaattgtttattttgtttgtttttaataaacacgtgacattataatagtgtctaaaacaaaacacattactagtattattataaacaataattataataacataataaacacacatttaaattttatttatttttgtattttttaaatttaaataaaaggcacatttaaaattttatatatgttcataattttaatatagtattttacataaaaaaaaaaaaccttaaattataattatttatactaatatagataataagtatttaaaatttaataaaaaaatatctagtttgtttatttttttaaaactgtttattatttatttaattaattttataaaattattaattttgtgttttaataaatatattatattattaaaaaaatttaaaatattaatatactaaacataatatagtaataataatattataaatattaattatataatatataataaataataataacaatattgtttaactaaaaaaatcaataattatataataaatcaatttaaatatcacgattacaattatatttacgtttataattatacaaaacacatattattaaggaataattacataaggcaccattttttgt

SEQ ID NO: 111750 - DNA, 8831 bp, Cannabis sativa
actattccacttaagtttattgttatactaagtttttatgatttttttttttcaattctctttcaaacatcatttttttaaaaaaatatatatgtaatgggtacccaattggagtcattctcccgtcaggtaatccccgccccgcccctgctttaatttaaacgggtattggggcgggtaggtgtgtgaatttaagaaacgggtatgggatgagggagcaatccccgcacccgtcccgtttacatccctagtagcaagtacaacagtagtttattaaaattttaacaaaattatctatttaaaattcaaagtatacaatttagtagtagtactagttgagaggaaaaaatcaataatatcctatacttaatacattgtaaaatctttaactaactttttttcccttgtcaaaactaatcaattgatttgcctcttcattcttgaaagaagatcttactttatttcaaataataataataatcaattgataaccttattctgtctcgtgtttcctttgttccacaccaaaccaaagacctgatgttgatggtgtcgttttgtaagttttccaaccaaacaaacattgctcaaagtataaataattaaatgataactcaaacctcaaatggttagaacaaataaagcatatatagattgttcttcatcataacatgacacacaacaagaagaatagaattctattttctttactcttttttcctttttacataatttcatttcatgtccaacacttcacttactccgaaagcccccccaataaaaaagatctttcttactcaattttcttctctggttgatacaacaatcttaaaagtggctactttgttgtcatcgaactcccccattttcaacaaccactcattgttcatcgttgaaaggaagaaaaaaaattcaattacatggaaaacccttttaagttttggattggcttcttgaagcatttcttctagcacagcatcccacaaaatatatcatggactgccatttgataacacaacaataggtaagaaaagtaagcttaactcaacttgtctattattgatcatttgaatgtgagttgggtgattagaagagaatagcttaccaagacaagaaagagggcaacattgaagattgctacaactctccactctgttttcatgtattgtgctactccagccctgtaaaaaccatgaagaaagtaacaacatacatgaggaatgtaaccattgcagattaccaaaacattacccccattgattttggctgttctaatccatggctaacagagattgtgatgatgcttacttgcaagaatcgcaattgtagcacttgacttggcgagagttcttgtagagtttgcagtctttgttggaacttactggatgaaaacttaaatcgtagaatgaagcatttacagctggataaccacagctataaacaatatggtaaaaatgtcagttaaattatgtccttttaaaaatttgacaattatcaccttttttttttccttaaacttttgaaaacacccttgtagagaagtgaagagctgattactaattgcacataaacagagatagaaaaaggttacttactcagaaggtggccgacagcagccggcctcgataggggtcagttttgctgatttgtattgcttaagagtctacaacgaagatgaaacatacgttaagccaatatgacatgttaaaaagcaagcaagcacgaaacataaaaataggaatttcaacaagttgagagtagagcatacaccttatactttttcgacaggttattgcagtcttcggatttcacaagacatatcttcaactccttccaattatgtgtattgttcaactgtaaaaagatgactaatatttaatatcacgaaacgactgcacgataaagatgatattcaatcttcaatatctctcatattgcaaaataaaatgttcgcttacctgatttagaaaccaagaactgtaatctttaagctgatactccttgtatctgacaaacaaagacagcaataatttctacccattacaccaatttatgcattagattataatcaattttaaatgattgttggcatgaagccccattcttcagacaatttagaaagcttgaagcatgaagcattgttactttttcgttacctcaaaccatccacactatgaccggaaccgttgtttgttacaatgaacctacaagtgaataaagagagcttatttaacatccgaagtccttgatagctgaatgacactcttactaattctcatttttttgaaactgaattcctagcttgaacaaaagtcagctgtcttgaattccctgtctccaaccagttacttctccatattttgatcattgttattttttttttttccattttgagaaatatgtactctcttctattcaatgtgaggttggagacagggtgacagagacattagattttatctctccgcctaatcctataatatctcataaacaagaaactatatcaattgctatgttgattctcaagaggaactcgaaagtcagatcaaatggaagcaaacaacatgctcgactgtttgagctacccctcttgaatactcttagtaataattacaaagtaggaataatatggttagcaagaggaacaagaaactatagcaattgctattttggtatcaaaggactcaaactttaggccttgtaaaagcaaacacatgcttgacagtttgagctacccctactcctagtaatacttataaagcaagaacaatataatctaacactgacggtagggtaatataacatcagaattctcatcagcacagcattaagacactctcatttcttgctgcatataatcttggtgacaccttttattgagcattgcctatgactttcatctgtcaactgaacttttaaaaactctacttgcagttaacacttccactctaacaagataatcatctgaatgagaattaacttagaagtggaaatcattgttaggcaacattgattgttactaatcaacattaatggaaacttcaataatgtgaaacaatgaagtttagtagaacaagagtacttacgccaacactgtaaataccagaattccaatcagtatgaagcagagcatgatcaaatactgcaagtgagaagtcaaggaaagcccagaaaagaaaaaaataaatttatacatacataagtacaaaattacagtcttaataccataatggcaaggatacaatccacaacagtatggaactgttcttcaatgcgcccaagaaaccgattatagatctatacacagccaaaaatgcaaaaccaaaacagctcacttgtctatgtttagagaatatataataatggaagttaaaaagaactaaaaagattaagcaacttacacaaaaaagatcacaccgccgaggcataagattggaaaagttagggaccttctacagccatcatgatgagtgctcatccatatcccaaataccaccacaaccactgataaaagctgctcaatgttcatacattacatacaaagcatgtaaaaacccaaaatggaaaacttaaaaaaacaccatactttggtaaatataagttggaacagcgtttcataaagacccttttacgcaaagagcttaaaatagaaaagtgagtgtacattgcagcataacagtttgaacaatgaagttagaagttcttgaaaactattatcgatgctataacctataacaacagcggaaaaatagcatgaactggagtaatcaaaagaagggttttgtacagaaaataagatgaagaagaaaaagaaagaaaataccatggttaaaaaattgacccatctgatcacaaaggtgctggttccaacacccattttctcttctactcttgtggacctctcagcgaaaggagacagaggttgatagagaatgtcagagagttttctgggcacacaggtatcttttttaaataaatgaatgaataaacaaaaatgagttttttctcctgaaagacacttattacaaaagtgatgatgaagcagttggagtcgaagaaaaatagaatggcgaagctttctttctttggtgggtagtcaagtgttgggtcaaatttggagatggagttgagaaagaagggtattttggtgaaatggtcaaatgagctgcgttacattgattagtagcacatgggaatgggattgggcatggctcatgttttttccaaggttcaccattggacacgacacgacaaagaataacggacacagattttaaaaccttttgcttagatcggccaggtctataactctactactcttctattattattcttacctattttttagctcctaaattcggtcaaaaaccataccccaagagactccaagtccaaactaaactaaaactacaagtctaacttattttggcttacaattacaacatatacaatattacttctattacatatgatgaccttatattgtaataatgaggaaaaaaaaaaaaaaaaagcagtgtgtaataattctcataaagaggcatgtttatgaatggtaacgatgacgtgttcacaaaactattgggagtgtagatttgtaattttttttttcaaaaagtgtaagcctgtatctacctgataaaacttataattatcaactttttatcataaaacagaattatgccgaattcaagctcacactgaaaaagattattgtttaagaaacttggtcattgctcgtaccaatctacccaactcgttcttggcctctctttcccaaatacccaattattattgccatatctacatatcgaattctaatattttaatacatccccaaatgtaaatagctatatataagatgcattttgaagactaaatacttaaaaaggaaaaaaaaatctaaatacatcatactagtgtagtatacagtatgcattctgttttttctttttttctttttcaacaaaaagacacaatctgctgcatatttgtatatattgtatgatgcaatgcaagtgtgtcaaataaagactaattacatcactaaagttttcattacatggttaaaaaaagaatatacagattctgtctacagaatgaatctttaaaagaaagcaaaaatgatccattctcccctttgaaaccccttttttcttttcaacctgtaagtaaatagtaaatattcttcaaaatagctgtgtcaagagtaatctttaaaggaatttgaacacttctgtagtctgaactatttcactctgttggtgcttgttaaaattgcagatttcaactcctctttatccaaggacgtttcaacgatgacctaccagtaccaagtgtaagagcattgattcatttagtactcgaaaatgaattcgaatggattcagattttcatttttagcacatggtatggcagtaatatcatgatctaaagcagactggtgaaatctgaccagttcagaaattttttacctcttgtactttgttttccgaacgtgcaagtaatttgtactgattctcaaacatggatgccatgtaaacctacaacaaggtaaactgttagtctaaaacatacagaagatgcactcgttataaggtgagttgtaacacttcaccgaaaaaaaagatcaccacaatttgtataaaaattcaagcattcatacctgaaatgttggagctaaaccgggactaagaaaaaaccggcctttcgacacagactgaatgccttcaatttgttccaactctttgacaagagattccacatcagcccactgtcaaagttccaaatcagatctctttaaatctgtgtatcttccaaattttccaaaatgtgaaataagtcaagtgtgttctttaaacattttttttagtatgtcctcctgcggaacctacgattggtgggagataggaatctctagaaaaattgctagataggttcttatgatgaagaatttaaacatgggtgaatcataggtttggccattcaactaacaccaatctcaaaacactttgaagccatgacaaagactaacaaattactagttaaagaaaaaagtcaataacctcagcatctgcttcagcggcttcaatgggatcacgaccaccgaccacagattctaaagtctcaaccagtggatcaggctgccatatacaatattagcctaatttagtaaacaagaaaaaaaaaattgggtctctgctctcacataggattttaataagatagaaaggcaaagacatgaaataccataatttccttaagggataagaatattcgatcaagggaataatccaactggtgaacttttgcctccacaatctgaatccagaaaaataatagtttgagtcacaagattaatcaaaatagtaatgagcaaggcagaattatcagagttttagcttaaaccaatctatatgaacatacaattatctatttgaaagtgtgatactgtttaattttgactaacctggccaactttaaagtatgctgcaggatccagtgtggcatcccatgatacttcggtctgatgtattagtgcaggcactccatcaacctacatcaatatagttaagagaattcaacgaaaaatatcttgtgattgagaaccaggatctgcacttataattccatgttcagaagttgttcattcattaccattacaagccattgaaatttaaggcaacatggcacccgctgccaatttcattttcatttgataaaaaagaaagagactaattgcatacaaagctccttgtgtagaaatggatttacaagactaatgcagttgggaaaccttccacttacctccacaaaaataccgaaataagtaatcttcttgatgcagcatttcacaacatctccaacttgaaggttagcctgtcatgaggtatatcaataccattgtcaaaatgtaagacagttgtcattagtcaaagatcaaatcaaaagacaaatacattagatacatcctctaaccattaaacttttctttttcgcaactaactcttccttctctcttggctttagagaaaatacaagttttccagattttctgttggccagcagtacatttactttgagtctctgcaaagcattgatcttatttatgtcagtagaagagcaaaaaaatacaaattagccaaaaagctcagtaaaccaagtcttaaacacaaactaataacacttgtgaaaacagagacaagcttttgaaacctggccaatgaatgattgcaagaatttgattttctcttgatcataaatcctgagaagttcttcaacattcatgtctgatgaaatctctcctccagttttcatatcaatattgggatctaggctcttatcaagaagaggactattttttccagcctcataattgctaataactcctaaactttgcctgtacaatgatggatctagacccttccttcttaaccatgactcaaatgctaagaatttccacttggaagaaagatttcggtatggaagaaatcctatcaaagagccaaaagatacctgtaaaaaatatatctagttcatacaagttgtaccttagcctacaaatgaaaaatacaaagcaaaagcagcctgttccaaagcctactttactgcaaacgtatagtatacttacaacaaagcctctactgctacagcttatgagttccacctctcctctatctcccattttaaccaaattttctgctcttgtccaatcagcatcttcaaatccctactcataagcatccacaattattagccaacacaaaaactcaaatattaagaaacctatagacatgaaacgcataaacttacctccatcgatgatttaacagggagattctcaaactcatcaggtttcttaacactgtccgggcttactgacacatcctttgtagtttggtctaatctataagtgcaaatgtcagagataaaaaacaagaataagagtaatggaaacaaacaaatataaggcatgactacaatgcaccttttcggttttcctattagtgaagcttccgcagagaagttgacactggaatcaactgaactcgtggctggaggaggttccttctctgttatctcctcactggaacctacaacactctgctcatctggctgcaatccttagaaaataatccaagcataacattaatttgcagctttattaaaacaaacattaaagatctataccaacaaaagattcatccttacgagtaggtttcttcaatatcgaatgatcctccaattcattgccagttccagtcagttccaatgaacctcttgagctctcatttccaatagcatcaacaacaccagactctgcataatctgcattagtatgctgctggatggaaccttcatctactttcttgacaggcattgcagcaggcttctttaacaaagtgaaatcgctaaatccatcattgagctcttcctttttcattgtcaactccatatatccaacttcttcgacatttacatcatcagaattgtcttctttcgaatcaacattttcattgccactcattggttcaggctttcttaacagagtcatgtcactaaatccctcatcctttttttgcacattccccattgtcaatgacaaattcggtctaagtctcaatctagatggtttatctccaacatcaggctcatttaacatacttggtttcctcaaaataacattaggaagactacgcctaacactatcagcacccttcctaactggccgaactggtttcttaatctcaggtacaaatgccttatcatcatcatctttgaattcaaagcctttcttaggaacaggcctgactaaattcaaaccatccaac

SEQ ID NO: 111751 - DNA, 5953 bp, Cannabis sativa
aacaatcttaatagttcaaggggaatttttaacggcaaaaaaagttcagggggcatgctttagtacatgtcaaagttcggggggaaaaattgctaattagccttctatttatgtaaaaaaaatgatagcaaagatacctaataagtacatttaaaccaaaaaaagaaaagggtaaattgtttcatttttaaaacaaaatttctcaaaaattattttgggagaaactaaatgctatcttttcctaaaagatttttaaattaaaaataactttttatttttttatttaaaaaaatatatagaaactaattaaactaaacactgcataaaagtttctacaaatctgaatcttatgaactttaaatattaaagacacaagttcatataataataaaccatgttgatataacacaaagccaatatcaattaatcaatataatttggaaaatagaactttatcaatgatcgtgatcaccattaatgcatgcatgagtttgactttataaattgatcttataatttgaagaaaaagactttaatttatttacatttgccttccacttagacaaatgcagttttctccaacttgatttttcttttattttttattttttttttataaattttaaaaggggtttaatttctttcttttatatcttaaaagaagaaccagatttagttcttttcatcaaaagaatctaattaaattacatgaatattgaataaagaaaacacattccttctgattagctgaatctgttgtctctatattaattaacatattattattcattggagtaatcaaaacaaagtacaacactttttaaggtatcattttaaatgttctaagtttcattaaactaagtaccaatagaatcatcatttattggagtgtgctcacatttcctagtattgcccaattttcttggtatgttgaactttgatttggtttttgtatcataggaaaatggaatctgtagtcccatgaagaccattaaatataaaatattccaccttattgtatacttattttttaattaattttgtttgcagatctctgccaatgctgatatgtattttaagtgtaaattccaagattgatagtgtatctataagattaagattgtcttaattaaatacaatattggtgactatgccaatttttttcttctgaattttattatatgattatatcatgcatctcttgactttaaataattaaaaaaaaaaaaaggtaagtaagtaaccatttattattgaacatcaacaacgtcataatttactaactgtgaaataaatttaggtggcgtttggttggaggtaataaaatggaataaaaatgaaaggaaacaatctctattttattcttttgtttggttgcatattaaagtgttagaatgtcattccaatagaatggatgaaaattcaattttaaaagtgaaggaaagaccattccaatgcaagatgagaaaaaaaaattaataattttcttatcaatttttttatgcattttaaattttattccattcatattcccattcccattcttatttctatgttttcatttctctcaatcaaacgtcacctaaattattattaatgagcctcgaattacaagacaactgggtatttttatggggactagtaacccatagaaacaagttactttaatacaattaactacctaataaaataatttaaataaattaattcatatccttattatatagagaaatgcaaaaagatactaatggtgtctagtattttttttatgtgttaatatcgctattggtttaattaagtatcagatcctgtatattttaatataataatttttaggaagcatcgctagccaatcacaagacgacatatctaaaagtgatagacactactagtacccaataacaatgttctattatatatcctccctcgtactcagtatgtgagtagtaattgaactcaagagtctttttttgtttttttaaaggaaattttgaagtggcatttgattagaaggaattaaaatataaaaataggtaggaggataaaaataaaaaatgaatagaataaaatagaattaaatttaaaatatgtaaaaaaattataaaaaaattattaattttttataatattgtaatggtaattgtttttattttaaaatagaatagtcattttactaaaataataagaaagtcatttcatgaaatgacattttaaaattttaaaatataattaaatataatataaaataaaatttatttttttctctattttattttattttattatcaccaaccaaacgccattttaattttttcatctttacgtactcgaagaatctagtagtagtaatactaaatgtggttaataaaaaaaaaatagtaatactaaatgtgcacttggtttttatcaagtgtacgtatatatagttacatatatgcccttggttagcaaattaaccacttggtctaagaccgttagatgcttaacttggagtgttgcaaatttctcgaacaaagtagaagtagatcaagtcgaactcgaaatgcttatgctaaattaagatagcataacaatgctctaatactgttatattatttttcaaataatataatatatattaaaatgtaataaataaatataatataatatatagtttgataattattttattatatagttgattgtggccaataatataacataaaaagagagttaagatctataacaattttgtaactctttgattacaatttaataatgtgtaattaagtgaattattacacaaatcaagaaaatcaaaattatgaacatatagctattcgtgatggttattacaatgatttaagtcattaaaatgactagaaaaacattgagaattataagaggagtcgaaaattccaaaatggagtgtgctgaaaccatactagacgacatgtgtcagggctgactttgaattgaaatgggttatagataaaaaaaaaaaaaaattagacctttactataaagatattttttttatttgagccccaaaaataagtggaccctaggcgcggacctagtccacctatgcttaaggccagtcctgcgtgctgtccagcaccgagcgacatgatgcttggaagtactttagtttcaagaaaatgatccaaacgtaataggatcatgtgccctaccttgtcttcattctccaatatttacaaccccatttacactcatttaactgccattaacagctatgggatgttgatagtttgaattttgaaattttggttacctaaacactaaatagaaacttataggtttacttgtggactattagtttctattaagagagtaatttgttagaaatactagaaattcataaagctattactattcttttttctaagtacttgtagtagggaaaatatacttttgaacaaatgtttaaaaccttgtttaaatttagtgatttccttactatacacttaaggtgtatgtagtgttgagattgctcttacatctcttttttctttattattattgtgttcatctttatttgtatcttttagttttgtattgtacttcttcttcttttcatgtaatttttaaattatgcatatcttttattttgagttgtaatctcttattttattgttgtattattttggcttagagttatcaatttgtttgttttattattccattgagtattattgtgctaccatgttagagtagaaagtagaatgaaattggtttaaagtataatgtagaacaatagaaatattgaattccatctcaaatgactcatgtttttaatatttagagagtagagtaaatagtgacataagtatccaatgttaataaaattgtaactttcattcagtctcgtcaatacagacttcgttttatatttatcaaaataaaatttgaaagtaattgatactacatgttttcgtccgaaaccaataatttagaatatgagtcttacatgtatcctattttaagatactaacgaagtctgtagtaacaaaactgaacagaagttacagttttattaacattagatatttatactgctaaaaatattatttagtttttgccacttacaaactaaaattttaaatatttatgcggatatttaaagaataatgttcccacatatttttcacatggagtactaatattttcctttagcatggtggctattaattttaaatcaatgaaaataactatttcagcctaatatttagttcaattaagagaatcttcattggagtactaaaatagtgtagtgctatattttagtatttaaaaaaaaaaatagctctccaatggtatgttaaatcttgtgcaaaattctgttgatgctaaaagttgtaccaagttttgtacaagatataacattgggctaaatttggcacacaataaatgtatatttttttaattacaactttgtcattgatcattaatgataagctttaatatatattttttaattacaatattatcattaattattttttaaaatatttaatttattgataatcattaatgatattttactttttgttatgattttattgttcattggagcacaataacaaatattgtaacaaatatagcatttgttagatcatctctaagagaagatatataatttgagctaaatttgactaaaaaataaaataatattatatttagtacaaattttacaatagtcctccaatacattacgagcaaaaataatctttttttgattgaaaaatgtaaaaacttaacaaaaatattaaatttttattgaaagtatataaaaatcttattaaataaaaaaaaatgtaaaaggttattaattatattaataagtgatcaaaaagtaattaaaaaagtattatttattgtgctataaattttagctcatgttatattttgtaccaaattggacacaatttttagtatgtgctatttggactatcttatacactactattagagtttacttttatgaaaataggctaaaatatatatataaatatatatatatcatactttttatactccatcagtgatgctcttagtgttttgttctaaattaagcacaatatttatacattgcattagaaatggtctaataagttcaaattgaatcgaatatgcttgctagagctttttgggctctaatcttaaaatagaacacaattttttgaaagaagttgaagtgaaataatatttctttgttttggcttctgagttaaaagagaaagtgtggagggagtgtatttatgacgtgtttactaaactgtaactagaatcagaataattaatgggaaaaataaattggtttaaaaaaaaataattggaaataatattttattatgctcttcactaaaatgtttggaaagaaaagtagaattatattattttgtttatataactagaaaaggtaatcgaaatgctttaatttgacaaaattatcattattaaaacatgtaattattttctgtttatagatttttaaatgacatatttgtctttttatttttaattaataaaattaaaattaaaattaaaataaattaagttagaaaaaggaaatgtattccttataaaaatgggggagaatatttctttttgttttctctttaatttgtgtgggccccactattttttccctttctaaaatttagtaaacaattgtatgggaatcaataccataccattaattctcattccctttaagtaaacatggggcatctcaaatctacaaaaggtttagctttcctccttaaattcatgtgggacttactaaaaattaaaacttttccacctttaaatttgaacaaaacaatgaattgtttacatattatcccacaatcatactatacccaccatagcaaatacttagagctcgtttggtacgttgtattaggtcgtattgtattgtattatattgaattagattatatatcatatt

SEQ ID NO: 111752 - DNA, 6646 bp, Cannabis sativa
tagttgatttaacattatttagtaaaaagtccctgtggagacgaactttgattacttatcattgtattacttgtttgtgattgtgtacacttgcgcaattataaagcaatagaattttcacaacagctttcttaagtgcatcactttttggaggagcgtatacgttgggatatagtttagtcagggcagtcattacagcctccattctagtcatcttgccgagtaataactcattgaattgatcttgtcgagttaacctgctttaggccagttgaagttgtcttgccatgattacaacgagatctgactcatcaggttggctcttctctccaacatcatcatcagcgactttgtcctgagggtcgtcttcctacatatcctctggggcatcttcgacattaaattcatcgtccttagagctactttctccagattttgtgtccttaatgataggatcatctcaattcaaaacttcatcccgacgacctttctaatgactagttacctcttaggggtcactagagtctccagctttggcaccaggaccaataaaatgaagaccagacttggttcgggttagagccatgattacttgaatgtaatctacaaatggtctcactgctttcttcagccctcaatgaaagcactaaaatacttaccgaaaagagaaagagtaaaaagataaccgattttttacatggttggcccgttaattagccttagttcacgagtcagtatgatttcgtagttctttaaagaatgtatgttctaaagtttgcctggacaaagtttgcaagaaaatccaacccttaatctatagcattcgagagatatttatagtagtttgagaattacattagatttctcttttccctctattggggagtacagtaaataatacccttaggctatctcatgaagtccagcccataaagaagataatatgttgactaggcagatcggatttggattgatttggtatcatgtgtactgattgtggacaattaatctatgaattaattacataatattcattatagaaagtttcctcattaaccttgatacgatactctgttgtgctctgagagttgaaatttctttatttgtgcgcaggaataaaaaaggaaactagaaagatttttcaagaacgcactatctcgtccctccgatctcatggtactagacatgcttctggacacgactcaccgaaggcggaaggctttgcgattgcagaactaagatacgttcctagaaggacatatccaagtgggcttaacccactttaccttgagggtcccactgggtcttgagtgctgacctggaatccacgtgtccaatgttgaaaacacgaataacaaaactatttagttatattttcataaaaatgcttcaagataattttattacacattttgacttattccatttaatattataaagtttttagtgacatatttagtaaatatcactactacaaaatggtttttataggcaatttattcaatccttcagtaacaattttgaagaaattcaaaaccgttagcaattgctaaaaagagatagcaactatagctatatgagactttatggcaacggttattatgtaataatcgttgccataaaatcccatagctacaattattataaaataactgttgtcataggcacattatgtaataactgctaccatatgagtcttttattagcatttcatgtaatatccaattttttttaaaaaaattatttactttcatatatatttttattattattaataataatatatttaaattaagtataaattatatataatagatataagttaaaattaagttgacaaatataaattatttggtggaagatcacatgccaaagaaagtggtaaataccgccaggtctcttttctttccttggcagtccggacagccacatacacagaacagaagatgcaactgagcacagaacaaagtttgtatcacttaaccttgtcaacccaaaccaaaaacttattgggttgctgtctataagagaagtaaaaaagaaaaactatagaacaagatgtggggaatagtgtcaacaaagtagactttggatggaatcggccaactaaaacaagagcctatccaacaagcagctttctgttaaaaaagaaaaaatgctgctatagccaaatgtcacaacaaaacccccttccatatatctaacaattcccaccaaatacaaaaagcaacaccagatctgcaaccacttattattcttgttctctcccataacttttctttttctctccttttttgagggcaggagccaaacattactatgaactatacactggtcttgtctatctacaagagagccttatccagccctgactcctgagctatatatttcattctgcaataattcggctcaccatattttagagcccccatttcaccagagatatgaactcatgtacagcctcaccccaatatcaaggggtccgttgtccccaccaattgcatgaagtgctacaggaattgttgaaagcgtatgagcagtaaggggaaaaaacaaagggtctatttcaatttccgaggagcctgagtttgacatgttaatggaattcacagcagatgagtcagaatggaagttagaactccttgtaatgtcagaattcaggttacatggactaacaatcaatgcaacatcttcaagtggcctccacctaccagggctgcctctccggagggaccgtctgttaggatgtaaattaagcaccaacgatgatgtagcttcaagccactcaaccatcaagccttcaacttcatcataatttattcgacgttcaatctgaaaatataagaaggtataattcaaccaggaaaaaaagataaaaggattaaaggagggttcaagaaagcacttacacccaacttctgaacgtatatggacatgaatctaggtcccaaacccaaaactctagcttctgataataatacctgcaagaagttaaagcataagacagcaaaaaagcaaaaaactgaatacagaaccattagtaaggataggtgagcactcctaatacattatagacatataaatacatataaaaagtacggtacatataaataactagataataccaaatagaagaaataaaaaatatgtattcaaaccagaggattactttttacctgtttcttcttcagcagagcccacatatacaacttatcacaagcatcattaacatgtctactagcccgatttctatcattgcagtaagcagcaactttaggaagtatttccgagcgtggaaccctatgctttaatgctgctgtagacaacgcttccttcacatacctggattcagcagtgtctttctcgaaattaataccagtgaaacactttctcagtccctcgtgaagtttattcaatgtactctcatgcttcacatacaattcttcagcatctataactgcagcaagtgtccgatgaacaataatatcaggataccgacgtagaggtgaagtaaaatgagtatagaagggaacagccagagcataacatgcccaatcattttcattgtctttaaactccccagtacaaaagtaagttgccagttgcattgatctagaagcatagttcataagaatttcaaagagagtcgaatcatccttgagtttttccctggtcctctgcaatgacagattgaactggccagaagtagtatccaactctagaccatgtttacagcaaaatgcttcaaactctttgagtttccgcatgttaggttcaggatgcctccgcagtagagcaccatcaggaaacgccctagagataacttcagcagcagtcatatttgccagaagcatgaactcttcaacaagaaagttagaagccttccgtccagacaacatactatcattcggatttccatattcatcaaacaggaaaacaactttggatctttctaggcctagagccccactgccatatctcttttccctcaaaatctttgatagttcatgaaggtctttaatagagttaaagacatcaacccattcaaaatagccatgcaactggggagtacaatttcctgaaaataaaaaacgcccagtatccattgacccatcaataatttcctgtgcatgctcataagaaagtttgcagcatgaatttatcacagtacgaccaatccaccgatctacaacaaccccagccaagtttatgtccaagaaaatagaaaatgcaagtctatctacacctgcattaagggaacctaaattctctgaaagcaacggaggaagcatgggtattttcttttttaacatataaacactggttgaacggagttgagcttctttatctaattctgtgtcggctaacacaaaatatgatacatcagcaatgtggatgcctaccctgaaaatgccattgggtaatctttcgactgaaagagcatcatccaagtcggtggcagtggaaggatcaatagtaaatatgcacaaatttctaagatcccttctacttttaaattcttcaagtggcacctcccaaggaagatgtggaagacatgcgagtgattgaggagaaaatttagaagaacaaatagcattttcaaataaaatagcactaagttgcgactccaactcaccacctcgcccaaaagtatgcaagatacaggcctgaggtaaaatactttcttcaccccaaatgtcaattcttgcagcaaccaactccttttcgatattcatgtcaccattctccagcctttcttttaagcattcaggtaaagattgcacaagaacaatcatttttggaaatttgggatcagttggtgtcaattggatatactcttggtcagaaaatgctaatgaaattttgttcttcttagcattttcctggcatgagatccattgcttaacattaagaaaaccaacgacagtaccccgaagaggagacctctcaatgacagctaaaaccttgcctgttggccgtcttgaagggtacaaactgattacagcacacatcttctctactgcatttctagcatgattgagtccactagaagaagaacccacatgtgaacctaatgcagacgagtcacatccatcatcacaatcataagttgaaggtccaattatctctgactgattaggttcctctagagaagtaaatctttcagagttcagttccatctcagggagcaggcagctaccagtataagtattatcagaatccacatttatcttcgctttacctttgcaaatgttaacagccatattatgaaattctgatggcatgttcgtagcctctaccattacagaattgttagaactagccgttgagcctttcatttttgtccataatgacaaaggatcaaccttgattgctacaatatcaccttccacctgcataaaagtggtgaattcatgcaactgtaagattcatctctgcaggaacaaatataacaagaatatccaacatcaacagcctctgaaattaacaagtaaatgccgttgcaaactcattccataaggcagcattacatgcattaatgttcacaagcacctttaaaattgtcagtaaaagccaatttccaagtgctaaagataagaccaagcaaatataaacaagcacgcaagaaaagaacgataatatgcacagtatttgtagaaatgtgaattgtatttaatttccatcattcctctttcaaaattctaacattagcattctccattggtcaaaagcagatgaataaacacaagggtttgagggttgacatgacaatctcaacattcacaagattgttacaaaaaaaacaatcaatatagtttcagccttagaaaatacatcttatgtacaacaaaagtaaatcaaaattaaccacaaagtaaaaaattatttcaacgttgtgatagaaccgtagcactagattcactcataacagagcaatgactgaaaatcatctttattggatgaacaaaacagagctagcaagctatatgtacaaatagggttacttcaagagtaccctcccattggtcacaatactagagttcctccctgccttatctttatatacatatacaaatactagttgatggatgtgtgcctatggcacacttaacccatttttattattctcaatctcaattaagtattgggtttttttcccaatcaactaagtatagcaatatttttatgattttttattattattagtcaaggtacaatgcaagctcttaatgtaatttcattgtcaaagtttctacaaataaaataatccaacaaaatttgttgtctaatacatcaaactttggtatatataagcactttatacagttcaaatgaagaagaaaaaatacttatttctacttaattatactcttaatcttaaatatatgattacattgtgtgcttgaaattatttttgttactaaattatagccacaatccttatcaagtgtcatattaatattatttatttgttatatgctatatagattagaatttacaatatgctcactgttagacttaggagtgtcaatgggtcgggtcagatctgatccgtatatgatccaacctgatccagatcatgtaaggatctgccctgccccgccccgctagatcaaatactcgaatcggatcagatccgacccga

SEQ ID NO: 111753 - DNA, 1437 bp, Cannabis sativa
gagagagagagagggaagagagaaagtggtagtagtttttcagttttttctagagagagagagaggtgcacgagagggaagttttttcagtttttttagtttttttttcatattttaacaatttttttttttttaaaaaaaaaagtaaaatagaaagttcatgtaatcaaaggaattaatttgtacaaattagtggagggtctaaaatttgatattgggggttttattagggcaaaaagtaaaatttctcttcttttaataataaaaaaatagattaaattttgatcagctaaaattttaaaagttagtcgggtgggctgaattgagtaaaaaaaaatattgttcacattggagatgtcttaataattgacaaccacatcgactttgttatttcacttaggaaaaattaacgaccaacaatttttcatgtatgacgattattgatataatatactactattattatcttatgacaaaaaaacatttataattatgactaatttatatatgtgcaatgcaacaaattgatgattgcccattaaaaaacagagctaagagtgcattactagatacctaatacagatggcataaactgtattggtttggtcatagacaagattccattactagctgaagaagcatacaactcatggcacaacaacaaggtcgtcacaagcataaaattatcggatttttgcgaagaaatacttgtttggttataaaactaaaagaacaccatggcatcgcctttaaaatacgagatattaaacaaaaaattcgagatataaataaaaaaaagtgaagattttggttttgtatccacactcaaagaagaatctacatcagtaaatgactggtatgatcctcgtaaaaattcttacttcctgatgaaattgatgcagcagatgaaactactatgaccacaaaattatgagattatttacatggaaaaagttatctagtggtctttgatgatgtttggaataatcttttttggggtgacatgcaaaatgctttatccgatgaaaatgaaagaaatgggagagtagttataacaccaagaaatgtggaagttgttaatttttgcaaaacatcatccataatttacaaccccttcctccagagaaagcatggaaactcttttgaaataaggcttttcgaaatgaacttaataacccttcatcttccaacttcttttacacgtgtcataactatatatattgtttgctcaaaatatgagtataacaaaatgtaaaatacctcgtgttaaaaaaaaatatttttttaattttcaaaagtaaaaagcaaattttcagttatgtttccaaagacactcaaaatctgccaaaaatgagtagtaaatatgattagccagacaaaactacatattgacctatcataacattaatcaacaagaagtatatatatatatatata

SEQ ID NO: 111754 - DNA, 6780 bp, Cannabis sativa
tagatggaaaacttgtaactattctcagcattgatggtggtggagtaagaggcatcattcctgggataattttaaactttctggaaacccaacttcaagtatgttgatgaaactcggtgattttgaagttgagttttttcttcttttttttcatctcaatgtttttgatatttatgtgtgcataagcagcaactagatggcgaagatgcaaggattgcagactactttgattttattgctggaacaagcacaggaggcctagtaactgcaatgcttaccatgccgaatgaaagaaaccgtcctatgtttgctgcagaggagatcaagaacttttacttacatgagagtgagctgatctttcctcaaggatccgaagagggaaaaaaaagtatcctcatgtaagtcagtacagaaccccacctctcctccattgataactttcattgtagttatttcgaatgaaatgcttcaatgtgatttgatgatgggcaggtctaaaccccactgctatgacaacatagcgaattgggtcgaatcaatatggagttcctatggtgttccagcataccaaacgatggaagggttcattgaaatggttgaaagaaaagtattcaatcccaaatatgatggtgattatctgcataagaagattaaggatataactggagagaaaaggcttcatgagactttaaccaatgtaatcattccatcctttgatatcaagcttctccaacctgttatcttttccaccttgaaggtctgtatttttcctttaagttctatgacatcaaagtagtatcataatccatacaattgaattgagaacatcttttttaacttctaatgtaggcaaaacgtgatgattcagaagatcttttgctaacagatatctgcattggcacatcagcagcaccttactacttccctccatattatttcgaaaacaaatcatccaaaggcactaagagatttaacctcattgatggtggtgtggcagccaataaccctgtaatctttcagctctgtgtagtatttttcagtcaacatataaaaatttatgcttagctaactcatttcttccaaatttcccagacattgcttgcaattcgtgaggtgatgaaggagatgtctctagacgaaaattcatgttttgacatcatggatcacagcaagcttcttattctctctctcggaacaggctcatcgaagcagtgtgaaaagtttgaggctggagatggcaaaacctggggtctatataaatggttcaagggaccaaagggtaccacacccttaatggatgttgtcttgactgcaatggatgacatggttgatatctacatgtctgttttctttggagcctcttcctttaaggacaactatctcagagtccaggtaccaataaactggagtttggagtttgtgtttgcttatatttcttaacatcctttgattatgtaccaggtatgattcagatcaaagaaagagacatgtttaatatcggtgattttattaatgaaagtaggtggatagcttgaaatacactgaagcatcaacagacaactcaaagcaagaaaatctagaaaatctggtgaagattggtaatgagcttttgaagaaacctgttgctaatgtcaacctggaaactggtgtgtgtgaaccaactcaagacaaacgcacatatgaagaggagcttatcaagtaagaagaacatgaaatgacagtcaccactctggttttttaagtttgttgtcataacaagcttttcttctttgcaggttcgccaaaaggctgtcgtttgaaaggaggtgtcgccttggcctgggttgtttgttgcaataattgaaatgtatactcatgtttgacgatgcttattgctgttgtcttcagtcaaattagaaaatactcagggtgatttcttataagattctttgttcatcatcctcgaaacagaaatcaacaaataatttagcaatgcattagaaatgttcttaatttcaaccaatgtcactccacatctggacaggaccaagttcaacaagtaaaaattatcttatgatttttatggaaaaagatttagaccagtttatctatgggagtcagggtcctcattttctagatcaccaacaagatattgatctttaatctgaatcatcaaatgctcgcagtattgttatgttaaaaaaaaagtcatttccaggatgataaatggtattaatatattttccaggaaaaagaacccacatttcatgaataaagaaattttattttagtatcatcaaagcataaaatatacagagtcaaatattaagagattggagtaccccagcctgtaattcaggctttgcataagtatttagtacataaattatttccccgagaggcctcaagcaaaagcaacaaaaaacaatacaagttgcttggaatcttaatttaacaatttctacaagattagttctcagtcaactgtccacaatcttcaatgataacaggttgagaagtcattccactacctgaaccaaccttctccatttctttgactatgccatatccatcaacaactttcccaaaaacaacatgtttcccatcaagccagtcggtcttgtcagtgcatataaagaactgagagccattggtgtttcttcccgaattagccattgaaagaattccagggccagtgtgcttcaacttgaagttctcatcctcaaacttcataccataaattgactctccaccggtcccattacctctggtaaagtccccaccttgacacatgaagtttggtatgatcctgtgaaaggctgagcctttgtaatgcagtgccttccctgataccccaagacctttttctccggtgcatagagctcggaagttttcagcggtttttggcgtaacatcggcaaacaattccattacaactcggccagccttcatctttccaataaggatgtcaaagaagaccttggggttcgacatgttgtaaaaccaatttgtgatattttggttttcagaagaaaaagttcctgttcaaaatcaaagaatgtcaactaaaagataatccatataatcctcacaaaacaactcagagatccttaataataataataaaagctacatcatttgaaagagaaagtcagttaattagattgagaactcatattcctttcaaagtttatttaagctaaaaacttttttaccatttccagagcagagacattatctaaaacattaatgggtcttttctacatctctaagtaccagaaaaaaaaatgatattttaaatcatgtagctgaaaataacaacaaactcacaacaataataacacagacaaattataaatataaaaaattagatgggtcaagaaatgttcatcgtccgtgtaacaaccctccagcaaagaagcttcattagaggattcacaaagagggacgaccaatgattttgcacagtctttgagttcacgggcttttgtaaaaacacccacaaaccttcgatatgtgcgaatataaattcatgcaaaagcaaatagggtttagtacctgaagatgagactgtctctctaccgggtggctacaaagaagagagaatgagaaagagatgatcttcaagggtttagggttgtcattatataggcgtgtcgataaaaacggggtttagggttttggtttggggtctccgatttttcctttccaatattatccctgattgatttggaaaaaaaaaaaaaaaaaatagcattttcgatcttctactttttatatttatacatgttttcctctattttgaaaagtattcttttcatcctatgtttaacaattcaaaagagttttcataaacaacttttgtaaaaaaataataataaagtcttttttctacaaaatagaaagatcttaaatgataattttccttcttattttggcctcccttttcagaagaagttaaagtatattttttttatatcttaaccaaatttactttcaaataaaatttaatttaaatctttttatgagtattatactcaaattatcctcacacactcacataactaagacataatttcaaatataataactttgtgttctttgtagatggatgtgtaggcttgtggaaaagtttgagtaaaattttgattagagaataatgaaaactattgtgaagtgacatgagtaaaattggaaaaataattaaaaaaaaatagataaacataatagattttgaaaaaaaaaaaggtaaaaattaaagacataaaattaaaagaaagttagaaaaggggggtttcaagattgaaattaaaatagcagaaataaaagtaaaacaaacaaattaaaattgagactacgatatgagatactagttaaaggttattcgccaccctcaacaatcattcctaattcctattaaagaatgtaatttttttgtcagataactaaaagagaggctcctctctatttcgaattctctcttttctctcttataaaattcaaagtccctatagtgacaagtaccttgcccactcatattaagttagtactcgatcacagtgtggaagattatgaagaattccaacacctgaaggagatctaagttcaaatcttgttattactctacaatagaacagaacaagggttagagatctgaacggaagaagccataatagtctgcttccaccaatgtaaagttttctagaacatgatctgtgtttatttcattattttaggaaattcatgtttaggatgttagattataaaatataatcaaatatacatgttagtaaatctagatcctagtaaaataacttccaacagtataatgactgtaatcctcaatgtcttctctcataaacattttctccttcaattaattgtaacttatcgaagaagaaaatggatcactaaatccagcattactgagacctcaagcatcagtgattcctcaattattactgggactgccagcatcagtggttcctctaccattactggttccatctggacgactactagtagtaccaggtgtttggcaatcttctctacggggtcttattctaagtgttggttgcatgggtatttggtacgatagtggagtcacgttcaaagtaggaacctctatctcttggctgtctcttacatcatcattgccgtcaaaataacctttccagtctggaccatcaccaaactcatcatgaaagggcatttgtgctaaaattttggctatcagcaatggcaatacagtgtttgattctggtaacacattggctactatcttcaaatttataggtatagtacattaaaactagttttaaatttgctattatgaaactggtttttgaatgcacacatatattttataagttataatgttgaattgtgatttactctttcagtaatctgtatattgttttagggtaatgataaggagaagtcttagaaggaatctagccataaagaagaaaaagatgatgactttgaacttgagaagacagtttctgaatttgttccacttattggcaaaaaaaaatatatatgttcttaatgatggtagtgtatcaaaatatagttttatactctcaattcttgtggaaagttcctttctgattttgtaagtttttagttctttttattattttatatatatgtatgttttatttttgtagtgttttagtttgtataaaaccaattttatagttgtctattatattattgaacaacagtttctattctatttgaaataaccaatttcttatgtttggtttgatttttttttaacataagtttcagattttttatttagttattttaagaaactagtattgatgtgttaggttttaatttggttgtttggttgctttactaactgataaatgtaactggtttctgtgattcagattcaaacgtctaactccggtgatgatttcaacgtcaaactccggtgatggcgacaactctaacgacttttttgatgattttttcaagtgacaatgctaattctgacaattttttcggcaccgataacaaatcggtgcatttttcggcaccaacaacaactcttacaactttttcgagatcggtgacaactctagtgacttttcagtcgtcggtggcaactctggcgatcactgttctttcatttgtttctattttttttcttaaataaaatataaatgtaattttaatattttttatggtaatagaaagtggcatatcccatatatgtcaagttatttattttaaatgctatattttttcctattaaattttcttatcatatttatgtaaattagctttgtttttaccatatttatataaagagcattgttattaggcacaagttgtgtctagcaccttttcaacatgtcgcgttgcgattggctagcgatactccctaaaagctattatattaaattaattaaaacccaatagttagttggaccaatagcgatattaacacataaaagggtgttgtgcaccactggtgtcctttagcatttctcttatataaataaccctattaataacccttgagaaatctttaaatacgtaattgataactaaagtggtctagtttagtcatttcacaaaaaattaaatgcgtaattaaatcttttaaaattttgagatagggtgtcaatataactcccccttaattggataaatttgaagataatactgaaaaaaaaaaacaaaaatcttttaattacgacttcataaaggacatttttttggttacgggttgggagacttgttgtaactgttgggttttgtgccctaaataaaacccattac

SEQ ID NO: 111755 - DNA, 1724 bp, Cannabis sativa
tatatatatgcacctcctcctgaagcttctgtttttcttttgacatgtgatcaaagtcatgtttaagggcctcataagagcgttcgatttgcctagctttccagcgagctcgcctgttttggaaccatacagcaatttggcgaggctccagcccaagctctcttgacagcttcattttcctatctggttccagcttaattccctcctgaaagctcctctccaataactccaactgattgttagttaatgttctcttcttcttctcctgaaagctactacggctgatcatgtccctttcaatagaaggccgactactatttaacccttgtgctgtctcagctgacagtattgcctgatcatgcttcacctccattccacctttacaaaatgaaaaaagtttatgtacacaaggttatattttgaaaacgatcgatgctttgctaatgatatctaaactgatagtgagatcataaagaaaagtgtatctaatttcttaccatgataataggagtcgtagtcattgtggaaagggttgccgtaggaagattcagttcgagaaacactagtgtgtcttgtattgccattccaatccattaattttgtttttctctggatatatcttcacacaactactacgtactctgattaatttgtctatatatagtgcgtatttatagaggctacaactacaagcaggggtaatccaactaaatatatggacctacctagggatgatcgcataatataatataatatttatgatagatgatgtaacttgtacgtacaaactactgtcggctctgtgtgtcaaagaaagttaactgatcaatcccatgtcagcggcttttgtcgtctttccttcactttttggctatggttcttttgggtggggtgagtggtttttttttaacgtatatattaatataacagagtgaaacgagagaacagagcttatatgtacttatgatgtggatcgatcgatgcatgagaaagtggaaagtggggacaggcaattcatgaaacacacatatatatatatatattatacatatacatatggccggggccaaatattgccaaacacaagctatgcatgcatgcagagagatcatatacataattacgtattgagacccccactacttcaatttgaatacactctctttaccggttgatttagattatctaatgtgtaactctctcaatcatttcccaacaactgtacgccagtcactgactcatttaattaagccatcttctcataacgtctctctatagctcctacacatatatactggcgtacgtactgtatatgtttaactaatatgagtgttattataacacataaggagcgatatatgtattgtagtacttaattaccaatatagcaaaggaccaaaattcattaatataaacaattaaagtaattaaagtggtcgacgacgtattggaaagatgtatagttgtcagactcatagaaggcatattaccctttccatcatggcataaatttttatttttacccctctattactatttctctccacatcatagtaacttcggtgacgccttaaggtccattattatacctgacctgcggctgtgaccccataatgcatttatgtataaattatgaagcatgaattttcttgagggtgtgtgttgggccactgttcgagtgccaatttatgcatgattctaatatataaacgcttaaattaaaa

SEQ ID NO: 111756 - DNA, 6000 bp, Cannabis sativa
  modified_base (28)..(31): a, c, t, g, unknown or other
  modified_base (5456)..(5464): a, c, t, g, unknown or other
ttttgaaaagatttccgtgtgacagtannnntgtaaaagttaacccaaattctagtatttttgtaagttttcctttaaggaaatttattggacctatatattttgtttttttttttatgaattagggaaatttattacaccaacaaacaattttttttttatttttaccacaattaattatttatggtatgtaaaaactaatttaaaataataattactaataattattaaataagacataatttaaatatttttatcaacttgacaacaaatgccaaaattaatagaataccctttttttatttctcttctcttcttctctattttcacttagcattaaaaattcacatatacttttttttttgagtgaaaatgtaaacttcattactttagatcatccaaaaccaacgaagaaactacaaaaggtaaagaaaaacaattaaaaatacgatcagcctcaagaagagaggatcgcgccaaactatgcgctaccctattcgcagatcgctttacaaaactaagagagatgttaccaatctcggcatataaagccttacactctgagattatatggccatatcccgaatactccggggaccataagctcatgaaatataggctcctaataaaatagatctaaaatttaacaaataaattttttaacttattaattcctcataactccactatagattcgaaattacactcctaatttcacggaacactctatatacataatataaacacgttatgtattattcataatttctatcaaattaatcaatgatcctctatagacagtttacaataaggaggggctaaattactattttacccctctatatattttatctttgaacacttggttccttgtaaatagatttcagtaaactaatatgattattgaaatcagatttcttcatttaacgtctttaaccaagctcaaaagaaactatcgtttcaatgaaaacaaatagaagctataaatgtccatatctatgattaacactggcactcaattatattactaagttcctaaaatgcaagtgtttgctagtccatagggaagagcttgtaacgaaaaaatcaaagaacttaaatagtaggattagcttaaagcttaatcatctcattcagtaggctattaagtcagcatgcccatatctatctagaacctgtacttctctttgtatcttgtctctagccagtttgtaactttttagatcatcccttttggaatcatcttctgaatcatcactttcatgatctacatgtgtttcagtctccactcttgccagaggctccacctcaagctccgctcttagagcttcgatttcatttcggtcaatattagtttgacttccagcaggtttatcaataactctcataacgaactcattaaatgtcacatccctactaattatatatttcctcattctggactccaaacaccacagtctatgacctttgtctccttctggataccctaagaaaatacactttaaggcccttgcctcaagtttgtcttacctaatgtgtgcgtaacaaacacatctgaaaaccttcaagcgttcataactcattggttttcctgactgcacctcatctggcatcttaaaatctagtgttgttaacaaacatatcaaataagctgtagtggatacaacaactgcccaaaattctttaggcaatccaacacccaatacaatgcacatgactctttccaagatagttctattgaatctctccgcgagtccatttcgctgaggagtcttcctcacagtcttgtgccttgctattccctccttcttacataacaaatcaaactctcctgaacaatattacagaccattatccgttctaagttgtttcactttcctttcggtttgattctcaatcattatcttccagtatttaaatctttcaagaacttctatcttattctttagaataaactcccataactttcttaagtaatcatcaactattgaaagaaaatacctgctctcagggtgtgatagtgtcctcgagggtccccataaattactatgaacgtaatccagtgttcccttggtatccctttttccagttccaaacttgactctacaagtcgtaccaagaacacaatactcacagaaacccaactgctcaagctttacttttccaagtagtcattgcttgtttagttcatacaaccctctttcactcacatggccaagtctcttgtgccatacttcagtttcatttacatgctttcttagaacacacgcctttgtgttgttcgctgtgatgccttccagagtatgaatcccatttgatttatttccccttatcaccaccatcgaacctttgcaaaatttcatggctccattctcaattttaaaaagaaatcctttatcatctaacattctaacagagattaaatttcttttgagatcagttactagtcgaacgtccttcagcaccctttccataccatcatgaagtttcaatcttatggttccaatttccactatcttataagacttgttgtctccaaaatacacaatctcatactttccaaatgtaaattcttcgaaccaagatttataaggtgtcatatggatgaacacccaaaatccaagatccattcagaatctgaattctcagaggttaccagtaaagaaccagttgagtcataaccgtcacttatcactattgtatccccttctaatcttgtatcattcgtcttatgcctttctggatatgaccttctgagatgcctcattttcttggaaatccagcatttaagattctttcgaccatcagcctgtgatttagatcttgattttccttttgaacctttacaaatttctctcttttcacttatgcccttgtaaacaatccatcaacacttccaaaattctttaattaactcacttgtttgattcaattcttttgaattcaaggctgattgcatatcatcaagcgtgatcgactcttttccatataacattgtatctttaaagtgtccaaagactttggtaaggaactaagtaacaacaaagcttgatcttcttcttcaatggttacaccaacattctcaaggttgagaatcaacttgttaaactcatcaatttgttctctaataaacttgtcctccatcatcttgaatgaatatggggcctttttttagatataatctattcaccaacgatttagtcatatacaaactttaagttttagtcaaacacctacgcttgtatcttcttttgcaacctttctcaaaatcttatctctaagattcaaaatgatagtactatgagcatttgcaagagtctctttcttgtctttttcagacatggattcaggaagagacttttttcccagcagagcctcatacaacccttagtgaaccaacaaagcctttatcttcatccttcataatctaaagtcattcgtaccggtaaactttttgacatcatattttgcggcagctatatatgattacaaatttcgctctgataccaatttattgtgcgaaatagaaataatcattgacttaccattaagtatactaaccaaaaaaacatacaaaataattaagaacaatatatcaagagatcacaagaaccaagcaatgaattaaagcagtaaaacagagaagaataacactaagtttaacgaattcaagccttgtgcaatgctctacgtcttggttggaataacagcagtcatatctttattgatatcagtgttatcaaggttacaagaatcctttacaaactctccgagattacgagaaaatgtttctctctctaatttagactcgctctctctctcaaccttacactatcacgatttttattcaagtaattatggtctgattcacctacatattactaagattgatagctacttatagatttgtattatttcctaaaatagctctaaaactatcttggcacatatacaccatcttaaatgtttcatctcatcatcagcaaaattaatccacgtctgctttgagaacacactttcaatatagacaatccgaaagctttaatacgaataagttattcagattcgtacaagcactccttttggatgaacatctttgagtgacaataagttatccgaaagtgcgtctcaagactaatgataagctatctgcaaggcactattttatggaagacaagattcacgaaagacccatccggattggccatatctttactaacaaagttccaggatgaatatcaaacttttcgtaactttttttcggagtaacaatagttttatggaagataaaacttgcaaccataatcaacaatatgatattattggcatgaagaatagtatactggtgatccatatctattagagaaaccagaatataagatattgatgatcattcaatgaagttacttgatgaaatacaagagaattttcttgatgttctcaaaaaaaattgataatttacttaatgacaaaaataaactctagttcaataattgttaaaaatttatataactaataatgatgaaattttacaacataaaagaattaataacttatggtttattccgctacaaacaaataagagtaagaagatttagaaacctatttctcaaaaattattatggtacttgtctttaattttttttggctttaatgattatattgtagtgtacaagttacaacactctaaaaacttgaactagcacaaaattagacaagtgacggaaaattcagacatccgacacattcacaagccactaatcacatttctttcaaagaaaaaatattacttggatttctgtaagaaccgatcaattttgtcccacatccaacaaaaacttaaactataacaatagatatgcacatttataagaaacctcaatatttagaaaagtaatctataaaagtaagattttcattttataattaagtgaaaatctttttcaacagttttttaattatacagaagatagtttttctttttatatggaaatttaatttttcttcaaatgtacaattatggttagttgttaactaacacaccaaaatacacacctgaatggaagatgttatggatgtgcgaccataatacatacgtgaatgtaacgtgagaaatggaagaagacaattgattgggaaatagaagaagatattgatgcataattaaaaattggcaaattaaaatttttgtctctgaattttcacatgtactaaattatgttttataaatttttttggccgtgaattttttttttttaatttattgagattgttgaatttaaggatatttgtctaatttcatttaattttactaattcgctaattgtctatgtactaaattatgcttcccagacatatttactaaattatgcccttcaaactttaacacatactaaatcatgttcctaaatttttatcaatgttagactttatttactaaaattggacaaaagtcnnnnnnnnnaacaatctcaataattcaaggagaatttttaacaatcttaaaaattcaagaaatataatttggtacatgtcaaagttctggaaacaaaagttctaattagaccatgtgttttgtaaaagttactgactgcatcttctattttgttaaatgataaaatagatcctatgtttttcaaaatggtacaaatagaactttgaacttaattttcaatattttttttaatataatcaacttaaaggcagttcataatatgaacaaatgtagaaaatataattagcattgtcatagcacctttagattgagttataattaagttttattttaacaaaaaaatcaattcaaagtattatttcgtactattttaaaaaattaaggtctatttagtcatttaacaaaataaaaagtttaatcactaatgtataagacacatggtctaaaatgatactcacttttatataattttaatatttaatacccatcaatgggtaatactttttagaaatttttacatgaaaaatccattttacacaatttat

SEQ ID NO: 111757 - DNA, 2880 bp, Cannabis sativa
  modified_base (2347)..(2351): a, c, t, g, unknown or other
tactggaatttgggtcaacttttataaaaatactgtcactcagaatttttttaaaaaatactgtgtttttataaaacaacagtaaaacacaaaacataataaaaacaatggtggaacaattataaaacaaccgtagaacaacagttaaaattaaacacagtacataatataaaatttacaaagtattttttaaaaaaattctgccccacaatataaaagtaaaaaaaaattaaaattctaatatgtggtgtaattatccattttattcaggacatgtgctacctctaaaggaggcccaaagcgaaattgggctcaaatcaaggtataactagatgggctagatggtgtcatccataaagttgatgttaatattacaaaaatatagttttttttttggtctttttaacatttttaatgttacactcttttttttttttgggagattttttctacaataattaaataaaaaaacttaatattgacatttattttttatcatcttctttaaaaatagtaaaaaaaatatatactcacatattaaaagaatcactttaaaaagtacatcaggatagttaatttgtgagcccaaataattactgatgttgttggaattttttttttgaaatataattaattttatgataattttgattagtttttggttaattagtcaaaagaaactaaaagttattatttttttttttgcttcaatcatttttttagtgatattgaaaagatatatttttcttaaattaaaataaccacattaaaaaataaagtaggctatgatagaataacttttgtgattaaataagggtaaataccattttagatcctgtgttttgcaaaagttaccgattgcaccctatattttgttaaatgataaagtggaccctgtatttttcaaaatagtaaaaataagatcctgagcttaatttttgacaatttttttttttaatataatcaacttgaaaataattcctagtacgaatagatgagaaaatataaacaattttgtcataacacttttagattgaattataattaaattttatttgataaaaaatcaatttacggttctatttgtaccattttagaaaatagagggtccattttatcatttaacaaaacagaaggtcaaattgataatttttgtaaaatacaggatcctaaatggtatttacccatcaaataattataggtgtagttaaaaaagatttttaaaattattaagagagagatcgtgaatatttaatttgagtgtttttttattagaaaagaatgaaagaaaattttcaccatcacttatatattttttaacttttgttatatatattgttttctaagaaaaagaaaaaaagaatacatatcgagaaagagggagggagttgtagaggagaaagcaaacaacttcgtgtattagctagagatatatttctttctaattttggtatacgtgtcaatacaaaattcaataatttttttttcttttttatttttttaaaaataaaacgttatatagatagaaaaattacatttctcggtcattacaaagcatagcatcaagtatcgaagatggctacacaaaacctcaacaataaattaacaagtgtacaacataaaaagactgtattttctgtaaataaatttataaaaatatttaaaattccgtacaaccgtatttttatatttctttttgttatttataaagatatttgttttgaagaaatgtaactcggcattagaaaacttcaaagtgggcttaaacaaggcctatagcataaagacaactctacacacggtttacagcataacaagcccacaatccttgattttcatggttacccggcccaaataaatgtagtttttaaatgcaaaatatgcttgtacaatgcattatttatttggtttaacatctaatatttttttttaatatttatgtaaattataattatttaaaacatcttaaaaatttttaaaaactgtaaagtaatttacaatttaaaaagtaatattcaaacattctatgtcacatatgtataaaataaaataatcatgtgtgtgcaatatattgtttgaattctgtttttcgatctgttaaatttttttaaattttttaaatttgataagatatcttaaataaccataacgcatatgcttatgagaaaaatttgattaaaagttattggataccaaaacaaataaaagtacatcaatacattcgttttaagggaggacattgtaaaggttatttatttttgtttgtttaaacataatatggccataaatagcactacaaaatttttttacttttagtcacaacaaaatttgtgactaaaagtgaaannnnngtgactaattataaattatgatttatttattagtcacaaaaattacaatttgttgtgactaattgtatttttagtcataatacttgttgtgacttaaaattaaattagtgacaacttgtaactaaatactatgttttagtcacaaataacattttcttgtgactaaaagttacatttagtcacaaaaaaattagagtaattggcggctaaaccatcccaactcttattttacttgcacttaaccatccaaactcaaattttggtgggaaaacctaacaaactataattctgtttgtatttttaaggtgtcgtctaacaaattctgttaatttgttattttgcttatgtggctagtgacacatcactattagaatctaacgtggctgccaacatagattgtacatgtatacaaatatacacgtgtcgcatttagattggtctaattaatttatattatctaaaattgaaaaataaaaactaaagtttaaaaaataaaaattatttcagattcttattctttacaaaaaaa

SEQ ID NO: 111758 - DNA, 5093 bp, Cannabis sativa
aatcactgaaatagtaaaattgaataaaattagacaaaagttcttaaatctaacaatcttaatagttcaaagagaatttttaacgaccaaataaatttaggggcataaattaatacatattaaaatttaagaggcaaaaatcttaattagtcaaaaaaaaaaaaaaaaaaaaaaagtttcaaaaacacccttatatgttttttttttttcaacaaaaacaccccaatgtcttgagtcttcatctttctttaatcttttatcaaacgctgagcatagtttaaagcaagaagcgccgcctctccttctgtaaatcccctcggcgcacacccatttagagcagagttcgaaaatgtctattactcagagccttgcttcctccatctccatctcatcctcttcatctgcattcttcgttcccaccagcttcgtccccaggtacagcttctttcttaaatcctcaaaaacaaaactttcattgattattgacgatgatgatggtcaccacaagcttccgatgaatttttttcctttctttctttacttctagcttgaaattattaaacttacttgaaaaccaaaacactgagttttccttattcttaagtgtttcattttctctcatttgttgcgttttgaaatctgtctgctgcagatttcagaatgttcagtttccggcgaaatccattggggtctgtaaatgtgttgctacgccccaagaacaggagactggtatagcttttggtttttgttcccaatcgcaattttgaaattctttacttgttttatgttttatggtgttgatcatgttttcctcgttgtgataaagttttcaagaccaaggtttctcgcaatgcgaacataggcaagctccaagctggttatctttttccggaggtatgctatgctttcctttttgatactaattttctgtttcttctttagaacaccttaaaaattggtatttatcacaattgcgattcctgcaggttagtttagctgtaaacataagaaatgcttgttgttgttgtggattatattgggagagaatcacttcacttcagtgttttcaccaagaaatgacaactgttatctgttatatgtaaataatatctatagttgatgttcttagtttcttcacttacacaaattttccaacttatttgtagagattgagatggtatcgtattttctaataaaaggattataaagaggagtaaaacttttgattttcaatttttttattaaatttgtcagtatgcttatgcatgtaaactacatctattgcaattcatgctttctcttttttagtggatctctctctctctctctctctctctctctcttgtctagattgtttacctgtttattttctttgcttgtcaattatatagtaggtggatcataattatgaatctttcatttgttttaatagattgctagaagaaggaacgcacacttgctgaagtaccctgatgcaaaggtgataagccttggaatcggtgatactacagagcccattcccgaagttataacatctgcaatgtcagcggtactatatactcttattcttatatagtataggttttgctacttccagaacagaggtggccttatagtctgggcttcctaatttttgtttcattgtctattgttgattcttgacatatcgactagtttgtctttattcataagttacttttttttttctctttggttgtaattttaatgccactacaacttgaaatggagtttgacagactaactcacagtgtaagcaaaagttgatatgccatcaatctatttctcaccacatttccatatttgttttactttgacagcgatcgcatgccttgtccacccgagaaggttatagtggttatggagctgaacagggtgagaaggtattcatagttttggttactttgttattgttctgtaaaaaagtttttcagctgtagctagtaatttaaactttatagtttttgcacaatttatttgttattcttatttattttttttttttttcatattatctttcttaatccataataaggttatagagggatacaaagttgccctttcctgctaatttttcatcaatagaatactgttattgaaggcttacaaattttcgcttgtgtctagccattgagaactgcaattgcttcaacattttatcgtgagtttggcatagaggatgatgacatatttgtatcagatggtgcaaaatgtgatatatcacgacttcaggtttcattcgttaatgtttctttctcttttactgaaatactgattgttgaacacattgaaatttgttctcagctgttattaacttatttgtttgcacttgtaggttgttttcgggtctgatgttacaatggcagtccaagatccatcctatccggtacttttagcagcttactgatttcatgagcaaaacattattgtaagataatgcataggattgtattgttactgaactttggtgtgacataaaggagaaattcagccatcatgacatgttaatgatgttttcatgttttacctggttaattacgatgtagaatttattctattcttatctgcaggcttatgtagattccagtgttattatgggtcagactggacagtttcagaaggatgttgagaaatacgcaaatattgagtatatgagatgtactcctgaaaatggtttcttccctgatttatcgtctatttcacgaacagatataatatttttttgttcgccaaacaatcctactggctctgctgcaacaagagaacaattgactcaacttgtaaagtttgctaaggataacgggtcaattatagtctatgatactgcgtatgctttatatatgtcagaggacaacccccgaaccatctttgaaatccctggtgccaaagaggtgagtgttttttttttgttttttttgccatgaaacttatttattattacctttcattcagtatctcaattttcagtgatgaatggatgggtgcatgctttttaagttttaacatgtattgcaggttgctattgagacatcatcattcagtaagtatgctggtttcactggggtacgattggggtggactgttgttccaaaacaactgcttttctccgatggatcccctgttgccaaggacttcaaccgcattgtttcgacttgcttcaatggagcatccaacattgcccaagcaggagctctggcttgcctttcaccagaaggccttaaggttagtttctaagtggttgataacatcaaaaagataagacagaagactgtctacgatattagttgggcacctttgtcagttcctgtgcaagttttatggattagtaacggtccttttgagtcatatgatggttcttacaggaacatctatggttcaatgtactcaaaactggaggctttgacagtatacaaagcaatatgattcatactactgtgataacaaactttacatttagtttattgctctatccctatgcaggctatgcacgaggtgattggtttctacaaagaaaacacagagataattgtggagacattcaactcacttgggttcaaggtgtatggagggaagaatgcaccctatgtgtgggttcatttccccggtcgaagctcatgggatgtctttagtgagattcttgagaagactcatgtcgttaccacgcctgggagtggttttggacccggtggtgaaggttttatcagggtaagtgcatttggtcatagggagaatgtattagaggcctgtagaagattcaagcagctataccagtgaaccacatgatctgatatgctctcgttgtattaaagccaaatataataattaacaattatattgttggctttctttgtattctctaactagtaaacttgagctagtaggatagtactattgttatctcttatgttttggattggaataaagcaggatgccttttgttaccatttgttgaaaagcatgagaatagccccggtttcagtgagttttatcttttagttctttaaaagatggtgctatagtgccataggccatttttcgttgctattttactgttttgactttgttcaataaatcatgtataacttttatgtttggactccaaatgagatgatttaacatgttttggaaaactgggaataagttctatcattttgaattttataagctctttgagaaaataatgaaaatattatcaaaaatagatttaaagatatcagtctattacaaaattcttttaagtataaatttacacacttagcgaaaatatttcaaatctatacaaaaataaatactaattcatttaataattgactaagaacgagtgaataaatgtgcactcatcaaaagatcttttaacaaaaatcatatttagaagctttctcaagaagagtttcttaaaaagttacactcaaagtaaaagtaagcaaaaccaaggaggaaattaaactctatactttttttatattgtccttttttatttttactctcatttttaaagtctattatttttatctattttttttaaaacactttaccaattttgctcctgtcacttcaatatactctccatgtgactttcttatgtcagggtattctaggccgggtatagtacatataaaaaaaaaggtatatttcaattaaatataaattagaggtaaatttgattaattgataaataaaaaaagtatttttaaatatacgccaaaacaagaccttagtgtttgaatggaaatgtgttttctttttccttttaaagaaggaaaaatggatatgtttctttaaaagaaagaaaaatggaaatgtttctccactaatgcgtaataaattttgagaggatgaagttactcattattattttatttttattttttgacaaaacatattgaagttattagtgtaaagaaaagactaatttgaatttttgccccctgaattttgacatgtaccaaattatgttctttgaacttttcaggttgtaaaaaattcccctcgaattattgagattgttggatttaaagacttttgtccaattttattaaaaaaaatctaacgtggatgaaaatttaaggggcaca

SEQ ID NO: 111759 - DNA, 4521 bp, Cannabis sativa
tttggataggcgatgacccctgcgacttaatggactttctttctttttagcgggctccctttctctcaaaaaaaaaaaaaaaaagttcatataaatatatattatataagagataattacatggtaacattaaacttgccaccccactcaacatcctctgaaatggtaccattagaacattttcaatggtagcatccagatgctaaaaatttatacataatctcaaaatttaatattttattttatcttttttttcatattatttttggcacacttacttttaaaaatattccaatatataatatttttaaaaaatattataattataattttacacattattatttaatatataaaccttaattgttagtgacaataattttttagctttaattttttattaaaaaataatgaatatgatcaatactacaacatatacaaatttatagaatatcattatcttctctccttacagtatcttaatatattttgccaatttatataaatactatgttatagcattgatactattcattattttttaataaaaaattaaagctaaaaaattattgtaactaaaaattaagatatatattaaataataatgtataagattataattatagcattttattaaagtgtttttataaataaaatattaaaaaaaaattatattttaaaataatgtataaatttttaacattattcaaaaatactagcatgctcttatttcaatgtgaatttaatgtgtgttcaaaaaaaaaatgtgaatttaatgcaacataatatctgtctaccatatcgttacctttcttttaagaattatcttgtttttatctgaaacgaaattggattagtgacgtggacgtggaactgataaaaaccccgttcttatctcttcatcattttattttaatttatccattttgtgccacttgtttaattaattaaagtaaactgatgtggtcaagggaggaccgatactatggtggggccacagagagagagtgggtgtgatttccatattagttggtcccataaagagattaaggttgtaaaatttaaatttgatattaaatcaacacttaaaaaattattatttttatattatttttttttcaattttaattacaactctaaaatttacattaaattttttattttttataattcttttattttattaatataataaaaatattttaatactaaatatatataatttttagtttttttttcttaaaaatattatttaattattaaaaacaaaaaaaaaatagtgtagtctacaatactcactaaatttagtaggatattatagatgttgaccgagattttcaacaaccaattaaatgagataatgatgaaagctttggagtaattaatgcaagtggtttttacgtggttcgagcattaatgaaccgtaatccacgagtcttttgtattaatgagagttcttgtacaaagaatgttcttggtgaattctctctcttgtttttcttttttgatccccctttcccattttgttcaagggtatttatagagtttggtaaagatcacttgtctttgagtgtcagccatgtatgtgcacaagttcctaagagatgtaaaatagggcatacatgacctatgtcgtaggtatcatagggattaggtgagagtaatctttcaccttctttgattgatgtgattcttcataatggagtcgtcactagaccctttgattatcgtgtaatcgccgtaaacgagacttacgccatctgtcatgtcctcttatgggcgttctaagacatttcctccatcctgcattaaatgtgaagtgactgttcgaacaggttctccttctcccggaggtgctttgttgtatttccagctcccagagaagaagggcatgctttatgtgcctctccgggggctcactccctgaagtgcacttgcccgtctatgtatgacttaactaatttcgtgggtaaggtgtccttgaggtccacgtgtcacatgtagccacggtcacatattttaggaaaaatctgaggcaacaatagataaaaccatttatgagtttagtgttccattaaagtaaatatagtgtgaaactacactatatttagtgttttagagactggttagaaatagccttaagaacactctcataagtttctctactcttattctttaaattataacattaaaattaaactttttttatttacatcaaacttttacattacaacctacattagtttctttattttctatcttcatattatttaaatataaataaaatattatttatatattattaaaatactttttaaaaaataaaatattataatataagaatgaataatatttttatgtagagaaacattattacattttttatttggttctttctaataaatgaattgatatagcactttttttgtctatttttttctctcctctaaaataaaataaaataaaataaaatcatggcaatttacaaggaagaaagaaagaaacttactcaacttgtgacgaatcctgaaccttgaataatgtactgaagagttgaaagcagggatggagcaccttgcttgtctgggcgactacacctatgctcacaccttctttcactatcttccctctttttgtttgatgatgatgaaatgaaaagagtatgtgaaatttgattgcctgtattatttcttataaagaatggagtcattaaatggccattatgaaaatttttcttaaaaagggaagttcaggattcatctttgtaaagattaatatgaacatacctatgtcatactcacatcatcaaaagaacagatagcgtcaaattctaagtctttttcagcaagggtgcacactaggttacgaagtgtgcctactgggtgcacactaggttacgaagtgtgcctacttagtgcacagaacaacatataagtctctaattactaaaaatggttaattgaagacttaggagtcaaatatttacccaaaatttttgctaggtgacatggcacacaattaatgagaagacatgtcatcccagagaagatttggaaagtgtactctaaaagaaagcaagaaaataaagcccgaaggcctagataaaatacttgggcgacatgtcacatagtatgccactcaggtactaaccctagctaaacacttgggcgacattcatgtgcctcccattttacttttgagtaacaatttagtgttcttaagttacctttctcagattatgatttgataagcctcgccaaaatgaaaaggtaagttagagcgccctgagtgtgaagcaaacacttgggaaacatacatcatatgctgtctaagtatatgcctcccagcttgtgcaacatattgagtaccccaagtactttttggggtgcatttaggcgttttcaagtcatctttcaaagtaaagggcgatctaaagcatctagcgggagaaaaactaaggttcagagtgccccaagtgtggagaatacacttggacgacatgccttatgtttcccaggtatatgcatctcagcctggacaacatggtgacactccccaagcactctggggtgtggtttctcgataaaagcttatgtcccacacccacaatccgaaatcttccaaagatcaaacatgtgaaatcaactaagtgtcttaacaacataaagatcccccctcctaggtatacacttgggtggcataaaaaatcaactcggaggtagacctaagaggtgtacaatcagggtacagagaaatagctttctcaaactatgcttattactatctgcatgaaccctaacacttagagtgtactcaagagacaaaacatgcttcacaagaaataaatatgacaacacaacaccgtacaagtagcacttgtccccctaggcgtcatacacatgtgctatcccctccccttcggtgtaggtgaagaccaagctagaagcaccaccttcagcacccaagatccaagctaatcgaaatcccaccaatcaaggaagctgattagggtgcgaatttgctcaataaatgttgattgtgatgcatatttgtgtaattatgctgattattttcttttttgctataaatattaggcttctatcaactggaaaaaggttcacacttttcctgtaagcataaactctgaataaattattataattctctctgttctcaagaaactcatttgagctatcttgtgagtacagtatagaaaaaaatctaactaaaaggggagtatgctattaccactgaaattagggttgaacctctataacaaatctggtgtcaatattactacaatctttgctatcttatacttactactggttttttacttagtttttatgactccacgtcagttgaccaaaaaccaagtcacaatttggatccagagtgggctcttgtattgggttttttcaggttgggactgtgttgtgggggttgttagacttttatttgggcttacattaaattttattggttttattaaaacttgggttgattggatagttctttgct

SEQ ID NO: 111760 - DNA, 3241 bp, Cannabis sativa
  modified_base (2903)..(2904): a, c, t, g, unknown or other
gcataaaacccaacagcagcaacaataaagctatcaatgatctggttgtttctcttaacagtcgattctctctcaaagatctaggagatctgcactatttttttggcattgaggtgaagtctacaccttctggattacatctctcccaagcaaaatacattcgggaccttctcttcaaagctcaaatgcatgatgcaaagccatcccccacaccaatgattagcagcctcagattatcagcctatggtagtgaaccaactcctgatgctcaactatatcgatccattgtaggagctctttaatacctcctcatcacaagacctgaaatttctttcagtgtcaacaaagtctgccagttcatgaaggatccccaattaagccactggctagccgtgaagaggatattaagatatcttagtggtaccatcaatcatggtttgcatctcaaaaagtcctctttacaagaagttgttgcgttttgtgatgcagattgggccactgatattgatgatcgacgctcaacttctggtttcactatcttctatggagacaaccttgttgcttggcaatgcaaaaagcaacacaccatctcacgatcgagcaccgaagctgagtttagaagtcttgccagtacagtagaagagagaggactccgtcaaggaaacctaatgtcacctcttctctttgtgatcggaatgaagtacttattcaaaattatggctagaatagccaagatctatgacttcgcctttcacccatgatgtaagagattgagcctaaacaatctttaattattttgcaggtgacttgcttcttttttgcaagggagattttaaatccgcccttctctttcttagaagctttcagttgttttcttagaagctgtctatggagcaagtatggatcatctttccttggttagaatattattattaatttgtttggttttaagaagagcttttctccttttaagtatcttggcatgacaatttgtccgaaaagaattttgagagctaatggtgaaggtttagtggagaagatgacagctagaatcaaatctggagttctaggaacctttcttatgtaggaagaatggttcttatcaactctgttttgatgtcaattaatacttactggtcacaaattgttattttgtctaagtttaatttttgacggtaataatatctaagttatatttttagaactcttataagtacctgactgttaatggttaagtaaattgtcacgtggcaattcctgattggtccacgtcattaaaatttcaattttttttaaatataccaataagaaaatgatacttggataataatttaacatttaacggtcacgtacttatggagtttcaaaaatgtaacttaggtattattaccgccaaaaattaaacttaagtatttatttacaactgagaattaaacttaaatatttatactgtaaattactcttttaattattttaaattgttatttcttataagtctagatcaattttattctttattcctttaaaataacccttatcttagaatgaattacaaattccatatgagggactcaaagagatgtcatgtcaaatttagatgatcgtaatatatatatatatattaatatatttggaaaagaatatagaatataagcatattattactgacgttttagcaaaaggtttgatctctatttagaaaagtagaaatatagtttctacaagttgtggtttaaaaaagcagatccattaattaaaaatggttctagtttttttgactgatcaattgggaaaattctcttaatggaagaatcatggccatgaccacaaataatattgtatatatatacttaccaatggaaatagattaattattccaaagtggataagaaaaaaaatattaatattttcccaaaatgcttaccaatcaaaattggtaaacatcaaggtataataataataataatttattaattattgtgtgtaatagtaataaaggcaaggttccaatatatactagaaagatgctcatattgagaaaaattatcaattttttagtgataagtgggggtagtatatataaatatagattatataggcttccatatatactgttgtataaagtcaaagatttgaatattattattaggggtgcatgcatgagcatcaattaattttatatatatatatatagatttaattataaccaacacaatatttattaaattatcaaaattttattatgtagttaaagttaaataacggctaatataataaacgataaacaatgtgagcatcaatgagttattgtggaatatttgaataagttgctagtacttaatataaatgtaattaatttttttaactggtttttttatttttactttaaatagtttttttttttttgtattttacagaatttcacataaaattttttatttgaactaacaaaataacttaaatcgcaactaaaatatccgtataccaacccacataaaaactactggagaaaccatttaaaaaatccaaaccgtaaattttaaaaaaaaaattaatatacagtgtaattttcctttctttaattatattataaaaaacattcttactaatacaattaactcaataaattgggtaaattgatctatttttgcaagtgtcatatggcgagtattttttttgtgctggttggactacacttcgttgtttgatcctcttttttggtctctcccgcaataattttgttggaatttttacactatatacttaaaatttcactttttttttttttttacttttttttattgtggggtaatttttttttaaaaaaaaaatactatatatttttcatactgtgtactatgttaagttttcactattgttccactattattttttagttgttnnactgttatttttaattgttttgttttgttgttttacggttgttttataaaaggacagtatttttataaaaaattctgtgtggcagtaaaattgtaaacgttcacattttgaaatgactacgatgttctagggtttgaatgttgttttatttaggtttaggaagttgggctctaccaaatttagcaattcattgacaacgcaactgccatttggtaacaaatcgctcagaactattattagctaaaagtttgttatagagtcagttgttagtgtggaaaaattacaactattgtgcagaattaagttatctaaaatttaatcaacaaacaattagcaa

SEQ ID NO: 111761 - DNA, 5654 bp, Cannabis sativa
gttcttaattttcgtaacacttattttctttaatctttcaatatactcacaagtatgtgggtcaatgagttgcaagttcttaaagaacttattatctaccttttccagcgatacaattcgatctgttacatccaagaagacttctactgttatcatctcgccatgcgttacttgtctcgctgtcttactgcaaatgcgcaatgcgagattgatactgctcgtgatcaattatctctccgagataattcatttattgctgaattttttcgtgttgtgtctatatttatagttcgaaatatgagcataacaaaaactaacaaggacatagcataatagtgggagtatttcgctcatctcctttgtaaatattatataataaactttacattccaacacacttttcactaataatttacctaattactattttttaaacatttaattacatcgttaaatatacaattctgtaaataattttatttataatgtttttttcaaaaaaatatattatttgtaaacaatgtgggacttgtttatcgtcttttcacttgtaaggtttctaattctaagcttgtgtggaaatatacaaacttatgtgattaactcaaccctttattaaattctataattacttcttttggtgattttttttgtatgcattttttccaattatctcatagtctttttatttatttatttttatttttacatatggggattcccccatctcacacacactcctctcataccatcttggtatctcatagtcatgatttttgaccatgtgaatttataaaataaacaaaaacagtgactgaataagcatggataattaatggctgtataagtatgttataccaactttcttcatccttaaaaccgcatctgcagccatgccaactaccattcgtctactatatgcatccataagtaagataaaggaggcagacctcggcttaatcccttttgttttcatcttaaaaattataagaaaatgggataaaaaagaaaaaaaaaaaaagagaattaatttattatttatttataatacttaatgtatttttatttcatattttgtaataattttgaaaatatttctatagaagataaaaaagggaaaaaaattaatttttataataaaaaaagaaaaaaaatatattattttaaaattaatttttttcttattttttaatttttttaaatatttaaaattattttttaataattaatattacgtagactactaaaaatttgtcatatatattgtggcatatgtctatcgtggtacttaacatagttttttgaatataatggataaataacttacaaaaagggagtttgagtaattttgctaccaaaattttgatttttgtagttaagtgtttaaaaatataaaattcgggtgaatttgccaccaatatcacgttaattttttgttctttttgaaaaaatatttggacattgctactgtaagaaaagaacataatttgtttttacaattatacagtgttgtttttctattatttcacaataatattgtttagacattgttgctacaagaatgcaacatgaaaacaatgtttttctctagaaaaaataaaagtgaaaatctgtaaaagaaaaatcggtgaaaaaagaaatctaattttaggtgtagtgtgtaaattgccctttttttgctaaggattgtgtaaattgcccttgttccaatcttctgatagttctgatttttgaccatgcatgtgaataaataatataaacaaaaacatagcttctcaattgattttacttttatctttgataagaaaaatagaatcaccatcataaaatcctttgctgaagagtaaagattaacaagaaaaacacaatttggtcgataacatgattaagtgaagattaaaaataagttataaacttctaatcaaggcgacggagaaggtattcaacttgaacaaatttagtgagaggcattatccattcatcgtaaagacgagaaaccaacaatggatcaatcttacattttcctttgctttcagtgctgttggtagtgtcaaggcttacttcctgcccaaatatcattgccttcttctcaactctcttcttcaccatctcttctacagcttcaaatgtcaacaacttcatcagagcatccctatcctgaagtttttgagaataaaatcatacatacatcacataacaaaatacaaccaaataataatcaataccatttattgttctcatatgaccaatgtccaaatatgatgcattgaattgaattatatttgtctagttgatctatagattcaaatcaaaaagaaaaaaacagggttgaagaattttgaatcacagttaacataacatgaatttcagcacatagataccataaaaaaatcagtctttaagccacttaaactatctcagtggtgaggtaaggccgggggttcaaaccttcaaggaaccctctttgttatttacgctatgtttggtaagaaggacagaaagcaagagtttttctctcaagttttctttcctcccattttttcaccataccaaatataggattaaaaaaaaaaccatacatacctgagcacgaattgctggttcatattcatgtggggcatccctgaatttcacctcagccacaaaatttccataatgaatccttctagagatggcctacagtcagtaaataataaccatttttcttcaataagtagaacattgaatacttaagacatagctatcaaaaagaaaaagaaaaaaaaaagcattatttacctgtaagcaattgaggtcactagaggcagttgatgcatagtttccatcatcacccggtacagtaaacaaaggaagcaattgcttgaaatatatatcccaaattttgctgtttacattgattgaagcagcagcaggatgcaacacctacaagtcaaagttttcaatataaccccaaaaaatatatgttgatatagactacagtaatcatgttattaaaggttggataaatttaccggtggaaaggtatgcggtggcgccaatgaaggcggtaaatgatcaggaaagaaggcatgttcttcaggattttgatacctaccagcctgtaaattaccatgtcaaaaattgtgtcttaactaacatacacgatgtatgttgtagtgtattgaattgaattcattagttaattagaaaactaaaagcgtgtcattctagaaagagtacttattaagaaaagaaaaaaaaaagtgcagtggggttggaataaccaatattcaatttcaacaaaggaagcttaatgtgactttttgtgagcctttaaagttaagtaagtggggaacaacacatggtggaggtggacaattagctatccataataatcatataaaattagtaaactaacaacatggaaaattaatgcaatttcattcaaacataaaaaagacaaatacacatgctttagagaaaaaaatataattatactataagctctaaccttttgacaaatgcaaagggtcaacttaatataccaagcataaaaaaaaagtgatatattattatggtctattccttttaaaattaattggcttataagaacagtaactcatgcgtatgatattatatttttttacattttaataagactctaatcattatattttaatattgaggtagtgtcttacaaataattagcgatactttataatagttattaaattaaattgtgtaaaatacaatacttaattatactaataacaatataataattaatgtatttagaccatcttcaataaatagtgtatattttaaattaaatttggctaaaatatactataaaattatatttagcttaatttttgtataaaattatatttagcttaatttttgtatttatgctctaatgtaaattaactataaaagtcagtattatcattaatactcattgaaaatatataaaacaattaattttatttatattgttttaataacttataaatatagaattttttttttataaattatattaatgagtggtacatagataattgagaaaatggtatttattgttggttaaaatttaacataatttttaatttgagccaaatttaatacatattttacattattattagaattaacttttaataaaatattctaaaatggagatgctcttaagcatttctttaataaataatatgaaatgcaatgtaggtgtggtgttgggcaactttaagacgtcaattaaaaatgctcaaccaataaagcagaaacacttaaggctacctcaagtggtcattggaggagggtgagtgtgtattggaggttctgggttcgagtctggttataatatataaatgcttaaatcaaaagcaaaaaaaaccaataaaagaaaaaaaaaaaaaagaaaaaaaaaagaaaagaaacaaaactcaaattcaaattcaaattcaaacaaactattatatgtttacccaaaagagaaataataaataatataaaattgagttgaaattaccttagcctggagagattcggtttcactgacaaagaaacgaatcaaagaaccacaaaatccaacgcagggtttggattgttggtaagttggtgaattcatcggaaacttcgctctttcaatcaaactaaatacgattgtatcttcttgtctaatcaacgattctctcaccgcatcaaggctcatttcctcattattattattattattacccaaatcacaaccatttctgtccattttctccatacccaaacaccttcttctaccatttaaaacaataataaacacaacaacaacaaaaattagtgaactgaaactcctcatcgttgaagaaaaaccccaacaagtcttggagaaaatgaaaataagaattcacagttaaattaacaaacaatggagaaaagtcaaaacatgtacacccatgagtttgactatttaatttagctaatataataaataaagaagaagaagaagaagttgacttttcaaacaaagaaataaaggaaagtcaaaagaaaaatgaacctgtaaaaacgtcgtcgtttaaaaggaaagaagaggatgatgaagaagcagaggagccgaattgagtgatattgtttgttgttctcttcttctttggtttttataggaaaatttttgtggcttttatggaaagacaacacaaggagcacgtgaggccccacacgctctcttctattattattatttgttttttctttaccaatttgagaaatgctaaaaaataccagtaaatttatttttttacgtgttaatattattattggttcaacttaatatcgagcgtcttataatttaatgtaataatttttatagagtattgcgtaatgacacgtctaaaaaaaatattaaaaactactgatactcaataataatactgtacggctaattggaccccaatttttttggttttttattcctatattctattgcttacttattaaggcttgcagttgcagggtcatttaacttaattagatagaatagaaaatgggagatttttatttgattttgattttttttttttttttgaaaataaaggaagctttattaataaacttctttcatgattacatcacgaatatcaggagtgaaatcattactcctaaaaacacgatcagcgaca

SEQ ID NO: 111762 - DNA, 6601 bp, Cannabis sativa
  modified_base (6546)..(6568): a, c, t, g, unknown or other
ttacattgaaacagagttttatttagggcataaaacccaacactctcaattctacttgtgcctgtactctctcgatcagtactacaacaagttccgtcccctcctcgcgctgatcgactatgggttcttgtgcatcccgagctggcacttgccttatcacgtaccgaccttctcccttgggtatgggttgttgcattgcccctactggggtttgtacgtgccccttccctattggttcaagaaggacgatgacgatgcctcggtggaaacccacctgtcctaggttgagtcccaggattttcctcattctcacaagggataacctgttccctagtcccgggtcgccttttgttctcatttttgtgagaaggttccggttgatcatttggttgttcatttttagggggaccttcagcttcctcaggttgttcttcctgagcattttgagggtcctcctgagccgtctccaccctcctggttcgtgagccgcgaggtcttcctcgtggtctcctcactccaggaccaggttggttttgcgtgttgttttccatgcggttattattatttgaaaaatcatacaactgtgatttatctacttttactgggtcaatgctgacaaggattcaaatacactacaatgtgtatctcactggggcatcttgctgggatagcaacaataaccctgacagcgagctgaaacttttcccatgtcttttccaggttgataatataaatttcgtcgttgctgcgattgaagacataacgctccatttgacaattgcatttcttggtgacaaggtgaacttcagtagtcaacatcatttgaatatcagcttctatttgagagagctgactcgatggaccagtgaatctcattgaaagatgtctagaaattatttatgaaggtaccaggattatgccttcctattgcgagatggatgcctcgctatccgttacttaagctcttccagctgttgtacttagtttgtatgatgtacattatatgccaagtgttctgactaccaacacatctcgtcaatatctttttatgtataatgaggttgatgcctttttatgcattattggggtcatccttatgtcttcagacacaaaatgatttctcgtcaatacatgagttaatagtttgtacatttttgtcttgcttaagaccatacagtcagcgaattatatatatgtgttatcaactctgcatttaatgagttattccattttaatatcctttaatataattgttattatatttgttgattcgtattctccaagattgacacgtgtcattctttgaagtgccagtcgaattttaggtataacagcatttggtgcggatggatcataactcccaagagcatggaacgctgaccatattcgctgatactatcagtaaactgagggtggtctaattccatttcttttatttacattttatttttttttccatgattgcctaagggaaggaatcatttaaataaaaacaagaagggatttccatgtcatattgtaatttttccaagtcttgaaataagtgaccaagagccaagactcttaatcacttaggggtagcatattttatacctttccaaaaataattaacattaagtatggaactagaaagtactactttaaatcgtagccttaaggatctagaagtaaacaaccatcttaccataattcctaagttaataaattcaataagtcaattccggttgactatcaaaagtttaggcttcaaacttaattaataccaagtatggaagtaagtagtaatgcctaaaatggagccttatggatctaggattaaacaactacttcaccatatttgcaaaacaatttttttaaaaaaattaacttaggtaattaaaattgaaagaagttcaagcttcaaaatcagttaactcaggttaatggtaatttaaactttaggtctctaaagtacttgataaattttcttataataaattgcttaatttcaaggtctaggacattggaaccatgttccaagaaatctataataatgatttgtcaaaagaaaaaataaagataattgtcaaagaaaatttcttaagtttcatgtcattggaaccaaaatctcaaggaactagaagcaaagctaaacttagcaaagtaaaaattcattagatatgcatcaaatatctagtgagtataaagtcaaagtatgcaaattagaaatgttcaaaaaaaatgcatgcttaaattaccacccctagtccccttactaaaattaccaccagcactaggaattgatgtcgaaccgacatccttagccgtctgcttttgatttgttgttcaacatcctcggtaatcaattctctctaccactttcttatacaaagtgtcgtgattagtggtaatcttcaagtcctgactaatcatgatatctaacctagtaacataattctgttttcaagtaaaatccattagtaccaagtcactagaaaatttagataggtgatcaaactcaagcatataatcagccattgtcttatcaccttaaaccaatttcaaaaaatcctccatgtgagttgtacagatgctaatgttgtacagctttttttcaaaaaaattcttaaactcttcccaagaaacaataataaggtcttgagattgacctaccaaatcccactaggtgcgggcatgcttttgaaacatgaaagcgacacaatcaacccgctcatttccaactattcccatattatctaagatatgagtaatagtatttatccactactatgccttgataatatcagtaccactcaagaatgttgaaggtttaagcttgacaaaccatttgaaaactgaatatttatgtggttgtagagctaatacagggttagctaccattggaacaaaatttggaggaaccacttgttctattagagctgcctaaatcggatgcctgatccgacacaattcttcttcttgacaaagtatgatggtttacatttcagtaaatatttgctgccaatcgacaggagaattagcattgttcatccctacagtattcccaaaattttacggaggtactagtagtgtcaatggattggttgcactaatatcctgctctacattgtcgccttgtgatctagttgattttgtagggtccattcttttaaataaccctaaaatcaacaatcacagcgagtgagatactaattccacacttgcacacttcacgctaaaatcctaactaacatacacactttctttcccaaatatagcaattattactcacaattaataagcatgctcttcattaaatatattatcttgtagatgttcatatgttgcttattactaaaagcagtaaataattaatcacataagcagatcggtatttactctcaacacttactgtactatgagttgagcttgtctttgacgatgattgtacatgttcagctaatcttcaagaagtttaaaaactttagcgctctgataccaaattgtaatatcctactaagaggaacgtcatgtgccgtaattacaaaaatactaatctcattaatcgatatccataagctaagtgatttgaaataaataataaatttaattaaataaataacttgcaataaacatactttacttttaaataaaaacattcaaagttacatatctgggataccgtaaaattatttttaaaatattaagttatttcttacaagcgacctaaacagcaaaatagaatttatatataattccctattagacccaactctcgtggtctagcttggccaaaattgtacaagtcatcctcaaaaccctcaaactcacggctgacccgacactactttacccttgcctgcgcaatagagcacccgtgatctaatgcccaacaagaaagaaaataatacaatatgaacaattataataattacatttcatacattacacatgtgcatatataattgtgccaccgcactatatatcacattatttcatatataataatgccactataatttatgtaagtgttacgctcacatgattctataatatatataacgccttaatagggtttatctcaattatagttatcaagtctaacatgattatgtcttactcacataacttctcaattatccacttaacatattattgtatatttatcacaatatgtacatagggtaataaccctaattcaggatttcataatagcaatcaaataacatatcattgcgctaccccgcttatgtgcttagtttgatgtcttacctgatttgtaatgtatgtagagaaatcacaatccacatgtgattctaaccaagcgtcggtattcctaatcacaatttcccaggtttcacataatagggttaattccaaaatcacattcataaatatttatatttaagactccaatgttggaccaagtaatagagctcaaaatgagctttcaaacaatacatagaatatccaaaatggagttcagagtcaaaagttatgctcaaaacaaaacagcaaaaattgaactgtcgtcgccttctcgtcgtgaccatttatcgttgcgaccagatataggctctctgcgaccaaattgagcaagggaataccctatcctgggttcgagcctcgttgtggcgagcccatatctggtcacaacgactgggcttaaaacccgaaatgccgaaaaatcaagttttcgcgaaatcgaatcttaaccaaattcacctaatttaacatacttgatactaaaattcaaataaagtacaaatggcataaacccatccaaagtatacatgcctaacacacataaccacaagctcaaatcacaaaatcaaagctttataagaaccaaatcaaagcattaagaaactaaacacaaattcatactttaagtctacaaatcactcaaacttagctcaaatcctttgagcaatagttacccaacataacaaaatctaaaatcacaaggattaagccttactaacttaattgcaacaaccaaactctaagattaatgaaaacaacatataaaccacattaagttcatcaagataaaaacacaatatacatacatgaaactcaactcaaacaaacatttttaaatattacaaccccttttgaaagattaaacatcaagaattagagagtgaagactacttcaagtgttctaactcccaaaatctaccaaatatggcctcaattcttcttcaagatccaaaaatcacaaaagaggtttgagagaaagggagggttcggttgagagagttcaaatccataaatgatattgtttttctttaatttttcacaaaatgaaacgtataattcatttattacatttttggttaaatgaccatgttgcccctaaggctaaaattccacacaatatataatcaagggcagtttggtctattcacattcaagaaatatttctatagaagcatatattcatattattgccctaacaacatagttcataaatcttggacctcgaactcggttcgagccaaaatactcaattgtgaccataccgtgccagcttgtcaaaaatcacctacaataagataatacaaacatactatataataatatagtccattatcacagtatataataaaattacaattttacccttcttagaaaaaaaaattacaaaaatgcccctaactcgtgaatggggcctttaaatacaaaaagtctaaaataatttcacataattaatcatataataatatgattacccatttatacttaattaatttaattaggttttctaatccatttactaatctgaggatattataattattctctccttatagaaattttgacctaaaatttacctgaacaactaaggatatttttacccatatcagattcaaactctcaggtcaccttttcgatcttgctcttcctccataatacttttgttaacaccagggtcgttttcctcaaatttctttcttttatcaagtatatccactgttgtttgtcaaatgaaagatctagctgaagttcaaaagcttcgtaactcaaactatgagatgagtctgatacatattttctgaacaattgaaacatgaaatacattatgtataccggccagcgctgggggcatagccaacctgtacgcaacttgccctatcctcttcatgatttcaaaaggtccaatgaacctcgggctgagttttccttttttgccaaagcgttttacacttttcatgggtgaaatatggagaaataccatatctccaacttgaaagtcaacattctgccactttggattagcataactcttctgtctactctatgcaatgagcatttgagccatagtcttattaattgccttcctcatttttcgaacaacttcaggatcaagaaactttatctcacctaacttgtcctggtgaataggtgatctacacctttttccgtagagcagttcataagggctcatcccgacacatatcctgagctataaaaccctaaagctccacatagatttatcttttgaggagaaaccagtacagtgttggaatatattttaccaggacctagatttactaacannnnnnnnnnnnnnnnnnnnnnnatgaacttctaaaatgatgaaaattaaacacat

SEQ ID NO: 111763 - DNA, 1462 bp, Cannabis sativa
agttgataataggactatggtcttctgctttttttttttttttgttgttgttcattatcatagattatttttattgatatttttttctcttagtaattaattaaaaattagaaaaataattttcaacaaacttttcttaaaaatgatacatagatatttgtataaaatgaaaaaatataaattacatgttaagcagaaaaaggttatcaaacttttattgaattttgacaacttcgggaccatgattcatttcatcaaggctactaggttatcaaactttttcctattcacaccataggtggtggtttgcatatcagttagaacttctattgtccaatcggagcacctctagaagttcccacttcaaccagccatcttttagttagtgtgtcacacacattttttggtcttcaaaattgatcatgaactctataccacttatgtgtggtttttgtctcctaaaaacaaggtcgtgtaggaaatatttgtgatctttttagaaagaagttcgggtgatctttggatgatgcgttgcaagagcagtcatctggagcattgctcaaaatagtcttcagcatgatcccaagtgcaaagaaaattgaattaattactcaagttcaaatcttctccatgtacttgaggaaattactcattgttggccatcgaggccacaggtaaagtaatggcacaactcacctctctcatcttgaaatacttctaagtataaagcagctcgttagtccttactctttgaatctcataacctctagttttgaagtatattctttaaatcccccctttggtgtgagtggaaggtccctttcccttcgcaaggtcttaaggcctagtgtcgttagagcgacagggagaaccttatggaggagttttgtttgttctctcaatagtccgtggttcttccatatcaggtggaggggccactggttggcgcactcaagcttgagcccttctgaactcttgatcaaagtttgcctccctatgaggagtctcaacttttattgtttgcttaatactagttctcgcatggccagttggccatcggggaatctgtgcagctaatttagaaagacccctacaagggatagttccgcgaccagagcgacaagcttttctaattcatcaagatggtgttaacccaaaaatattccctagtgttgtgggcatcaatgtttgacacatgacattcaagatgacgtcatagagtttagagtttagtagacctgagtcatagcggtcaacctgggtggggacccaagccctacagccagggtggaagtttaggcttcaataacctgaatccaacacacaatattttagtattctataccatgatgacatggagcgaccaaatccaaagtccaagagctgaaattactcaaacatacaacccagaagttaacctaggcaactagggttttcacccggtgcccaagttgacatcctc

SEQ ID NO: 111764 - DNA, 6272 bp, Cannabis sativa
  modified_base (5780)..(5782): a, c, t, g, unknown or other
tgtgtaggtatgggactacacagttgaagagggctgaaatggattgattggtactatctatatcaacaaggtgcatccttttttttcgatagcccatcagaactcgacagttaagcgtgcttgacctggggtaatttaaggataggtgacctcctggaaagttttcccaagaagagtgcgagtgaggacaaagcaggctggaaacacccgtgttggtctgtagggccaatcgtgagtccatgaagcagctagagtgacatacttgtgtataagagccattcaatccgtgggtgtaaggacccaatggagacttgaagcgggaacgttacaaacaagatgcaagccaatcttgcctatggagcataaagaaatggggaatacaagctttatctactgctgaatctgaatatactgccactaatgagccaatcaaggaagcactgtggttaaaatgacttatggaagagctagacctagttaagaagatctctattatctacttagacatccagagtagcatttatctatgcaataaccctgtgttccatgatcaaacaaaacacataaagattaaatatcatttcatcagggacaaggtgcctacaaaagtaaatcttgtaaacatgggaactaaagtggtttccctaaataagtctttgaaccctagggttagggcttggagtccattccagggaaatattatacacaagaaagaaaaagagtcaaacacatacacacacacacacacacacagagaaatacttagataaacacttgtaaaataaagaggattaccaatcgtttacctgtgatttggaagcgaagcttgtaacttgctgatcttgaagatccaatagagcaaacgagccatttctgaggtgagctcaaaagtggaagtatccagtaataattttagggaacctctataaatatgttgttatctttctcttgtttttcttttaattttattgctatgcatgtgtgtgtgtggatttagttgttttggtctgatctaagaagggagtgaaggtttgatttagggtgattgtagatttcaagtttctttagaagaaactcgaagctctattagggtgaaaaaatgtttagggttcgagagggttttgagggatttcgttttgggatcaaaacgacattgttttgattggagtcaatagttgtttgactcaaagtgagaggtctatattgaccttgataaaacttgatttgtgtttctgttgggtgtatgttaaatacttaaaattcctacatttttaaatattttttaaaatgacattcttttgagtttctagccttggtgaatcctaggcgcatgtcttacgtcttcataaataagattaaatcatcgtatatacttaatctcatatacatacttaaatttaagattacaataaataacaaatatcttttttaaataaatgaattaaatttaaattaaatacaattaagagtgaataataatttttttttttgaaatatttagtagtctttttacaaaaatacgctttaaggacattaatgtgatgacctatagcatcattttcaattatatgaataagattaatcatacattacttatgtaagaagtgtttgtaatttatgtatgtctcaatcattattactctaagtaccattaatcgtgagtatcattgtcttaatttataggttcatttttcttatcatgatatttttcttatatatatatacactaaaataaatattacttttgccagcatatttttgtgctggcaaaagttagtattgtgctggtaaaatagaatttacttgtgatgcgttggcaaaagagggttagcaaatcaatgttggtattagaacttttgccaatataaaatgaaaagcgcgagtaaaagttagattttagccactgcaaatgtacgctggtaaaactttgacctctttgtcagcataattcgtgaaatgcgctggtaaaagttacttttaccagcacagtaacgaactgtgctggtaaaagtgacatttcttgtagtgatatttgtttaggcttaattgaataatactttctacatttcttggttgactagataacaaataatcgaatcaatgttaattattgtttatatatatatatatatatatgctaattaatgaatattatgtatgttgcttaaacttgtcaagttaaggtaattagacagctgctattggccatgtgaatggaaccattcaaaatttcaaattaattaattataagcttgttattgactagtctatactgtattattaattagtcatatttgtgttattttattaagtacttaattatattaattataatttataaccatcttcaattggaaatttcaaccctttaaaattagtatgtcgatctgcatgcatttttaatattgtttttatttttatatatgtacaaaatatatttaatgaatagacaagaaaatgaacttcttgtacacaaaagcaaatgctaattaattaatttgaagtccaaaaccatatttataacttttgaaggcaatatatatgaataatatgactagtagttaaaaaaaaaaattacaacaaaaaacaattccaactcaaacttcgatcactagaattggctttgccgttgatcttccatggaatctgattctatggaaaattttcggtattgacaaggccgattctagttagtgattgaagtttaaatttgtagtcactttcgtagctgagaaatttttgttaaataacttcttcatttttttgtaagaataatcgattttgtagtaatccaattttaaagactacatatatacttaaatatttttatatgaatatattatatggtaagtgacaaattaattataggtgataattatgattaattaatatatatacaatttttatattataatatataaccgatgatcatgcatgcagacatttttttctttctttaattttccaaaaagttattcagtctcaataattgtcttaaatgtacttaggaagaaaaatgatataggttaattaaaaaaatatatacatttatattttttaaaatcaattcatattataatttctgttttgtttaatggatatggttaaagaaggaggttttaaaatttagtgggttataggaaaaaaaatacatatttagagaaaaaaatgatattcgttaaaattaataaaaaaatatataattttaaaaagaatttttttttttgaacctggatcctaaacacaagtttaacttgcttatgttgtcgtaaaagtatgaatataattatatataatcgtataaaatcacatatatatatcattgacaagaattagtgggggaatcgtctttttctctttggttttatatatattatgttggttaattattagggcataccccactttatagctaggtttggctgaatttgaataattaactagctaccttctcatcacttaagattaattatttcattggtaatggttgcactagtttgatgtacatttttcaccaatttaattacaatttattacttttactgtaataacaactaattttacactaatttaatgaaatgatatattaaaaattctcttaataaccaaaaaccaaacacatgagaatataatcaatatatatcataatgtgaattagaagcacaaaaaaaaaaaaaaaaaaaaacaaaatctaaaattttcacaaaagatcaaacccaaatatcacaaatctaaaacacaagcatcaatatccgcaaatttgagctttcctttctagatttgaatttctcatgcaccaccatgtttatatcaaaacgacgagataggagttggaaccaacgagcaaggtcgcccaccgcgagctgtgctcaaagcccaccaaccggagattctctataattcgacccactccgtcgagtacaaatacttcccttcgtggatcagacacacactagcaaccaccacagtgtcttcgatagacgataaagatctcagatctgagatctccaccaccccaaacacaaagaccgtttgagagagatcatctacgacttgcacatttcgacgagactataaatgcacagccaaactctgacgatggacatggatgccagatgcacgaccaaccgatgacaacggctctttagccttaaggagagaggaggcgcgactgggagaccatgaaaataaattcattgaaaaaaaattagtgtgagagagaaaataaaataaattgttaatggtattaacttgcataacaaatgacttgcattaacttgtattataatatttgcaaagggtttaagggtcaaccccagccccaaaccttagacttggacttcaaactcgaacccgaacccaaacgcggagccaaattcagactcgaacccggactaagaccctagactcaaaccccgaacctagacaccgaacccaaacccagatctagactctagacttgaacccgaatctagacccatacctaaacccgaacctgaactcgaactctaaacccgaacctggacccaaatcccagaactgaaccccagatcagacccggaccccaaccacgaccctggaccctgaataagacctcaacacacaaacctgaatcctaaccctgacccggaccttggaccctagaattggccccaaatcatggatcaatacctggaatcggaccggaccccgaacctgaacttggacccagaccccaaatctcgaatcttaaaccccaaacctggacccagactcggatccccacctaaaccccaaccatgacctttgacccttaatcggacctcgacccaaacccgaatcctaaccctggaccctaggttcgacctcaaatcatggatcagtacccgaaactggaccggaccccgaatcgaaacctagacctagactcatgaaaccccaaatctcaaaccttgaacttggacctagattcggaccccaaatctcgaatctcgaatcttgaatcccgaacctagacccagacccggactcgaatccaaaccaggacctagaccctgaacccatgattcatatatcacggacccaaaccacgaatccaaacaggggccagggccgggtctaggtctgggcatgttttgggtctactgtcgggggctgagtttgattccaggtcgtggtcgggattagggttgagtttattgtaaaaaatttataattttatgtaacctattatagtacaatacaaatgtattaaataatatttgtacaatacaatttagtttaacacaacacaatataatataatacaatatattatataactaacataagtagctagcacaagagagaaaaaaaagaagatagtaataatttattatatataagtgaagataaagatcataaaaatagatatatgatgatgacaatgtatagcatttgtataatagtaggtaaaaatatagtgctatatgaaatgtgtcacaactcagaagcacgtacgtaatttattttaactttaaaatagtatacaaacgtggaagagaaagagaaaaacattatcaacttttcatgatttgattcatactttttcattatggttaatttggctttttgcccagttcagatttgggttggcagtgatgaataatgcttttttttttctttttccttttatgatcagataattatgatatatacataaacaacaacaatattctaatatttttaaaatttatgccgaaatatatgaccaagtcactgatgtagtagtgatcatatatttttatatattgatatatatnnntatatatatatatatatagtctatgatgtaaataaaagtggtagtacccgattgacttgatgatatatataagtccttcgaatattaatttgatgactcactgttctctttttttttttttttattattatttatataatattgttgatcttctagaggttagaaaaatatataaaaactgacagaattaaaataagggtgagaaaaatgattacttgaaatggagatcggtcatggaataatttgttagtttatagatgcacaaaaattaattcagtatccaatgccataataataataataataataatatctatattgtgatctgttcttgaattataacaagtccctctagatcataccccaatatattattggaaggttccaagacttaatatataaatttatataaatatatatatatatatatatcaatattttaggatgtgatagtgtcttaaatttctttagttctttttttttttttttt

SEQ ID NO: 111765 - DNA, 5003 bp, Cannabis sativa
tgaatgtgagcaaaagggagtttgtgacccctgatgatgatgagtagttcgttccatggagcggttttccttttcactagaggaacaatgtcccaagatgtgtcaaacagttttcttatagccatctgcagaagcatagggggaaccgaacgagatcagtggttcgttctgtaaagtgaagtgaaaaagttacaaacaacttccataaggttaatttatactgttctgatctaaatataaattaacagtttcacatatttaaatgaggtccctggtttttttaatggggaattaaagctcataaactggatccttgccgagccctacagtttttgggaagaataactcgtgattattcactgggtagtgagtggtcctaaggaatcagaccccaaaatatgtgagaggagagtacacccattcctcaccacccaacaagatttctggggttctaatcattaaatttctaaagaataaacaaaagataaataatttgaaagaatgtaaaaatccaaatcaaaattcccagagagagaaaaagaagaatgattatctaacctttagaaaagactcatctgtcattgaacttaaaatggggcctcaagtgattcatcccaaacttctatacttccatttgaggcatcttccccgtcttcttccatagagagcctgatatattctctgtgtgcaaatcggtcccactctgttaaagatggatcttcacgttccttcatagataaaaagcaatttgagcccattaataaataaataaataagttgaatccaacactttttcatctaaaaaacagttacctgtcggatgagaaacggatcgcggctctcaaatgacataaattttatcagattgaaaaggatattgaagacatttcctgaaagcttgcatcttttcaaatctcgtagcattatagcatcatccttctgcaagcattattttacatctattaaattcatatttattgatacaaaaaagaaaaagagatctggaatttggccaaaaagggtacgtttttttacctctggtgaaatcatatcaactatctgacataaaatatcctcaaataaaacaggttcttggcccatgcattccatacgatgcagctgttcttcataaaagaattgcatttcattcggtgtcaggactccattctcgtccaaatcaatgcacttgaacctatacatttatataatacaacttactcagaccgaaagaattcacaataagattttaaacaatgagcaaggttaataatgatttaaaacactcaaattaacatacattctgtaaatagcaattgccacctcctacctaaaaattccaagttcctcaaaattaaagttctagcaataagaatccatgaacacattacatgttaaacttcgttgtgcatgtacaaaattacctaaatattcacgatatgatttgcatcagataccgaattgcaaaggcagagaaaccccccgatgtggaaactaaaaaaataaaaatatttaccagtactcaagacttggttcagaagacttgtcctcctctgacagcataaaataaacaaaatcttcatagcccattttcccttcaatcttgctagtaaacttccgtgggacctagtatggaattttagtagaaacacatcgaaagcaaaacaaggtaataagttatacttgaggcatcaactattttgaacacacattgaaaatgaagttacaaggataatactaccaacctgtgaaaatattctatcgacaatcctgtaggtaagggcatgattactgtatcttatgaggttctccttgtcaatgaagaaatcatggtccgtgtccagctcccagaatttacagtatataacgtaaaaatgttcatatgaaaagtatctgaaattcggtggacattgatgatgtaagttcaacgtcgccaccatttaaatacaagaagaaaattaagaaaaaagaaaaacgaagactgaggaaaatcttaactagcgtttacatttaaaattaatagttaattacaaacacagaaaacataattcactataattactacagccaaaagataaagatcaatctacacctatttagtggaaaccaaagaatattacacaactgaacaataatattacttattctacttaatagatacttttgcacatcagatttgcaaacacacaaacctcagaactttgttgatatcctcctcctgatctacatgctgcattgcgtcaatcaaatttcctcgctttagctccctaagggtaagacggctatttgctgctctattgatgtagtaaaatattctatatacaactgtttcagctgcaccgagatattcaaacaagtatcagtgagctaataaacataatggaaaaggcccgccaattagtcaggacactaacaataatgacacccgaatttgatcaattaacaatattgaaaagattaataatagggcatcctaaccatccattaaaaggtctaagccacataacttaatcattaaacattaaagaaatctgagtatgaacattaaaaaacacgaaccatatctttcttgaaattcaggtgtgccctttaagaactccaacccagggtgggttgccaaaagctcttgaagaacaggtttgaagtcaacctgaaacaacaccaaaaagataacacacgataaaaggtgaacctaagtgaacatagcaaaagaaaggatagtatatttacagacttgcagtaccaagagcaccaatcaaaaagaaattgtatatgccaaaggaataaatacatctataaaacaaacctgagaaatataattgcaattgtgccgcttcaaaagtttaaaaatctgagtctcagtatccataatcagcatattgctatcaacccagtattttatgaacccattcctaaaaaataccatattaaagtgttatgttatgcgaaattgcaaatgaataaaatagttctgatgtttcctaacactatttaagtccttggaaatgcctaaatgaagataaaaaaaaaaatcaaaacagagcccaaaacatgtaaagttgatctaataaaccaagacagtactcaagtgcttacttggtcactatccctgtgctatccgtgtcaatcttcctgaaaagtacggaagagaaaaatgttggcagcttgcatatttcctttgtaagcggcttaaattctgtacataaaaacagcaaatttcagtgtttctattccaccattttccttcaattttctttgagagtggtacaaacaagaatatgaagaataaaggaagacacagaaacaaataaaatgaatatcccaccatgcaatcgcaatccatctggatgattgttgaaaaagtcatcaatcctagagaaaaattgttgctctagttcctttggcggtggacggccatttttgaaatagaactgcaagtaaatgacatctaaagcaatataagtttctaagcatgaaagaaagcagcacaaagctagagttcccaagctcatacgtattattttccattgatgaaatatcttttagagaaaattgaaaaactttcataaaagaaagtaacctgaggaatgacttctcgaacttgttcagtgactaacttaagtggagaaccaagaggaggactgcttcgttgctttgaaaaacgtggagaaccagatgaacttcttggagatagtggaggagtactggcagcagggaacatggaaggcgtggtatggctcccagcagtgttcgagttcccaatggcatttatgggattgcctgccttcgcatcatcaatcaaagacttcacctatcataccaaacagaccaaacagtaccaaatgacataagttgcataaacaacaaataaacttttctgttcaattgaaaatgaacacgttaagaaactttagaatatatgaactaccacataaggatttcatgaattgtttgttcgattaatttcaattaagtcctatattgttcagaccgataaaaagagctagtagaaaacccaaaaaaactagttatagttaggcataaagagagtacatgaaaaagttagttgtaactattcatccatttttgtaataattgctgttcctaagaggattaacagcgttttatatgtttcgaatttatttactaagccatttaaaaaaaggattaacaactaaatataggttcgttaggtattatatacaatatctcgatataaataaaactttaacatagtattacatcaaagattcaaaatatgatataaaacacaatttaatataatactatatacaatacaggtgtaacaaacgaacactattaatttaagcaacgaagaaaactttcagcaaattaagcaacaaaaatatgagtaaagaatcaattaccagtcgtccagtttcgggaagagaaagccattgatcaaacaaatcatcagcaattgaagggtttgattttaaagccaaaggagataactctggaagtatcaacagttcaggatccaaacagctaccaatatcaccatctcccttacccacagaatcgatatccatactacggactactaaattaaacctcaaaatctctccaacgttacagaaatgcaaaaattacccaaaccatcaattatacaaattacacaatactattcacaatcgaaaaaacttccaattttaatcaaattcacagtcccttctagttcaacaaaaccacttccataccggagttcagataaccctagggtaaagaaaatagacagttccaaagcttcatcttcacccaaaaacaacagttctaaatccgattccttaaagtttctcactcaaaacacaaaagaaaaagaagataaaaacacaagaaagaaaagaagaacgatttcaaagttgttcatcagagcacaaaacatataaaccgattacaggtccaagtatggtgaaagattgaagaggaagagaaagaatcagcgatgaatcggtggtaatacacagtagagattcccggaaaga

SEQ ID NO: 111766 - DNA, 7934 bp, Cannabis sativa
atattcattaatctgattgtggctataagtgttatttatggatcacttagtttattaattaacattttgctgaagaatgtttgttgatgaattcttatgtgcaaacagattgtcactttaatttgcttgctgaatgtgagaaaaacaaaccttgtcccatctcaggtgtccgcggcttaaacgacttgttcttccagcttggaacagaataaaaaagacaggaatatgcaaggccattcgtgcatggacagatctcgaatcactgacgatgcccagcatagcaaatccaccatacttcatggaagagatctccaataactgcaaaaatttcagtgagctcaagatcatgggtccctgtgacatgttatgtgcttctacactagtcagatgccttcccaaactgaaggtattaagtctccggtgctcaatgcttaataaggatgctctgatcatgatcttggatggattacaacacctagaagttctcaacatttcacattgccttttaatcgaagtccctccgccccctgcatccaaaaggattgttaaagaactcgatcatttgatcctcgagaaagcatctcggttacgccaatttctaacatgcatggaagaagacacttgcctcatgtgccaacgaacgaaaagtgacgaagggctcatgaggtggtacaaatatgaagaaggaatgtggaaagctgatgaggttagctcacttgctctgtaattagagcattgtaagactattttaggtagaagtttcacattatgtgcccttttctgtttggtaaacaaagagttctttttctgtcataaatagaataatgcattatcccataaatataaatgagagctttcttaatagataagttggcactctatttttgagcaaagagctctgagttgaaatctctgctgttgtacataaagaaagtctttgtgtttcctgtgacattattgagattgatagttacataagtatcttttgcactcctcaaatgatgatatgattatataatcatgcaaggtttgaattgtattattaatgacttataaaatatcattatggctggctgttcaaatcaaattgtaagtttaaaaggttagaggtggctgagcttgactattgaaaaacttgatattgttctggaccatctcaacagtcaacattttgaacctttgactctttgcattatttattatggaaagcttgaattcttgtgtgttttattttctattataaatagatgtgtgttttgtatagatattatttgcattgttataatacaactttgccatatttggtccgctctcatcattatttaaatgtaaacgttttctttaaatgttatatgaaacattttccttccacgtggagttggtatttgagtatctcattacgagtttatgtcatttttggttttttaagtctttgaatttatttattttgacaaaaaatcttactcatgtaattttactagaatagaaattttactagattgactattgtaatttgtgactcatttctatggggaccaaatttgtaatggaggagcttatggtgtgttgtgtaactgtgtctatccagtcaaaactttatagtttctagcttcagtataaatcatgtaaaagtctcttggtacaaactacaaatatgtccctttatgttcctatttagcattgccctttccggactaatcacgagcaaagtattttgaacctaactatatttgaattgtgtgtgcacatgagctctaaaaaatagcttttaatctttaaattataaagaaaaatttacaaaatcaagcttccatcaagtgagctaaaattttaactacattacatattttttagtctttagctaaatgtagacataattatttattgaactaaatatgattttttttattatattttaaacttttttttatatatgtgtaacattattgtattatatttttaataaaataaataaatattttttaaaaaaaaaactaattaaatggaaaaaataaataaagaaattaatacatggtgttatacataaatttgagtgagtttcgtttttgacctaaccagtttggttattttgttgtgtagattatttatgttgagagatttgtatagtttgttctattcaatctctttgagtgttcaacattgtaaaattatttattaaagttagaaacatgtgtttgataatattttgttttaaattgttttaatcataaaaaataaaaataaaagtaaaattttgtttttgaaaaataaaaatgtattttacaatcatttttatttttaattttaaaaataaaaattaaaaataaaaaacaaaagtgtaatctgtaatttttattttcacttttatttgttgattttatttaagtcgggtttggggccgggtccggcgccggggccagggttcaggtttggcaggggttgaggttcagatccgaagtcgaggtccgggtccgaagtttggggtccgagttcgtgttcggggtctgtgtccgatttggggtccgatttggggtccaagtccgagtctgggttcaagtccgggttcgggtcggggtctgaggttcaggattaggtctgggattcgggtccggatcaagatttgggtatggggtcggggtgtgagtttgggtccggttggggtcaagattcgggttccaagatctaggttggggtcgaaatccataatattgattaagaaaaaaattgaaagtgattttttttgttttcaaaattttgattctcaattaaaaaagtaaaaataattttatagaacatggttttgaaaaatattttcacttttctgatttaaaaaacaaaaaaaaaacaaaaaaaaaaactgattagtagctccactaaagaaattttaaattttaaaatattattttgaaatttatataattttaaaaattcatgttaattcataactaattttatatacataaataaatatgaaattagaattataaaatctttataattcataatttattcataaatatttttatattcctaatttttgtatttcataatttatccattaatattttgtttttaataaatgaatactttaataatcacttttgattaaaaaatatatatatttgtgttattattcaaaataaataaaaaaaaataagatataatgaaaaaactaatagtacacctttcaacaggcgtgtttaggtatatcatctatctatgtcaatatatgagagaactttttagtacaatttttaatgatcgtgtaagttgttaattatgaccacctgtaaatttataaaaaatttcaaatattttatgacactcgtaattactttatcttatacaagtggtaactaattgtttaaactttattttcagcactatattattcaattttttttaaaaaaaaaaacttacatttgattctaaataactacatcgtgcacaattataaaaagaaaaagagaggaggattcaaaagctcttttctgtgcgaaaacaaataaagagtgtactagaacaaccattttcagagtatatactcgtaattataaacttagccaaatgggtcaatatataatttagattaaaaggatattttcataattacccaaaataacaaaaataaggaatcacgatttatttttaatatttttacggattttatttttttcatataaaaatacgaatgattgtttttacgttgtattcacaacaacattatactatagcatgctttcatgttactttcttgaggataaaattataattttattaagctatgtgctaatacattacattattatgtaatatatttattttactatgttacaggtgattttcgataagtttgtacagtattcataacatcaagtattttgactcggaacaggttcgggtcttgtatgagtaaaaatatgacatgactattacttaaagttgtgattatatttgtgtgagtgatatggttcaaaattatatatataatcttagtcctcttatatgttgatttttggtttagagggtaagaaccatatttttattaaccgtttcagttcaaggagaagctcccgtcaccccctttactctctctctttctctctttgcaatttttcactttctatcaaaatgaaccaatttttttatgtgtaggagctaatcttggttagtttttgaaaaattagaaattttagaagtaatttgtgataaaaattttaaattattttctgaattgatatagtatttttggtttaaactagggttattcgttaatttttgactatgtgatttgaaggaatggatttgatagttatttgaggtgttaaaatggtttggtgttagttttaatggaattggggtgagaagctaaattgtctttcaattcagccaaatatttatagttcaaggagaaagttaagatttttagagcatgagtttggttatagtgttttaagtttttaacatgtaaattctatgttttgtaatgcttcattttgtgttgattgaagcataagtttttaagttgattaaatattgtaggtctgggtttagaaactaattgcatacatcatagaaattttggtgcattttcggagttaaaaattagggttttgacccaagcgctgcaatcctgttcttgagagtcacgacttatgattttcgagtgtttttgctctctgtaaggagcaagagccacaaccttagttgtagagtcacgaccgtctaggtttagtagaaccaaaaattttttgtaacttgttttggtcataacttttaattctgaactctttttttgaatgtattttatatcgttataaagctcgtgaagagctttataatttagtccagtttatgatacctacttgttatatgattgaggattaattttattgtgttcgtacctaagtttgtgtagtttcggtaatcaaaattgagataaactctaatgaggccttataaattaaatagacgtgtgagcatgacacgtgatgtctatacaaaatagacttaagatgttgtggcatcatcataaatgcaatggtgtattagataagtgcaatgacacagttattagcacagtggcgcattaaaagtgatcatgatgctatgtgattatattgtgggtttgattatactttcttgttgggtcttggctcacgagtgctctaatgtacaggcaagggtaaggtagtttcaaaccttctatgagtttgaggactttgactgtggattgtacatgttccggccaagttagaccatgagggttggatcctatggggagattgatttaaaaatctcattttatttcagaggtagacttttgagttagcaacttataatattttgaaaaaagaaaatacgagatcccggttatataaatattattttagtttaaagttaaagttattataagtttgtttgatatattagttgttttatttaaatccactggacttagtagacctccaattagtgagattagcatagtataatcacaacctatgtctttcatttagttagggtgttacaatttggtataagagaaccaagatttttaaacttcctgaacacaggcagaacatgtacaatcatcgttaaaaaaagctcaactcatagtatcgtaagtgttgagagtaaatacttaactatttatatgattaaatatttactacttttgtgaatgggcaacagaagagtatctataaattatttatagataactgaaattatgattatttgtttataaatgttaaataaactatgtggggagaaattccatatgtgttaattaaggattatggaaagaaatgtgtaagagtgggattggtacttgattcactatgattgttgattgtagggttatttgaaaaagaatagaccatattagatcaactagataacagagcgagcccaataaggatggttataacaaaaccatcccactaacatgtccaatacctttacagaatcttggagataatatagagtttaataacgctaatcctcttactgattgacatcaaatgttcgttgaaatgtgagctatcattcttcgttaggaagaagagttacatcgcgctagacaatcagtttagaaagagttcctctagctcccattccaatggtagttaaccacagactagatcttcaacaaatagatttaatctttgacagatttgtcacgctacaaccttcgacattcttaggtagtattgatactgttaaagtagaacaatggatgagtattctcacttacattatggataatatgggtatagttggaaccaagcgggttatttgtgctgctttcatatttcaagaacatgcccgcacttggtgggatttggtaggtcagtctcaagaccataatactatgtcctgagaagaattcaagaatctgtttgaagataagttttacaatattgctattcatatagctcacaccgtgatattcacctgagtgttttctgggggaagctggttctcgtcctcgtcagcgacattgcttctaccgtcttgagtggatggtttgaccactgctttgcgtgttgcaaccattgttgttgatgacaactctagtaattgattcttcaactctcaatgaaaacaccaaaatatttactaagattttggaagctaattttgaaaatagataagcttaagaaatagataaattaaagaagaagagaccaagattttcacgtggtttgagtgttaataaactctatttcacgagtcaatcttattaagctagaaaagctccaaagtatttcttacaagtgtttataccctaaatgaagaaccctaattcttagttcttctttccaaaaaattcaatctcctttacatgaaggggtaatgttctatttatagggaagaacaaccgagaatgggcataccagatccgatagggtttaagggtgtcaactaggccctttgacagagtaaaatacaatgtttattgactttgggccaattggatgaggcttaattcacgaggtaaggattgtctgtacaagcaaggaccatttgaggatgcgagatgtcatgcaataccgtgtccgtaccgacaatatcagagaatatggcgttggataaaaaagtagccttcttttggtagcacacgcactcgacagtatgatgtagaggaaaaactctgacactgtggggcctcgtgtctggagggttccgtgttggttgaggttcaaaagccatttgaatgactattcgattactcgcttcaagattacctcttgaaggtatccagattggtcttagcagactctttgcttctaggcctaatggctttgtctggactagggtagtccgatcttggtagtaaagcgagttgggtttacgtccaaatcggaattacagtttgatttaatcattgggcccaagtttgagccaaccttctggtattgggctttagaattaaaaacatcatcattcctaaaacccaaataataattagttataagtctattataacaactgtattcttaagctgttaattgtgctcttttgtattgtatatgttgagcttgagctcctttaatcaatgaaaattgtttttacaattctgttattgaatcttaacatagattttgttagtgtcataaatagaatatatgtaagactcagattctaaattattgaatctcgacaaaacatgtagtactaattacatacacattatttaaaatatttaaaattaaatagataattacaaatttaagacactgataaaattaataaaatatatacgaaactagattaaaattttaatgatattcaatttttttaaggaaataatattcaattttgatcctactaaaaaatcattaaacatttattgaaattgagaactttgtgtagttatgttttaggctaattaggattttcgcttcctgaattttgacatgtactaa

SEQ ID NO: 111767 - DNA, 2891 bp, Cannabis sativa
  modified_base (514)..(515): a, c, t, g, unknown or other
  modified_base (688)..(690): a, c, t, g, unknown or other
  modified_base (1720)..(1722): a, c, t, g, unknown or other
atagtttttttagggtttaaattattggtttagaaatcaaattttttgattttctaagtatagaaaatcaaatttccctatacaggaaaggttgaatcggttataaattggccgaggccaaaaatagttactgaagtacgaagctttgtcggttagcatattattactgacgctttgtggaaggattttctaagattgcttcgccattaactgagtcaactagaaaaaattagctatttgtgtggtcaaataagtgtgaagaaagcttccaaagaattgaagcagcgtttagttacaacactagtattagccctgccaaccgatcaagaaaaatttataaaaaccataaatttataatttcctttttttaatcaaaataagcctatcatgtaaaatgactacaataaaatatcatataatgaataaatcaaattagatcaattctacaaatcgaattcattgagagtcgacattaatattaggaattatttcacaaaaataataaaaaaattannaaaatacggttttacagaattttaaatatttttactatttttttgattttatttacaaaaaatacggtctttttatgttgtactcttattaataagtcgttgattttttgttatatatatgttattttttattattcttttgatgtttcttaaatgttattttcatgttactnnnatgtagttttcttattattttcgtattgtttttatgaaaaaccgtaaaaaatgtaaaaaaaaattctttaaatgtaaaaataattattttttacaaaaaaatagtatattatacaattgtcccttaatattatcagtaatatccaaactcaaacctcattttacaatattatgggcatgtaataacactacgaaacaactgagaaatcttagagaaattacatctccaaactaacctaaaattattcaagcaagaggtaatataataacatatatttcccataatagctacacaaattgtaactctaaaatatatatttaaactcaaattgttacaattgtaattccttcaatatataactctacatattttgatttgttattattattattaataatatatatatattgagtggtggataggaggggagagtgatgagctggtgccagcatagagatatataaaatgaataataataagatatatttataggaaggggttaaaccacatggtatagacacaagagtgtgtttttgtgtgtacattcacatcacatgcccacaccatgtgaactaaacccttttgtctacatttcttaacctttttatctttcatttttttaaaaaagaaaaaatatatatatactatatcatctcctctgtaaattaatatctccatctcaatcccactttattttctttttcatatttattgtttcccatatgcttatgtttttttccttaccccaaaaattgacattccacccaattctttttttttttttaccaatcaattcaactcttttattaatttgtcttcttttgctaataattatgaagataataacaatattacaaatctttttgaattttgtatagtatatagtatagcaattaatttattgatttactcataattttacctgaaattaaattaaccaatatatataaatataagactttggtaatattaataaaaatgttcatagtagcatttggttttatagtttattattataattattattatnnntattattattattattaagtagtaattaatcctcaaatatcatcctcttttaattttaagatttttttcaatataaaaaaaattaataatagttggatatgtaactatatttaagtggtgtttaataatactcttattttttttattatttttttaaatcataaatttgaaagtaaaattttgtttttttttttcaatataaaaaaattttgcttttagaaagtaaaaatattttctttaattattcttttttttttttaaaaaaaaaaaataaaactatgttatgtaactttcatttttttattatttttgtttttatttaaatccaagtccagatccggagtagggtttgggtccagatcttgaaccagggattaggtttggggttcgagattcgggtctgggtctgagtctgggtcctgatccggggtttgggttcgagtcccgatctggggtcagggtaagaatttaggatttgcgtctagggccaaatcgattttgggtctggattcaggtctagggttcgagtttgggctcaggtctggatccagagtttgaatcttggtcagagtccatgttcggagtctaggttttgttcagagtccaggcccgaaatattaatgtaaaaaaatacaaatatactataatttagaaaaaatgtgtttaatttttttttttttaaaaaaagtaactttttaaaaaaaaaaaaaaaaaattgattctgttttatagaacatatatatttttatttttctagttaagaaaataaaaatttgtgattaaaaaaatgttacatatatgacgaaataatttactaaaagaatataaagctatcctaaaagaggaagagaagagacaactatataagaactataagtggactaaaatacaagtattgctttacaatataagctaggtataggattctaggagagacgtatattaattaatatttacttaatgtctatggttcaaacttttctgaatgagagaataatatttatatatgttatatttattactaaactaaaaaaatataaaattaaggactagttaaaattatagatatttttagtttttgggttggtgtggacatgatgatatatgttatattaaatgtagttatataatcactacaaaaaatcttaattttagtcacaataaaattt

SEQ ID NO: 111768 - DNA, 3099 bp, Cannabis sativa
gtggatcggctactagacgccatgatgagaatcaaacaaaaacactttgacacaaaataacaaaactctataggaatagagacaaatcacatgtcagaggacatgacttttcttagttttaaataatgtagatcgctttgtttaaatgtttttctcactctctattttttcctaaaagtgttttaatatagaaaactctaaataataaatctatagaagctttgctaaattaaagaagaagacaataaaagatgagcgtaagtactaacctgaagccattgttggagattgcagagaaaattatgatcttccaataatacactttctaaagtattttctctgatgggaaagaagagaatatagaaaccctagtatttcttggggagcgctacctatttatagtcttattatataatgagttttgaatatatataatttgactcctcaacaaattataaattaacttatagtatctacacattatttccatgacaatttaatacccttttgatactcataacataattggtcacttaattttatatcacactttgtaatagcatatacattaattatacatatgtgcccacaataaaaaattttaatccaacatgtctttattggaagttgcattaagatgtaagaacagcaatggtgatatatatagtaacaattaatatttttatttatctcttcctttttcattctatctatctttgtccacttccactttatcaccgcttctcataactgtacccctctccacagcttttattttttgatggcttgtcttaccttaaatagaagggtcataaggggacacatatatatatatataattaaattcacatttataaatataataaattcatatatcacatttaggctgtatcaagctaccaggtgctttcgatgtgtagttatagtgtgtgtattaaactctctttctaactctaaatagtaaatgtatattattgcgaaattaaatattacaatgaaagttggaattggttagaatatcacatcctagcttttaagttttttttttttttttttggggggagttgtatgtgtacagtaagggataaatgattaaaacttaccatctatttgtggtcataatagtagtataatactttattttcgactacccctcccctaatatcaaacaaaatgataaaaatattactatctatttatgtgatattaattatacaccttatggtaataataataataattaattaattaattgatataaaatgagatagccacgtcagcataggtagggccgggacagagatggagcaggtccggcctttaccttattaatattaattcaaacttttaattagccttttgtctactagattctcccaagctccccctatataacccaccaaaccttttcccaactttctcactatatagaaagagcaacactaatatatatatatatatatatatatatatatatagtcaaatatggtgtctgttcaagctccaaatcaaaggaaagtgatcactccagaggctaagaataattcatcccagaataagagaataaggtgggaagatcatgatcctgatgatcagttgccttttaatttcgaaaaaaattacaataataaaagatccaaaaatgatctcttgatggcagctcatgacatagagctacaccttgagactccattaccttccgaatggcaaagatgtcttgatattcaggtaattaattagttattaactttaatttttgcattgctaattaattacatacatattatagctagtggaactgaataataattagtactgttatatataaatatatatatatatatatatagtcaggaaagatacacttttacaatacaaagacagaaacaagaacttgtatggatccaagggaaagtactactcatcatgatgatcagccacttttaaattcaatttcgagtaatgataatcatcatcatggtcatatgatcagcttagacctcgagctcaacctaacaacaacaagcgaatcatcacccataataacaaaaaaagatgaccaatatttcaccaatattaattcatcatcaaatactactacgactgatctggtttataataataataacgatctctcaaattcagcaatggaatattattccagcgatcgaaagatcaagaagactactaggaatactagtagtagtggtagttggccgtcgtggttggcgttcgaaacggcggccgatgagatggtggctaccgtttgcatgaggtgtcacatgttggttatgctatgccgatcctctccctcctgcccaaattgcaagttcatgcattcatcatccgaaaaaaatctactcaaactttaatatttaggttaattattaagctttaataaatttatatctatagctctgtattgagtaatttcttttcttttttttttcttgtttttatatgtaaattatctcttttaattttagtctggcaagcaaaataataatcttgcttgtagctaggccttttcctctatagctatacttaatgattaataattatgcattatatatagtttttctacttttaataccgatcgatggttaagaagagtagctaggtagactaaccttaaataatatatgtatgtaaatatataatattattatataatcatcctaattttgtcaggaaggcaagagtcttttatatcggatatgatgtagaaatcaaatatatatattcttgttttacctcattttttttttctcatttatatgtttgttctgatgatatatatgctgtttcttgtatatatatataatatatagatgtgtgtgtatatttgagtaaatgagagcaacacgaactgggtgtagagacataaatttgttgaaatattattttttaattatttatccagttagtactgcttattattatgacacataattctgtcgtggaaagactgaaaaccaatctggagccacttttctttcggttggggaaagttaataaatctaaggtaataaagagacaaagagataaaaacaagggaaatacaaagggaaatttgattttctatacttagaaaatcaa

SEQ ID NO: 111769 - DNA, 701 bp, Cannabis sativa
gccccggtgctagggcccactcattttagaggcccaaatgagaaaatgaccttttaaaaatactatttatttttatggtgaggatctaatttttttttttgtctatagcctatctcaatttaggaccggccctggcaacgagctagatgtttggaatctaatttcaaatcgtagatatttgaatagggacctcaacctcctcgtgagtgagatgtagttgacatttgaaaatagcatttagagatttgggtttggtgtagccaataaatgagtggtaagcaataaaatccttaaacatgcatggagcaccctggcctggggaacaaatggttgccagtcactttccttcccatttgatcattaatgtatttattatggtcctttcaaatattgaaaatgactcattgattcttaccaactgtaaatccaaatatcggaaattctcatgtttttataaataaaggtataataagctaatcacatatttttcattattatatattcctatcaccagcttcaaattcatgtctcataaattattacagatcatataaagtgtgtgtttcagtagtttgatgacattctactacaattattttaataggccgtgatgttttggtgttcctaattaattaaggaataattacataggtaccattttttgtaaaatatttatatttttacgtttaaagaatgttttt

SEQ ID NO: 111770 - DNA, 3885 bp, Cannabis sativa
  modified_base (1765)..(1775): a, c, t, g, unknown or other
  modified_base (1870)..(1885): a, c, t, g, unknown or other
aatgctaactttaaagacccgaaatataggttaattataacctaacagtaaaatccaaacaagcgatcgaccatgtcacatatctggactcaatgttcaaaatcttgtgtcattgcaagatgcgactcaattcactaaaatgtgttttcggcgtgggctttgggaaatttttaggcttcatggtaaaccagcttggtattaaagccaaccctggaaaagtcaaagccttagtagagatgtgatcttctactaagcctaaagaagttcaaagcctcactggtaaagtcgtagctttaaattgctttttttcataatcttttgataaatgtaaaaaaaaaaattagattttaaagggaaacaaaacattctagtggactgacaaatgcgaaaggctttgcaggctttaaaaacgcaactggggcaactcccaatatatactttccaagtcgttgcctggagatgtactttccaatcccaatattcactactctaggtgaatacttgcaattctgtgagtgttattattaatctcttcgcaattttttgtgttgtctattttcctctgataagatcaatgtcgaactaaaatgtttataaataaaacttatctttctgttttcctttcctgcaaattactctagacacatttcattttacgagctctctctctctcaatcgcttaagttttccttattttgtttcttacaacttctctttcactaactttacacatcaagaaaagaaaaaaacaaagatttacgattttgattttacggcgatcaatgatcatcgattttagcgccaacaatggcagctatacgtacagagactaataatcgtatagttaccaattggagaataagacttggaatattaactctcgtaaaaaatcaaatgaatttgacaactacaaacctaaagggatgatgagtaaagctgagacgtttacacacaaaagaattagagaaattatcccatatactattttttaacattttttttttcaaatttacgatttgagttactccggtaatttatatatggtttgctatacggatttcagttgcgatttaggttgctttgttagttgctatagggatttctatgtggaatttcgtaaaaatacaaaaaaaaaaaattattttgaagtgtaaaaataaaaaagctccgaaaaattatcaccatattgttcgcttacccttgtagtgtgactcgtccactacaaccttagtctccaaggttagaaccatctccatttttacttacaatgaaatcaatcacataactacgcaacacatgcaagtaggaattaatttacgtgcaaacggaattaatttattttattaaggtcgggtctggctttagacataggtgggttatgcatgtgcttagggactaaaaaaattttgcttttaaaaataacaaatttgttttactgattttaaaaaatattatattttttttaataaggacccaaaagtaattttttcttatggtctattaaatttttggaccagtcctaattaaggtaattagttaaaggaggtaagccaacattatattgattcactttaaatctaatcatcttctaaaccttgatcaatgtgggatcacaataaatttatgttttatatctaatatcaaatatacaacaaatggtcgggaaatgtgttttgtttacagagtaatttgcggtataaaaacctaagtttaactctcaattgcaaataaatacctaagtttaatttttttacggtaataatannnnnnnnnnntttttggaactctgtaggtacctgacagttaaatgctaagtcattgtccgcgtgtcattttcttattagtatatttaaattaatttttttaaaannnnnnnnnnnnnnnnacttggaccaattaaaaattaccacgtggaaatttacttcacttaacagtcaggtacttataaaagttctaaaattataacttaggtattattaccgctaaaaattaaacttatgtatttatttgcaactagaagttaaacttacatatttatgccgcaaattactcttctttatataaggatatggaatactttgtgtggctcagtaccaagccctctcatgcatgtgtctaggactcacttagcctaaggaacccaaaaaaatatttattttttaaaattacatatttttttactaattttaaagactcaaaaatattattttttcctatgacccactaaatttcaagcaggcccagtgagtactctgtttgtatagggtgatttccctttgttctttttgtagcaagttgttcatactatttgttatgtttttctcttgaacccacttgggatttgttctttgatagctatggagaactctggaaattctcttggtattataggtcatactttctcttgagatagtgagatttaaatagaatttataggttgtgctagaagaatggttgtacacttcaactttagagcttaaaattttgtgaattgaaaagttaaagattggtaccttgaatggtgattgcttgatatcattagattatttgatactaaattttgtacttaaaagtggtcaaaatcagacttgggattcattaataagatggatatttgtggtatgcaaaacaaagctcaatattaagatcttactatcaaaatttctacattatagaatggcataggaaaacatcataacatgttgattatgtaaaagaatacatttgaggaaatttgaacaaaacaaaaatatgatctgagagtaaattcgatgcagttagtcttaattaatccccaaggaacttcctcttctttgatgtattcatataaggtctaataacccattcaatctctgcttcactttgatcaactgttcctaactttatctgcaaaaaccaaacacaaaaccccaataaaataaattatacattagagaacatgtaaggctgtaaattatacttgtcttaaattccagttctagggaagatatgtagttcagattccatcatccaagatgcaatataatacaaacacatcatgcatacaagtctacatcattttagcattcccgaaatcttttgaccgaaagtatgaatatttatgaacattttaacaactatttagattgtgtgagccacggtgaactgttgttcttaaagcatcttaattacctggaaaagccgcaactcaaaccgaggaccgatctctttgagctcaacagactttggacctgcctgcctctcatatatatgatgcctataataatgttatttgggttagttaacttggttgggaatgtgacattaggcaacaacaagatccacataacatcggattatgtgatagaacaaacctaaacgaaatatagtcagactcattagcgaaagtaattatgcgtttcgtttcaggctttggagaaggaaagagatgcttcaaaatattcgctgccctttcaccgacctataaaaagtttaccaaccgaaaaacatgttagtatttcagcaataacaataataataagttaatatacgggatacgacactatctttggtatggaagaaacgtgggaggaaataaattgtagaagagaaaggtggagagaatacaaaaaatgagatgtttggtaggaaagaaaatatgataaaagtgaaaatgggaggaaaagagaaaggaaaagttctataattgtataggaatgtgaaattactaaattattatttactacccaaaatttatattgatgacctaagcgtaaatagtaatttagaataactctattttctttccttcttacatgacaaacaactatgaaagaaatatactctctttcctatctctccaattttctatctctttcatattttctttcactccaattttctttc

SEQ ID NO: 111771 - DNA, 3801 bp, Cannabis sativa
agacccgaaatataggttaattataacctaacaagccccagatacatactgtcctcccctgcttcctgaatatgcatcagattgcagatactatttctggtgttcaccacggtattggagttgaaaaaagcagatgatttgtggagactaactttttggcccgaggcgccttcaaaagtttggagaagttgtaaaacatggttggcttattcttccgaagcttgacaataaacataactgtcatccgcaaaaagtaagtgggagatagtaggggcgcttctagcaactttgcaacccgttataagtcttgtggcctcatagtgtctaactaaggatgagagtccttccgcacaaacaatgaataagtatggtgataacggacagccttgacggatgcctcgagtaggaacaatcggtcccatcttctgaccgctattgatgacatggtaacgaatagagttcacacaacttagagttaagcctatccaccaatcactgaaccccattactcgaagaatagattctaggaaactccattcaacacgatcgtaagctttgctcatgtcaagcttgagtgccatatagcctttttttcccttagtctttcttttcaggtagtgcatcgcttcaaaagccaccataacattatctgatattagtcttccggccacaaacgcactctgagtttcagagatagtttggttcaacacacctttcattctatttgccaccacctttgaggcaatcttgtaaagaacgttgcaaagtgaaatcggcctcatgtcactcatatgtgatgggttctttttcttgggaattagaacaatatgagtatcgtcaatagagtccgggaacttgcccgagtcaaagaaatctcgaacaaattggactacatccgccctaacaatactccaatgcttctggttaaaggccggggtcataccgtctggccccggagacttatccggatgcatttggaagagagagccttcctaacttcatcctccgaaatagccaccagcaattcattgttctgatcacaagaaatagtaggacgaacaccattcaaaatcgaacccaggttgatattggaggattgaaacaagtcatgaaaatacccagtgataacattttgaagacccgtatcccaatcaacccaaacaccattattatccatgagatggctaagactattactcctctttcttgagcttgcgactgaatggaaatacttactatttctgtcgcccgaattaagccaaaactgttttgatctttgcttccaaaaattttctcgttgggccagcacttcatctaatttctcctttccttccttatgttgttgtactgatataggatcacgcccccattttgagttttggatttggcttttgcattgggtaattcgttgtcgaaagttgcccgtgatatctcttctccacttcccaagcatctccccacatttagaaattttctcttgaatgttagtgcaacccgaacccatccaaccactttctataatctgcttgcatagaggttcacggatccaggcattttcaaaacggaaagaatgatgagtagttgttggaaagttacctttaaggattagaagtaatgggcagtgatcagaagaagaaaactctagattgtacaaaatagattgaggaaataacgacagccattcgtttgtcaccaatgctttgtccaaacgttcttcaatccaattggtggtatttcttcctttttcccaggtgaacgggtagcccaccagagccacatcgatcaagttacaatccctcaaggcattgttgaagccaacaatcagtcggtctgggtagtttcttccacctttcttctccatttgtgaacccaggttgttcatgtctcccataagataccaaggaaggttactatcttcttttagagaacgaaaaagattccatgtctgaaaccgcatctctcttcttggttctaagtaaatcccagtgaaccgccatagaggagaccccaccttctgtatcgtagcatcgatatggtttgcagagaaaccctgtatggccacatcactttcttctttccacaacaatgccaaaccaccactatgcccacgggcttctactacaaaacaaccttcataacccaaatgggttctaatactttccatacataacttattacataaagtttcacaaagaaaaagcaaattgtgattcttttggaacacaaggtccgataagaattgtttggcccgcgggttcccaagcccacgacaattccagctcaagcaactcatatctctgggcgggcctggaatccagaacccgccaaaggcccattttttgaaaaacccacactgtcttgctccatctcatctatactaccagaagaaaccttaacttgtgggcctatggacacacccacactagtatcaggtcttcttctttttgagtcaatgattgttgtaattgtggaatcaaaagaattcccattattatgcctctcattttcccccatgacattttccccatatgtatgcctctcattcagaaattattattaatatcatatccaagattcttgccagccgacccccttgattgctcctggatcataggaatcaagatggctcctcgttcaccgctgctaccgtgagaagcttgactcgattcaccccgcaccaccgcccctgatcggagccactgtgccccaaatgtcgaatttcttctctgcaacgtcgcccgcagatccaaactataaggcttctcttgtagatgcaatggttcaagaaaagcctggggcagaacctctcagcatggcctatttttccacatatgaaacaaaaagttgggagtttttcatatttaaaattaacccagtaccaagaggaatcatcattgctcactttcattcttctctttattggtttgtcaatattaacccgaactcggaccctgagaaaatctctccaaacacccacaaaattattaggatccgactctatgaacataccaatgaaattcccgagggccgttacaacactaagtgtcatgttacccgattgtagatcatggagttgaacccacatatctatatgattaatctccaccaaccgtgggttatcaccctccttcaatctagtaaatatgagaggtttgcgatcatatgtccaaggactcctgtctataactctttgtatgtcgatctcatgataaaattgaaagaggaataaattcgagttgagttctttcacatacattcccatccccggctgccaaagaaacgccatcatattctgaaaaacgttaaagtctgagacccgccccgtcaatagttttcccaccaagcaccaccttgtgtcgatcacaatctcttcggtcctactcaccggaagccttagcacttcttcctcttcctcttcctcatccagcctaacaactccttctatagcctccatatccctctcgaaactgctattcgatgccataggaatactcacaaaaataaaacaacaactctcaagatagagagacaacaaaacgtatcaacagatacgactattaaatataccattgtgtactgaatattggtctttcttttttaaataaataattattaatactatattataatagaattattttagagtaaatataatgttaatacatttattacaatttgaataaaattattaattttatgtaaatgaatttacaaaacatgtgtatatattttattaagatgttattattcttatatagaggtatactttgttaatacgagacttagaaaatgtataactaa

SEQ ID NO: 111772 - DNA, 7621 bp, Cannabis sativa
  modified_base (4390)..(4399): a, c, t, g, unknown or other
  modified_base (7571)..(7574): a, c, t, g, unknown or other
tgtaaagggttttatttagggcacaaaacccaacaccccatatgtctatatgaattaaatcaaaacattttttagcaatttgtgatttgaaataaagggcaatttcttttgtttagcataataacaaatggagcaataaaaattaggacaagattgaccttgaaattgtaaatctttattcaatgaatgaatctttatacaagaaggatgccccaatctatagtgccatacagtatcacagtttatttttgaatcagaaaataaagaaaaaacatagggactggttttcttagcaggttgctcaagatagaacaattttccatgtcccttcgccatcccaatctattgtgtcttcaaagtatcctgaataacacaatgattagggtaaaaagtaaagatacaatctctagattcaagtagagaagtaatagacagcaagttaagatggaaatcaggcacatatagaacatctttgagaattaaatcagaggaaaggacaatggttccaagaaaaaaaaaatctcacagtatttccataaggtagattaacacatgaaatcctagaattagaataggtattttggaaaagagacaagttgtgacacacatggtgagtagcactagtgtcaagaatccaagtaaaagaatttttggtaatgttcataccagaaagttgtgacacagtaggctgatttgcttgttcattcccttgttgctcttgccctttctgagataacaagctcatcaatctctgacactgagcaaaagtggccacaaaatcttgttcaatactctcgccacctccactgttttcaccatttttctgaacatcagagaaatttgtagtaggagccttatttgtcccaagtgcatttttgttggggaatttaccatgcaacttgtgccctggtggatacccatgcaatcgataacacttagccatgatatgcccttgaacaccacaattatgacaaattgttttaggtttatgaggctgaacactccctgcaaattggcttgaattggaggatgttggaagagcagtcttgtcaccctcactgtgatttgtaacaattcctcttggtctttcttcttggacaactgaggcaaaagctttattgatttttgggaagggatcttgcatcaaaatctgagatcttgcataggcataggactcatttaagccaatcaaaaattcaagaacacgatcatcatcatcttgatattcttgaatggccttcatagctccacaagtatagaccgactgtggtctgaattcctgaattaaatcccagaaagatttcaaacgagtaaagtaggtggtgacagaatttgatccttgaaccagtgcctgcatagaccttttagcttcaaaaacccttggagcatttttctgatattatcgttcttgcagctcagtccagatcttggcagcattgtcaagatatacatcacactatcagctatctcactggaaatggcatgtaaaatctatgatataacaagactgttacatcgaaaccaaacatcataaagctcatcatcgacatttggttcaggcagtcgactatcaacaaatttgattttgtttctagctataagggctacaatcatggatcttctccatgaactgtaattctctcagccagtcaatatcttgggaacaagattgatagctgactgatctccattagaaatgaagtaaggacttcgaggatcctcccccggtggtcgatcgttaggttccataacagagactttattggcttcctgagattggcctccttgatttttcaaactccgagcattagcaccacgagccatgaaccacaagaactataaagaggaagcagtagacgaagaagagctcacgcaaatcgtggctctgataccatattacaaaaaataaaaaaccaaagaaaatgaaaaaacagagaaaggaagaagaagagaatgaaacaaaattccttaattgatgacagaagaagagtgagccttatattgtgctcaagcttaaaggagtacaagggagttagttaacaaccgttacaaacaaccaatgcaacaaacataaataactacagctaataactcctaactgaaaataactgtcaaaacagaaatagttgataacaacttgcagaaacaatgagacaaactttaataaatattattattgaatctaattgtttaagtgttgtgttgaaaattaaaataatatatctgttattacttctttgggtgtactattggataatatttttggtctttgtattatatgctcaaagttgttagttttgttagagatcttataatagtgttgttcatgccttgaccaaacctacattaactacaaaaagtagcatgatttggtggccagaaaagtctaattgtatccaaaatctgttaatagcagatgctatctttaaataaatcttcaacttcacccattttagagtacttgttgctcttaatatttaattttcctcaaacaaaaaaaaaaacattttttacattttttacatatatatatatataaataattaaatataaacaacatatatatcaagactaacacacgttccttactacactaagttagtattaccattttcttcttcctagtaaacaaagtaagaaggtaaaattattctctctctttctttccttgttatctttttaaaattttctgaataaatttaatttgaccctttatctaagttgagtgagttgaattgaatttgtcaaaaccatatagtagaatttgtctccacgtgtggaccctttcacataaataaagatacgtggctattagtagttggtgtaatttatttatatataactaagacctttcttctatattaattaataataatattacttcgatcatcatataatatatatatatatatacatatcctaagaagaagaagaataaaatgaagtcccacccctctcaatattaggatttttcttggttgtttccaggaacttcaccagattagaacatatatagctatatataaatatagttatatagcatataacatagttggttaatattaatactcaatatatcatcatgggaaattgttttgggactactcctgtcaataatcatgataccccaggcactaccaagcatataataaattctcatggtatgttctttaattagtataaattgctaaattatcattatatacatatatatatatatataagtttctttcattgatttttaaatgtgttgtgttgcagaaacaaagaaattaaacccacctgatcagaaaaatggattgggaaataataagggtggaagtagtagtagtagtaataagtatgaaaacgacgagattaatatcgaaacgacaacgacaaaaggtatggcaattggaaaagtgataacaccaaacttgaagctcttcacgttggctgagctgaagaaggccactagagactttcgacccgacaccgttttgggagaaggtggctttggaagagttttcaaaggttggctagatgaaaagacctatgcaccctctaaggtcggtgtcggcatagctgtggctgtcaagaagtccaacccagatagctctcagggccttagagaatggcaggttcgtaatttcaccatttaatcaattaattcattttaattaactgcttcattatgttcatctttgggggaattatttattaatattaattagaattgttaaaaggtactgtatttaacaccctctgtattatattactattagtgtaagggtgctaaccaatcacaacaatactctattgattatataaaatgagtagtcttaccatttgtgttttagttatataaatattatggtaagtttattgcacaggattcaaaatcaaaataaattaatagagaaatataataaaatatatgaataataatcggaatcaatatttataatgtgttatttactaaagttgtttagagataataagtgatcttgtttactaaattattcttttaaattataatataataattatttcataagatatattttaaaggataaaattatcattatatattaatatttaaaaagagaatttataattttatgtacattatagcacttaattacattatatgtgcataaaaaattatttacaatttatcatatattttattaactatgggaaacatattgttaatttttatgtacaaactatatatggtaaaaataaataataaacatacatgttttatttataaatttgtatttgaattttaataaatacattatatcaacatatcatcacatacttagttaaaaataatatatcatcacaaacattagcataacaaatatattagattaataattaataaacattatcaataataatnnnnnnnnnntgtttatacataaggctacatttaattacaattttgtttattttttaaacacatttttcgataactaataaataaatattatttaaagtgtttattcaaataaataaataaataaacttaagtgttccatttttaaaattattataatattttaataaacaaattatatttattatcataataaacatattagattaataataacattataaaaattaataatactaatcaaatgtttaataaacatatatatatgcattgtttataaaatataaataaaatttataaatgtgtttgtatattttttttaatttcatattaaattttagtaaacatattattttagtaatatattaaaatataaatattaatttttatatttatatatttagctatatgcgtttttttagaagatcaattgaaagtaatcaacaagttaaaattgtaaacatatatgtttatttgtaaatatttataaaattgtatagaattatgtaattatatttttttacacattttttgtaatattatatatttacttgtatataaataaaaattgccctattaaaaaataaattaaaaataaataaaacccattacttttaggctaatttgaatttttaccccttgaactttgacatgtaccaaatcatgccctctaaatttttcacgccgttaaaaatttcccccgaactattgagattgttagattcaaggacttttgtccaattttactaaacaaagtctgatgtggataaaaatttagggggtacaattttgtactttttaaagatcggggggcatgatttagtagatatcaaagttcaaagggcaggatttagtatatggacaatcgttatattagtaaaattgaatgaaattggacagatgtccttaaatctaacaatttcaatagatcaggaaatttttcaacgacctgaaaaattcaaagaatataatttagtacatgtcaaaattcaaagttcaggaggtaaaaatctttttctttaaaaaaaatagagggagaaatattctttttcttctattccttatttaattgagtaaataattgtaagaaaataactatatgagggttgattcttattgcttattattgtgtatgaaaagaaaaaccaaaagtcatcaactccaataattataaggactacaacgatgacactctttttttcttcttgatttttttttttattattattattaattactccaattgtgaaaccaaaataaaaaattgttttggttgacattgacattgacaaacaaccacaaaaacagctaagaaaccattatataaggcaaacttatatacgtaattattcatttattacattatgatttatatataatatatatatatataaaaatttggtgacaattttatccttctagtacaagactcatatattaattattataactaactactacaattatggcaagagacgcccttgaaaaaaaaaattgtttaatgtacttttattaattaataattagtctgtgtttttaaaatatttttcttttataattttaaaatcgggtgagacgacgaccacgactaagctccattcattgtatttgtttcgtgcctaattataatcataagagaattgatttgacaaattagggctgtttaaaaatatttaaataaatcgcttaaattaaatcgaataaattgacaaaaaaatacaatctaagcaattttacaaaaatttaaaccgccaataaatatataaggcgggttgaatattattctaacctgctcaaataactcaaataaattcaataaactaatttatatattttttactaaaataataatatatatatatataaattacgttttataattaaactattttacatttaaatttgtattttagagtatttattttaaagaatttatagttgataattttgattgtatttaaatattgaagttgaaatttaaaatttacatataggtatattttttttattctatatgttatttagtactttaatgtttattcaatttatatttattgttttaacattaatttaaattataacctttttaatcttgaaaggcatatactatacatttattttttcaaatcaattatttgaacaccaaaaactaacaataataaaaaaaaataaaaaaataaagatcagtttaaacaggttaatcggagcaaaccgatcattgagtgaattacactttttctttttattttttcattgtacgggttacaattagatatttacaacctgacatttatattaagttagtaaaaatacactataacctgaccaaactgactgatgtcacctctaataacaatatacaaatatattaagttaattatgatttttgtaccctaaactttgacatgtactaaatcatgctcttgaatttttctgactgttaaattttttactgaactattgagattgttaaatttaagaatttttgtccaatttcattcaattgtactaattcagtgattgtccatgtactaaatcatgctccccaaatttttcatatctactaaatattcatacccttcgaattttgacatataccaaattatattctctgaactttcatctatgttagatttttcttactaaaattgaacaagtcctcaaatccaataatctcaatagttcaagaagaatttttaacgatcttaaagttttgagagcatgatttagtaaggataaaatcttaattagccaatatatgtgtatgtatatttatgtgtaatgatgttcatatatgtattttcttttgttttatatatttatatagtcatccgttcaaatatataatatttatatgtaagattgttcttaatatataaattgattttgagagtttaatttggatatgtatatatatttttatacaaattttttaaaaaattgtttatacacgtattataaatttagagtagatttattaattttatataaataaatttataatacattttttattaagataattattcttatataaaattatatttttttaatacagaattaaaaaatatataattaatattaatttaagaggtatttttatttatataattagcttaaaatagaacttcatttttttatgaaaattactccatatactggttttttaacttttttttttttnnnnaatttacggtttaggtttctaaagtagttgcagcgctagttgcaata

SEQ ID NO: 111773 - DNA, 5233 bp, Cannabis sativa
gcaaagagatgcactactcaattcagtatatgaaatgcatacagtcaaagagttctacatcttaacttcagtggaagattttattataaataagatctatcggctactcctcccattaccaattaattttaggatagaatcttagttatcttatcatattctaacatggtatcagagcaaaaataaataaaaaaacttctagcgattatccagcccaaaaaaaaaacagataaaaaaaaagccaaatccaaaagcagataaaaaaaattagagtcaaagtcaaaaaattacttgtgattcggggatagtgagccaaaaagaactactaaaagtccaaaaataccaattcaaaaaagtagagcaaaaaagagccaaaaaagttacttgtgatttgggaatagtgagccaaaaaaaaagtcgcttgtgatcgagttgttcaagatggtaagcaaaaaaaaaaatggctatcatcttaaagaataatgttagggagtctcgtattgttaatgtgtgaaaaaattatagcatatataagattcatggactacttctctcattgtcttttaggatgtaacctcatgcattttatcaaattctaacagaaaacacaagtgagttcatcaaagacaaagaacacaaataatcaagatgagaaacaaagttatacacaagcaatccataacactcaagacaattctaaactaaactttgataaaacttagatcatacccaaatgcgaaatacaagactacaacaaccaaatgaaccacaatgacccaagaaactccactgaccataaaccccaaagcttcttatatactattttttttctttattatcaaaaaaatagagcttacaattcaagaaattggtcaaattccattctaggatcatgtacttccttccacattgaaaataaagagtcgtatcataaaaaagttaccttttttttaccaaattgaagatccccggagctcccaatcatcaaaagcttgtaggagaagaagaagagtcgcacacactcttagagcatctccaatgcaaacaattctaaaagttactacaaaattccacattattctaaaatataatattttattttctctctcattcacatcatttttggccatttactactaaaaattactccaacacttaataactctaaaagttactcctatggtcccacacactatatttatcttcaatatttaacaactctacaagtagcttcaagtaatgcttgaattttgatgttgtgacagccttagttagcatgtctgaggggttttctgcagttgaaatcttgtctagtttgatcttcccatctgaaattacctctctaataaaatgtagtcgcacatcaatgtgtttggtacgctcatgaaatatttgatttctgcttaagtgtaaagcactttggctgtcattgtgtacatgtatttgtctctgacttaaaccaaaattagtggctattccctttagccacaaagcttcttttacagcttctgtacaagctatgtactcaacctctattgtcaaaagagccattatagtttgcaagttagctttccaactgattatgcagctgtttaggcagaaaacatagcttgtttgtgatcttctggtgtttgagtcaccagcataatcagagtcaacataccctgtaatctctggtgaatgataccttagccccagagtggatgttccctttaaatacctcatcatccatttgacagccttccaatgctccattcttggattttgcataaatctactaaccatactcattgcatagcataaatctcgcctggtgcaaatcatgacatacatgatactccctaccaagtttgtgtatggtaccttctccatatacttggtttcttcatctattgagggtgcttgcatgttggatagcttgaaatgttaagttaatggtgtgctaacaggtttggcatcttgaaaaccaaacctggttaacagctttgagatataccttgcctgagatagaactagttctctgatctttctgtctctacagatctcaattccaaggattttcttggttggcccaagatttttcatttcaaattttgtgcataacatctgttttaccttgttgatgtcttccatgtacttgcctgcaatcaacatatcatcaacatagagtaataggtaaacaattgactttaccttagaactcttgatgtaaacacaactgtcataggcacaccttttgaaatctgatttaatcatatactcagcaaacctcctataccattgtcttggtgattgctttagtccatatagagacttcttaagcaaacacacatggtcctcctttcccgcaacctcaaaaccctatggttgcttcataaagatctcctcctctaattctccatgcaagaagacttttttgacatccatttgctcaagttcaagatcttggattgctaccattgctaaaatcattttgattgaagtgtgctttactataggtgaaaaaatctcatgaaaatccactccttccttctgtgtgaagcctttggcaaccaacatagccttgtaccttgcttcctcaacccctgggatctcttccttgtacttatatacccatttgcagcctagtatctttctgtaagaggaccttatgattagtaatacctttttttataagaaataagtggttaaaattgcttgccacataaatgtctgttaaccctgaatattaacaaggctatgtttcgagattattcaggcaaagtgcgccattgactaagtttcgtcattaagcttaaggtgatgaagccgaagccatccccacttcaagtccctcatcttgaagactcaagcatcaagacgagaagccaagctagcaagaattctggcaaggcttgcatgcaagcatctcaacagactttcatgcaagcatctcagcaagcatcttgtcaagcatcatgaaagcatctcgacaagcatgcatgcaagaaactcggcaaagcttgcatgcaagcatctcggcaaacttacatgcaagaatctcggcgaggcttgcatgcatgcaagcatctcgacaacatcaccaaggcttgcaagcttgcaagcatctcaacaacattaaggtattattgtctaaacttctagggacatctctttctcatattcgttgtaattttaatactgtagctcatagattggctaaacatgtcctttgactagacgatgagcttttttggttagaagatactcctcctaccatttgtaactggcttccaagatatgtttaatacaagcattgtattcttaacaaaaaaaaatgctatttttgaaaaatgacccttattatatgttgttgggaagtaaatggatcatcattgaagatgttaatgggcctttgggcccaaaataaagacccaaaactgaactctctctctctctcattctctgtgagttcaccgtagtagcggagtttctcacatcggtcggcgacggagttcctcatcctcaactcaaaggtatctcagtattctctcttttgtcaaactctcgtgatatgcatgctctgtatacttagattgaataatattgtcaaatcaaactagcaacaatcaatggtgtcatttccctaattaattgctttgagttcctttatctaaaacccttggtaaaatgtgtttacttgcttccattttttagttttttaaattaaagattagtaatttggggatttattagtgcttaatgccctttaatgaagttgatttgttactaagagcattagtgcatttgaatgagaattttatacaatcgtattataacatttacagtaatctcttgaacttgtctttatgttcaatcatcatagattttcatttttgtttgtttgatgaagattcaattttggaaatggaaaatgtgattgaatgaattttttttagtctccaccatgctttctcagtgcttttctcagacggccaccacagccagatacttccccagcactttgttttcacctcccattcccatttcaagtgcttcagctctcaatttcactgatactaggggaggctgcctttccctctcactcactcgtggagccaacatctccatggcctgtaattcgaagctctcgaatggagtcgaagctctttcctggggtctcgatgttgatcgctttgctgaggttgctaatgaggctgctgatgcctctggagttgtgcttcgaaaatactttcgtagcaagttcgagattctagataaggaagatttgagtaagtctttttgtttgtttgctgagaaaacatttctcataatgtgggaatcatacattatttgtaatttctcatcattttaattcatcagaacttttctcttttgttgtacaatttggagagagctttattgagctagttggaaaagatttaacatttcggtgggaagaaagatcctgtttttttttcttttgttggctctatttggttactgagaaagtagaatgtggcctttcatatgaatggtctaatataggaatgggaaattcttttgagctttcaataaagagagcttattatgagttagtaggaaattcgagatttgaatatagagagcttaattcgagtgatttcaaagtttccatattgttgaggttgaaagagtttcataaagaaaagagttaactgggttgtcttgtttcaagtagttccttatttcgatttgatttccagataaaccaggaatatagagagcaaatcaggtactaagcctagaatttctgctctaaaaatgcttcaaaatcaactgcattcacgtaatctaaataatatatctatttattaaatggattttagtgactaaccagatgttctatgtggttcactacaggtcctgtaactattgcagatcaaacagccgaggaatctatggtatctattatattgaaaaactttccatctcatgctatgtaagttatttagttcgaatcaaattggtgtaattcaatgattagaacttaggatatcattgcagacccttccaatttgaggctgtatttgataaatcctaaatgtgatataatatggttatattagattaagatcagtggtgttgtagttttttatgtagatattgttttagttcttgtgtctttatcatactagttatgaaacaagtctgtagaaaatagtgattcgaattgtgtgtatatttcatagaatagtacatatttatatacaaa

SEQ ID NO: 111774 - DNA, 12166 bp, Cannabis sativa
  modified_base (28)..(47): a, c, t, g, unknown or other
gtaaaaaataccgcctggcagtattttnnnnnnnnnnnnnnnnnnnntagtataccatgtaaattttcctagcaatattctatttcacaagggtgttaggcactatgggtgccctttagcatttctctttgttaaatgacaaaaaagattatgtattttttaaaatagtacaaataagactttgagctcaatttttaacacgaacaaatgtagaaaacgtaaataattttgttataacacctcaatatcatgttattattaagttttattttgacaaaaaaattaattcaagatatttttagtactattttagaaaatacagtccaatttatcattttacaaaataaaatgtccaattaataatttttacaaaacatagggttcaaaataatatttacccactcattattaaccataataataataatatttcactaccacatttgatctaattttttattttatttaattttaatagctttcataatcaaatcctaccaaaaccataataatatatctagtaattattattattattattattattattattttcatcgttgaaggtatcttttattgtggaatctaatgccaaacgttactattaaaattcaagtactattattattattattacttatatactaaacaaaatacttgatttggtttcactcatttcttcatcttcttctctttattattaccctttttgttgttttgatcaaaacctctacaaatatatatatatatatttttatatgtatatgtatagagaaagaaaaatgaaggaaatggtggtgggttcatcatcagaagtagatgtagaagaaggtgacacaagatatagaaagatatttgtaggagggttggcttgggcaactcaaacagactccatgaaaacctattttgatcagtttggtcacattgttgaagctgttgttatttctgataaacacactcaaagatccaaaggctatggctttgtaacttcttttcacctttctctttttttttaacattaatatatacttgagtattagaaaaatttgaatatgtattgttgttgttgttaattattaggtgacatttaaggatccaaattcagctataaaagcttgtgagaatccttaccctgtcattgatggaagaagagctaattgtaaccttgctgcttttggtcctcatcatcacaaaaatcctacaaacaatgctcaacgcggttagtatgaatctcgattttgttgtctttttagatatcttacgaaaaacatcgagcaataataaattttttagattgttgaccaattaaacaatatcatgttagtttgtgtgcacaatacaaattacttatttgacattatacatatgtaaactgaacctgaattaaagtgaattaggctcgacttacccaaccaccgaagggctcatttttaaaaataccacatgtattttaaataaatggcttaataatttttattctcttaaagttcacccaatctcagggtcaaccttgcatatgttatatgatagattaaattagactaaacacaactaattacaaaaatatgattacactttttgtgtatggtatattcactaaacatgattaaggatttttagggttatggaaggtgaaatcatcaacaatgggtgtggcaagaccagcttctaattctttaggtgtctcaacatataactgccaaccttatgcatacccttatggagcttatgggtaatattcttatataattcacttcctcttttattattgtattagtaccaaaataagcataggtgcaaatgaataaacactcttcttgtactaatttctaagttttttgtttcattaaacactaaaccaggtacccaaattaccagcaagacatttatacactggtcagtaatttttatactttcattcattctttctttttaagtttcatttgaatcaagtgtttgaatttgtgtttgtttgtgaagaattattattacaacaatgctagttatggtgttaatgggcaattacaagattttccagctcaatatgtaatagggtcccctaatgaactctacttcacttggtaccaaaatcatcttcaacatccattgttaccattctcaacaatcaatcccaaaaccacccaaggtgaactttttttcacacttaaaaatcttccatggtttgaagaagaataactaacactgcaattctttgcaggagcaacaacaacagtaaatgctgcttcaccattgcttggaactacatctcattctcaacacacttgatttgcttatatataaatatgtaaaagggttcatggcaagaatgaaaaccaactcaaaagaacacaatgtattaagttttgtggggtattagagtatttatctatatttttatatagcaaagaccataattttttaccataataacatagcaaaagggcagaagaagaagaagaacacaataagaagtataaacacatatagatagacaataataacatgaaaaaaggttgttcataagaattctttttcgggttgttaacatcccgaacggttaagaaagaaagaaaaaacagttatctcagtcatcaccagtagtaccattctcctcctgataataatttcatgatcataataaattaaacgatttcggcacctcaaaattcccatccaactcttgatcatcatcatcatcatcatcatctacatgatatatgctaaaacaaaatagaaaccccataaattatccttaacccctcctccatacataaaaagaacaaccgataccgggtagcagcacttcagaggaaaaaagtatagagataaacaccacaagtaccttaaaagattgtgtatctatgtatgtatatatgtaaatatatctatcagcaggaaattagtccaagggaacaacatggctagtaggggtaggggggtcacttcagtgcaatggaggacgaggagcacggggccgaacaggcgtctttgacgggcttaccctgcaaatattgggattatttactcacgaatttggtcaaaaccgaaaattaaaaagagaagggtggcttggctttatactaaactaaccttatcggcagagttccaagaaccacaccactgcagttaagagctgcaattgcactttcagcctgcgaaattcgaaataacaaactaagaaacggtataacatttagtgataatcggtatcaacaaagatttccaatacaaattcattcgaatccattcggacgttagatatagaactggaattaaatgatagatacacgatcgggatgatgttaaagtggtcaaggaattcaatgtagttgaataaatctcataggatctacaagactatttccacaaaaacatatattttgaagatacatatgtatctgtttcaatgaaatgctactcagaattttcatcggtattcgaacaacatggtaattattatatttcatgacaacaaaacttcatcaaacatattcagcaacaagcacagaagtgaactaaatgagttaagaaaccccagaaccgtataagccacgaatggctttcattggcgtgatcaaagccatatttattgaaggataaaacccgattcaaatctcgggttgggatataagctataaaaaatacatataagctacacaaggcgcctctgaaaggcacaagaacaatttattctatataatagaaatgactcggagtataagttggcataaaattacaaaataaagaaaatgcaactattgtcattaattcctaaagtaaaattgtaacgcttacccgaataccacgtacgtaatcaataataaagcatgcaaaatttctgttttttccgccatgacatatcaagacaattattgcaattagcatcataaatactctagatgatatctcaataacatgatctttgtaattactttcaatattctttaacatgacctaatgtacatacaacgaaaagattttcaaaagaaaattaaaataagaaaagagagttgaaccagcatgagttttcaacgatagttaccattgtgaactcaacgaaagcaatgcgtgtggaatggtgatagtccccgagcagcctcaagcgttgaacctataggaaaaagaaaaacatgagcatatttcgtaatacaaaagaaagcaacgaattttgctcaaaaatacggtacaaacctctccacaaagtgactcaaagaacagtttcacatctgcctgagtgacctaatcggaaaagcataagaattagaaccaaatagaacaaaatttcatcttgtaacataaaacagaaatgtgatttaaagtcctaccttcttgtcaatatttgtacaataaatagttctagagcacatttcacgttcatcatccgactgaaaatcatagtgcaaagtcaaagaagcagatgttaaacacgaattcaaaataattctaaactctacaatcatattaaggccatgccaaattatgcgttctcaatctcacccttggcaaaaatgttgggttaacaggagctattgccgttttggaaggaagcactctcactgggtaatacccaagcatggttcccgaaagactcaaagcagcccttgcaccatctacaaacatataaaaagccattaaaaacggaaaaacacagcaatgggcatcgattaaacacttcaattaacattaccttcatctgtgaattccacaaaagcaaagcgaaggatagagtttggatcaccgcaaacacgacaatcaaccacctttaagagagtaacaagacaaaagattcagacaaaataatcccatcattatctacaaaacaagtaaatgccagcaaaaccgaaaaggttacctgtccacaattaagaaagagcgcggcgagattctcttcggttacctaattcaatgcaaaataatcccaaagcatgttggaaagaaatctaacaatgtaacaaccaaccacaagccaaatgaaatgaaaaaaactaacctgttgatcaatgtctgatacataaacagtcctcctaatcattgcatctcgttgtgccgggctcaacttgtgataattccttcttctcccctgagtatagccattcttctattaagtcaaacagtgaacaaaaacattagaatattatcaactttgaacactgagaaatgagaaccaaaacctcttaagctaacataccaaagttattatcattctactttctagtcatacaattttctcaggaaacaaacgaccaaattaaacagaaaagaaaacataatttgtaaaagcaaaacaaaacataccttcctagcaagaaatccatttacattggcagagttgttaatgtgcattaaaatatttccagcataaccaaacgcagcaccaaaagggtatccagaatttttggcaagagaaggaggaacaaactcctcagccatgggattaagcttagacagtaaatcctccaaatctctcatatcatttttatagctttcatcaccattagaactgtgatcaatcccatacccaccaccaccaccagagttaaccatcaccatctgttgttgttgttgattattattattattattatcaaccccattggactcaaacccattttgcatctgagcaatttgagtctttgggactgaaaaaccagctgggttcgcagcaactttctcttggctttgaaacttgacaggagaattctgatcatcatcatcatcagcagcagcagaatcaacaacagcaacaacactcaaaacccctgaagaatcatttctgggttttggattttcaacatcatttgatgacccattagagacagaagatactacagtgttgttgtcctcaaacttttgtgcattctcagcaaccgccatgatcagagaaaagaaaagacacaaacttgaaacccccctttattcttttctgatcaaaaagtttgttcttttccgaaagatttcctctgaaaaactctagtttacataaaaaaaacacgatcaaagcaaataaaaaaccaatttttttttttaatttatcaaaaacataaaagaaaaaatttatggttgaagaatgcgtacctgactcttttttttttctaaatttcagagcaaacccattgaggaacaacaagtaaagatcggttctttagtactacaatcaatttcaaaaggaaaaccaatgataaaaaacgagtctttaaaatcgatatgaaatggaaaatggggtaattattgattaacactaagagaaagagacaattttttatataatatttaaggatgaattcaatgaagaaggagagagagaaggagggtgtttgggctgtactagtactgcctttttggaccttctttcatctcacaacacaacacaacgtaccaaaaatgatgatgttgttgtttgatgatgatgatacatatatttgttatgtatatatatgtgtatatgtgtataatatgtatatgaattggtataaagaaatggaagacctcatcaaaacaaaccctcttaacaactttatctttaccttccaattttagccttttttttgggtttttaatttacatagtttttttatttttttaaaattttatttattaatttatttattaccttactcagcatgctttgaaattatgtaaacataaataaattgtgttgtaaggcacacacaaaaaaggaaaaggtaaacttttttattaaagaagaaaaagaaacaaaggtaatgacaattatattattattattataattattattattattatgttgcaaagagtcattttcataaggataataatatgcttatgtatataaaaaaaaatggagaaagaaaagttacattctacaaatgggaaattgtttttctatgggtaattcttaatttaatgatgatataccattttttctatattttctttgcttaaacaaatttcttctattttattaaatatatatttatataatagtcaacaaaatgaaatactcaaaaggaaaatggcataaccacattgtattgcttattaattttagaagaaatagtcaaaaacaatttatctatctccataaaaaagtaataggaaatttctttagtaggggtaccctagggttcgttttattagacaccctttctgtttcggcgtttataaacttgtttattttaattttttcataatcgcgtacgttgtagctatttagtatacttgtaaatttttaaaaaattttgaatagtctacgttactgaaaataaaatttaaatagttatttaccatatttattaaaaaaaaaaatcgtgtgtacaacaaaatatataaatattatttttcgatattctaaaatattagaaactttttgaaaatttccaagagaaaaaatgaactaaaaaattattgtaggtaccaaaacaaattaaaaatctaccaaaatacttatttaaagaatgtactataaacttactcaaaataatatttaattataataatattttttatttttttaaacgatctgctaatataattactcataatcttattaaagcgtcttattcttttctaaactaagtatttaacaaaaatgatattgttgtgaagatataatcttatctttttactaatttcaacattaataaaaattctatatttatatcaacaaacaaaaaaatatttgttattcttttataataattattatattgagaatgacatttttctttgtgaggcttgaattgaaaagaacacttgtcatagttttttgattgagcacatgcaataataatatggagtaggacttaaatttcaaggaaatatctagaactacaatacgaagtacccatttattaaaaattaaatataaaatatgaggaccaagaaataatgaaaaagaaaataaacctatcatttatttatttatttatttttatttacttatgttttcttttttttgaaagagaaaagagaaccagccaaactggccaaaagaatcttctatttaggaaccctttttttttacattaaaaagaaaacaaaaaaaaaacatttttttataataatattttggttatttattttagggcatttacatgagcataggtcgtccaaagaaggagaagtgattgtctgcgaccgtgtacatcgatcatatctgcaccctttctatgggaatgacacgtgtaagaagaggtgggttttacaatcgcgaagtgataaagttacagcggctgtcattatccattgcagtcacagacatcaccatttcatttttattttctcttttcttgagaagggcattttcatatggtacgttcttttctcacaaaaaataaaaaataaaaaattctttgtctttgcatttgaatatttacataatataataataattatctaaacaaagagtgtttttcttttttcgcaaaaagataaagatgagatgagaaaatagaacatattcaatttggattttgggttatctaactttttaaacaaataaaaatacaaatagagtagcaaaagaatttctccacccatattttattcaacaattattaaaggtaatgtttgaagaaatattatataataaatgtttatgatttttttaaaaattaatattaaagagaaatttagaactatgaaaataattaaaagaaataaaaagacagtatttttaatgtgatttatgtgttaatgaattttagtccgctaagaggtaatagtattaacaataataagttagttaaaatctcttaattggttagaacaattagtacagttaggcgattaggcagttagacttattttattcttttataatatcatcctatatataggtcttactttctctaaattgcaatatgctatagatgcaaactattgaagatcgaagcttttcaagaactcgatcatggtgagagtaagagtaaaaacttcagctaccaccactgatcaagaaaatccattaatcaatgcccctgatccgattgctcctccaccatctcaaacttatgttaaaactcaccatcaagttacctttacagctttgaaccatcgcccaacccagattgatcgaccagcttatgacgacattcgcccaacccagattgatcaactattttatgaagacattccaagtccctacttcctaagtaaagcaaatcatccaggattagcactcacaaccactgttcttacaaatcacaattttaagccatgaaagtgtgatttcaaactctccattagcacacgaaacaaaactccatttcttgaaggtacatcacctcaacctcctctaaatgatcccttacttagttcttggattagatataactagatggtcatgttttggatactccatttggtctcacttgagatcaaaagcaacatcatgtacctggacactgctatcgagatgtggtatgagttgaacaatcgctttaatcaatacaatgggccacggatctttaagctcgatgaaaccttgacttatcttcattaaggtgacaattttgttagtgtttacttcaccaaactcattgcaacgtgggatgagatcaatcaattgcgtcctctcatcctttgcacttgtgttgctgtcgcatagggccaagatcatcttaagtattatcaggttcttcaatttctcaaagggctcaatgaatgttatcatggtttctgcagtcagatccttctcattaatccctatccacctctcaacaaagtcttctccatgatcatccatcaagaacgtcaaaaagcacttaaaaattgcactattcccccaattattgctgcaacaccaaccttgttactttacctaattctacaccaacaacaaatcatacctcaagaaataaacgatcgcattccatgtgttctcattgccaaaaaccaagacactacagagaaaagtgctactttctccatgagtttcccctggttatggccaaagacgaccaactacactcttgccaacaacaactccaaacaagaaaacgacaataactctaaagttaatcctcaaatgttacaagtcttaggaaaaattattgatccctatacatctcaactcactctcgatcagtgtcaaaagatcatatccatgttgagccaacaattgcagcctgctgctttaacctcaacagacactccaacaattaccaacttttttggtaactattggaaattatttaactaggatcttaatttattaatcatgtatgttggattataagttataatctaacaacctaaatataaaatctctaaaatcgataaataaatcacataaaggttgtagaaaatcttacattgagtgtagtagaacgttacgactatttccgttcagttctctaactcttaatcatttttgttgcaaagtatgatcaataactgaatttgaattcaattctccttcgattgtgttcatcacaatcttcttctctatattgggtattgctttgacatgtgtggacaatcactcaatactaaggagcacaaaattttgaggagaaaactaagagaattttaaaaattatatatataattataatagttttttgattcagttttttctaacaaaaggtaagtcgctatcatattacatgttgactcagaaatttggactagacttttaagccacacctactcgctagattgtcgagaatgaaaaagtagttaagtaattataagagtgacacgacaaatttatagtagttcactatctgtatcatgtatcacgacagtaatggagctatatctactttgagtttttatttctcatgagatggtattatagaaaaatgctaagtgttagaagctccaatttatggagagagaaactatagagagtagctctcaccttgtgtgtagttttctaaaagtcaaaaaaatgagctaagggaacttttcttttataggtgaaggaagcccacaaaaaatgagaaaatacattttagatgtttttgactagagatgatgatctaacggtaaaaattagcttatggtggtgatggtcattttatggagcccggtgagacctgctgcgggtaacccggagcttattttcgtaacttccttggagtgaattttggtgccaatagctttagaattacaatcaaagtgtgagatatgacttcatagagcattgaatcaactttgaaacataaattgaatcgcgtcaatcgaattaatattgagtgagttctggctgttttgctgaaggcaataaatgatccagcgcccaggttgacatccaacgctaggttgacatctcagcgcccaggttgacatatgatgtcaacttggacattgggtaagtgtaaaaacgtccaagggatgtactttaagatggctaagtgataatactgttttgcagaaatgagagattcaaaacttttcatttccgagtgagttttccatgttggaaatgagaaatgtaaagttgtgattttgaattctctgacttcgtggatcttagttattgttaaaaactagatgaacagtcaaaacagaatcagaattggataagcataacccagtgtcccaggtcatttgtcaacttgggcgctgggtactcattctcgagcttccaagatctcgttttgatacttctaaggttcatgaacttgaggatgatgtctcttaccctatttttgaccattttagattcattggtcgaattaaatttgacatttaagtaattgaaggcagcatcccaggttgattatcaacctgggcgttaggctcgggtttgtgattttctccccgagtttgcttttatttttgataatagaaaaaatgatcggaacattttttggtgaacttgattagaaactgcctaagttgacgatatgtcaacttgggcattgggtcacagttatggcccttcgaaagttccgtttggtccccaaaaataattgaatctcaatattttttgaaaacagagaaaattctcagaagagttctcagaaaacatcattgaaatcggcttttgtcaacctgggcactaggccagtcccatgtgtcaacctgggtgctaggccttgtttctagcacccaggaagtgatatttctcccatgaaagaacctatttccctgtttttaatgaagacgaagaatatgaaaaagttagatcgtcgatctgatacttggaaggtgcccagattgacaaattgtcaac

SEQ ID NO: 111775 - DNA, 4400 bp, Cannabis sativa
  modified_base (106)..(110): a, c, t, g, unknown or other
tattatatatttaggtgtttataaaagttaatactacatatagttttacataaaaatattgcataaaatacaattcaatataatgcaatacaatacgacctaatannnnnttccaaacgagccctataagtatttatgaccatacttgtaaatttttaaaattttttgaataatttataatgtcgaatataaggtttaaacagttgcttaccacgcatgtgtatagaaaaaacagttgtgagtgcaacaaaatatataaatattattttttggcattgtaaaatactcatattttctttaaaaaattacatataatcctatataactataacatatacgaatttaaaaaaacaaatattttttttagaatgttaaaatagataaaagggtaacactcttttaagagaagtgtattgtagacttactattcattatttgataaaataaaattttgtgtgataacgttacttaagaatatatatttttttcaagaagaaaatatgttatattgaataatagtgaatagagacaacctaattcttaacctaacccattattaatttggaaaaaaaaagagaatagactatattgatattaatttgccaacaatttgtgccttttcatatatctatttgtttcacctaactattcatttgaacatttgttgtggttattagagtggtaactattcagtttagttattatattgtattttaaaatacaaaataataaaaaataattatgtataattcttatgttcatatttgacaaattagaattacctagaaaaatgatattgaatatctaaattagtaatattttgtaattacatagtttcttttttttaaaaaaaaaaaaagaaaaaaacttaattaattccatcctagagtgggagagtgtaattacttcttaattacctctaattatatagttattatgtaattatctagttgaattcatggacagacccatatagaaatgaaagagggcaatcgctttctaaaaaaattgaaatatatatatatatattggctatttataatatatatttataattaatggtgataaatataaacataataataactttggcatgttggttaaattatctcacacatgttatagaggtcaaagattcaaatcctagtaaaaacatctttatttttaatgtatactttacttttgccccccaccacaaaaaaaaaggtgcccctcaattttagttctaggtccatcactggttgaactaacacgccaaatattataattactccaaataacacttaatttcaattacacgaggtgttataaattttcgttaatcaataaatgaacctcaatataataaataaattataggatgataatgaataataataatgaatataaacaacaataatatttttaacatagttttgaagttaattcttcatactctacaagagtccatcttatttttaagatttcacagtatctatagaatacgagatataatatttgtataagttaattcttcatactccatgagagtccatcttatttataagatttcacagtgtttacataatacaagatataatatttgtatggttctctctatttttgaaattggttgtctatttttctttaggttctgtccctatttataggagttttaaggtgacacttattctcttgagatcttatcataatagtcgttcatgaaacgtgtgtaatctccacatttcatattcataacacatgggataaaaatagaatcactataattgctcttgtctttatctataagcggttatgctgactatacttcttctcctcgcaacataaatgattatcttaggatactttactttgaagataattgtttgggcctaagtataatttgggaagtacttcttgcgtccttctgtaatattgagagagacaaacgcgaggcactgtcatgtgataattccaagatgaattatattgagtgtatttctcatagtctttcaaaacactcacgatacgtgggtcaataagctgcaagtttttaaagaacttgttatctaccctttgcaacttattgtcgttcgctgtatactccatgttatcaactttttgtgttgactgttcatttcgctagtcttacaaagcggtagttgttattcacggctcgcccttatctttgaaagaatgagttcaattgtactttccgaggagagttatttgaatgtagttatttcttcataatctgagctggtttatttttcaacttctttatacgtgtcataaccatattgttggctcaaaatatgggtataccaatttccccttaaaaaaataattttttaagattaaaaaggattttttaatcaacaaagggtacgatcatatttttccctttaatagaaaatgcatgcttcattttggtggttcagtatttcaagaaaaaaaatatcatttatgaatttattaatctaacccttcttttcctaagagttcccatctgttcgatcagtcatcatcacgattgaacgattaccattgtaggaataagatcaacaacctccttgtattttgctatttcccgttttactgagcttcaaagaatttcaaattttagtccccattttctctgaaagtgcatgccctctttgtctcttacattatccctacaagtctctaccactttttcctcaaccccgatattgttacaaatcaaacccctggaataataagttcttagtaacaaattctccaaggcttcctttcaaccaacaacccagtaagtacacttctattctaattatttatttttctcttattgttttctatatattttttgtatcgtcattttcttgtatgagattatctttatatgggtttttaacaacttaaggttagagattaaggataaccgatttataggccctgagtttttactgtatttcaagaattttgaggtattttttcttttaatcaaggcaatgcctcattctgatcaagattacaaacacccagaccttgtagaactcgataatcctcaattccaagcaattgtttttaaaccctacattcataaacctcaatccatacctgagatactttacgaaaaaatagaaagcattcccttagggctagtcaagaagaaacattagcttgctatagaaaatatatagatgagattattaaaggtagacgtcattatctgcgagaagtagtctggcctgaattgcccaatttagtaaacatccccttagcgagaccattatttttaccccgagtcactattgcttttttaccaagtgatcttaattttgaaattatggctcctaaagctcaaaagtccaagatacctcaaaaccccgatgttacctttgaggcaaaattaattgaatctaaagttaggtcaattgcccctacgtgggtcctttctaagatcttgcgacattaaaaatgaaaaggaatgttgtatacattcagtcatgcttggaaaatttagttgctttcccccatctcgtctattgattaatgaaggctgcagtaccagcgactcttcaagaattggagcttagagcgtcgagcatgttaaggcaggggttgtccttccccttaggcaatatttcaaggacttttgcaattacattggggtcacaccttttcagcttgtcctgaattcttataggatcttcacgtgcttaaagtcgctttatcatatcctagggtgggaatgttcaatcccctttgagattatatgcttttatgcgattaaggcatgccttgcgagaaagagttgcttaggtggcttatattaagtttgtcatgttgaaagaacaatgtccgaccagtgctgaagagttggaagaaaggaaggatgtaccatgtgcaatggttttatggtgcataatctatgtaatggtgagcactagactggacacagctcattctctaagcatcctaagctggttcatgtcaaattcaggcattgaacattggaaggctctcaaatggatattaagatgcttaaagggcacatgtaattatgttttaacctacgagaaagctaaaggagtgttggaactgaaaggatttatggatgcgaattatacctcgaacagagatactagaagatcaagcacaacctatatgttcatgataaaccagaactatatatgcaggaaggcctaattataattagtggttgctctttccaccacggaatcagagtttatggctaccacgaaagcgttaaaggaagctttatggcttcagggggttttgtacgaattaaaacaactaaaaggaagagtgggtgtgtactcagatagccagtcatccatctatctttgtaagaattcagtttatcatgaaaagagcaaacatatagatataagactttacttgtaacaccctaacta

SEQ ID NO: 111776 - DNA, 10462 bp, Cannabis sativa
  modified_base (67)..(75): a, c, t, g, unknown or other
accatgcaacataaaatgttaattttgatctttattaataaataaatctgattatatgaaatgagtnnnnnnnnnggcataaaacccaacaaatttatcccccctaaattttccacactagtaggctgatctttgtctttcaatttcttctcatgttactggtttttcttggcccaaaccttcggaccagtattcctacatttcgccatgttatggccatatcctttacagttattacactcaatagagagccattcgtactcaacaaattgctcttgaatttgacctttttcattttcaaaatgtagaataaatggggggtcatcagttatatccatttcaaccagcaccccaacaaatttaatcatagatttcttccttattactttatcaaccataatcgatttccaaatcgtgtaaactagagcactcaaacagtttatgtcccaatattgcaatcctaagttaggtaatctaatccagaggggaacagatcaaactaaccttagagtatcgagatcctgtgtccaaggtttgactatcatcgacttcttgtcaaattgcacaacccctaattcgagcaccacgtttctagtggcctcatctttgaatttaacaattataagtccctggttcattctgaccattcgttcaatgcccaggtatccccaaatctgcttcacaaatccttcaaacacaacaaatggaggattggcccccattaccatacccacaaccgcgcgctgagttccactctaaagcctgtttagcaacctttgttagatctagttttgcaactttgaacccagcttgaacaactggttcatcataatgaagttttgttgcaacattcaattctgcccttccctaagcttggcccagtgttgctgagcagaaaattggaaatcgacttcctctgcaccgttcgccaattcatccctgcctgaatcttcaccttccgcagttgttgaagactcattcaactccagattcttctcgacgatgagtgagttcaaatcgcccagatccttgaataactcctctccacccatctttggtacctgctcatcttcctaacgttcctgaatcgttggaatttcctcaatccgagcccttgtaactttcgagtgaccttcttcttcatggagagagaacggttcctatttttaactaaatttttttaaatattaaattatacttacattttcatacaaataaaatttcctttttcttgaagatatttccttttttaaacataaaaactcaaagataattttgtccaaaaagaaaataatcacagaatctacccttcccaataggaaatagagaaattagaaaagaaaggataagaattattacatcaaatcaaatattgtttattttgggtcctgaggaacatttacaaacaaacaaacaatgtcaatggccagttcctccacctccagttcagtcaccctcacctaccttccgaattgccatttacgccgctctttccttcccaattccaattccaaatccaaacccactcgcattagatgcgaatccaccatttctcccgccaggctctctacgcaatccaacctagacggtgccctcgccgacgccgtagtcgtcgggggtggcatcagcggcctctgtatcgcccaggctctcgccaccaagcaccccaacgctgctcctaacctcatcctcactgaggccaccgatcgtgttggaggtaacatcaccaccatcgaaagggacgggtatctctgggaggagggccccaacagtttccagccctcggatcctatgctcactatggctgtaatttaatcatttcttcttctatcactactcattgttatattgcttctttcatggattggattgaattcatttgtttctttcgcaggtagatagtgggttgaaggaggagctggttctgggggatcctaccgcacctcgatttgtattgtggaatgggaagctgaggccggtgccctcgagcccaaaggatcttcctttctttgacttgatgagcattccgggaaagctcagggctgggtttggagcccttggcattcgtcctcctcctccagtgtgttctctttgtctttgtcttttttttttttaaactagttcttatgctatttcttgaattgaattggggtgaatttctcatttctgaaatcttgacaaaggtgacagggacatgaggaatctgttgaagagtttgtacgccgtaatctgggcgatgaagtttttgaacgcttgatagagcccttttgttcaggtaatattacctttacttgtaccccttatcacactgtaatctgtatttagtttactacttgttacgttctatttcaaagtaatttaacattaacaattcctttaacaacactagtatggactatgaactatgaagtatcagtctgatgattttctgaaactagtgccactttgtttaacttcaaagttcaaaccatgagttgtcaaattcactgtgagatttcgtaatcaatcatttctgtcacgtttaggtgtttatgctggtgatccttccaaattaagcatgaaggcagcatttggcaaagtttggaagctcgagcaaattggaggtagtatcataggtggaacttttaaagcaatccaagaaagaaatcaagctcctaagacaccccgagacccgtaaatgtttagtttgcatttacattgaagcaaaatcttctttcttatttagattacagatatttattgccagtgatctaattttacttgttttgtaggcgtctacctaaacccaagggccaaacagttggatctttcaggaagggacttgcaatgttgccaaatgcaatttcttcaaggtctgctctttttttttgtccttagcaagtattaatattgatttagactatcaactttgtcatttgctgtttcactgctgtttagttattctttattttattcctgttgagcttctattcttttgtggccccataactttcaacaatgtgtgatttatttggcaggttgggtagcaaagtgaaattatcttggaagctttctagtatcagtaagttggataatggaggctactctttgacatatgaaacaccagaaggattggttactttgcagaccaaaagtgttatctttactgttccttcccatgtcgcaagcagtttgttgcgccctctatctgtaatgtttagtcctggatttctttatcattatggttttcatttgtcttttgctattcttttttatttttccactttgctcttttgccttcaattgtctattgtcctcaattcgagtagttcctgctctagaattcagaagaaagagagtggctgtagtttcaatgttattgtcatggtactcactgctcagtcgtttttccctagcctcttattatttttattattttcaggatgttgctgcagattcactggcaaagttttattatcctccagttgcagctgtatcgatttcatatccaaaggatgctattcgacctgaatgcttaatagatggtgaactcaagggattcggtcaattgattccccgcagccaaggggttgaaactttaggtagatgtcccattgctttagaaaatgtagttgtggactggtgggaacttatagctaacacatgaacttttggtttttgcaggaactatttacagctcatctctctttcctaatagggcaccaagtggaaggatactgcttctaaactacattggaggtgccactaatactggaattttatccaaggtgaggacagtttgagtaagctcttagactatttcgcaagatgcaggggaaggagggtaggccgagtgagatatattttataaaagaagaaaaaggaaggaaaaagaaagaaaggaacttagtgacagtttttttttttaatatatatttatacataatgtcaacgaatacagccaaaaataacaaaataaaataaaaaggttgcagcaattttttctctgggtaaggttacagcaattaacctgacaatttgatttagctttgaagattactgtgattagttgatatacagctgtaattattccatcgcggagggtgcagaggtatttttttaaagacagtttcagttagttgccttgtacatatttttataatgtgcttctatgctttgacagacggagggtgaactcgtggaagcagttgatagggatttgaggaagatcctaatcagaccgaatgccccgaatccacttactcttggagtgagagtgtggccacaagccattccacaattcttagttggtcatttggatattcttgactctgccaaaggtgctctaaggaatgatgggttgcaggggctgtttcttgcaggcaactacgtatctggggtagccttgggtcggtgcgttgagggtgcatatgatgttgctgctgaggtcgcaagtttcctctcacagtactcgtacaagtagttttagttcccatatgtgtccattgtcagtcatttttttttaaagatcattcttatttgtgattagtggggttgtgatgttaatgtgaattatggccgtaatcccaattttgagaatactaattaatacgaggatttagcatgacaagaaagatacgagacagtagactagattcagtggctgtcttttgtacgataatgaaaggaataaagaatgtgaatgtagactggccagttatggttatgagcttatgatgataaagtagtttgttttactcagccttgttgtggttgtgagttgtcagtatggggtgagtgagagacagtgagtaggggggcgccgaaagaggattcaactttgtttccagtttttgtaagctttaattgaattgaacacaataacagcaaagcaaatcaaaacaaagagagagttgtaaagaggcggctgaagttgagagtgatgtatttgtaaagactcaagagttgtgcgggagttatgaagatgtccagttcagttgtcgagagtggagacagaaggagtaagaggcatcgatggaagtgcccactgctaggaaggctctttgtttgggtttttcgatacaatatatttattgaatagggtgaatatataggatgattggaaaagaaacttccaatccaacagccgtatctaatttcgtcacaaagctatggagacatgctttttcatttatgctaacaattgcttcggggtttgctctcctaaaagcattctctctcggttgttgaccaacccaaacccaattcctcgctttctattaccaattactactacaattttcctagttgaaaacaaagttgaaggaataacaagtattcaaagaaaaagcagggagaaaattgaaatgaaatgggtaggaagggaaagaaggaaacaataaatttggaaggttttggaggaatagagatagggatgggtaagggaattgaatggaaaacaacatgtgatgatggtagggatggtagggaacatcatctactttttctttttttccaccttttgtaaattctgctctcttgctctatactcgccgtttctttaggtctaagcgaacaagatcttgaagatgttcccttctttttttctttcaaacaaaataaaatgatgataacaacaacatgatgatggccatcaaaataatatcgtatacacgtgtgggggagcaagtcgtccaatagattggcaattaagatattctgaatacactttttgtttttggtgtctcttttttctttttcttgtgtttcattccaattccaatattattaattgcattgcatttgcatgtcttcttattttacatcatctcttattcttccttttactaataaattttgctttgtttctaatctctcttctctttttagtcattcattcattgtaggccacaacaaaatccgacacctatataaaagttagagaccaacaattctatacttattgaaaacaacaaaatatatgatacggaaactatgttttaattaattactatttcaaatcactcataaaatgtgttgtatgtgtcaaattcaaagtttctttcacttcttcttcacaaatgtatattataattcacaagaatttggtgttggatttattattataattattataataggatgatgcatgcgtaacacgagataattattaatatgcattgaacattgatttgaccttaaaataaaaattttgatgttgggtatttccactacttcctatgtaaagaaataaaattaaaaattaaaaaccacattaatgttgagtattccaagcaccaatgcttttgttttggtaatttgtacctaaaacaaaacaagcagtggtgtgtgtggcgttcgtccacattcatttcctcgaccaccactcactcactcatcacatcacaatctcttacgaccctttttaaccaattttaccacatacactaataaataccattctaattaattatgtcttttttttttttgtatggttctaattatagtcttaacacacaatacatatatgaaatgtagctgtactaaatagtgtaagtacaattcaaacaaagttacttcttttctgcttttctggctggcggttgcaaaacacaatctctaagacgaagagaaaaatcattaccactatagcctctactagggtagctaggctagggtaccatcgttggagaggaactaaatagcttattaggtggtatagtatatagcttagactttagaatgaaaacaacgactaaagtaaatgaaaaagagaaataaattgtatttttattttttttttctttaatcaacaacatagaatagacaaattaaaaggacttcgtcgtctaaacacgtgtctttgtcggctacttcaatcgacagcatttcaaaaggaccagttatgtgaacaaacctgcctcctcaaccccaaacactctcacctttttttttgtcttttttgtctcattccatcttcatctctacccatcccctcccttaattcccttatgtcattcctttgtatttatatatagatttcacttcaaactccatatcccattcatctcgacttaattggcggctttcttcttcttattttatttgtttatttatttattttttttttttaagaaaaaccaaatggggagatcttcagctacttcctcttcctcttcatcttccaacattgctgaaaccaccaactatcaacctccttttttcccttatgactatcaatatcagtatcagtatcaccaacctcagtttactcacacaagagatctcagcacggaccttaagcttggtcttagtctttctccatctcaaactactccaaggttgttctttctttatgtatatattatatatgtgtgtatatattcttgtatatatacatatatctaatacacatatatgtgtgtgtgtgtgtgtgtgcattttatagggatgatcaatcatcagaatggccttccaccagcgtaaatggtcatcaacaaccagaactagaagctcatccggtaatggaagaagaagaagaagatgaagaaggaagcgatgagtactgcgttaatggaaataataatgggaatggaagcttgtatgttaaggtttacatggaaggacaccccattggccgaaagctcaatgtgctggctcaccatgattaccatgacttgatttccactcttgatcatatgttcaacaccaacattctctgtaagactttaatttttgttttgtcatatatattcagatcatgtataattaatgtgattactaacaatgctataaatatacatatgatcatgacgatgatcagggggtgccgaggtggatcatgaagagaataattacgaggattttcatgtgctgacttatgaagatgaggaaggagattggctcatggttggtgatgttccttgggagtaagtaaatacatgttatacatcaattgcattgtttccatataaatatattatatattagttgaacaatttgctaagcttggaaagggattgggtgcaggatgttcttgactgcagttaaaagattgaagatcacaagggcatgcccctgctgacactgacaactacgatatatatatgtcataacactaagatgatgatctcaattttaaatgttttttgtgctgtagtagtactggtggacttctcaactgcttatcataaattgagactacaagacaaatttaatcatcatgtgatgtgtaattaaatccatatgcagagtaaacaaccgcagttataggccgacatagctagctagctagagcttaatttctctactgtaattaaagaccaactttttccaatcatcattttttgttttgttttgtttttgtttctaattttttttgttttagttcccttttaatattggtgccatgttgttaatgaattgggttgataatctagtaaagtccacatacattagcaaacacaatggaaaccatgtcgaccccttttcatttcaacttgataaaacaaaaaggaacaaaacttatttgttgttaacatactaagtaattaagcaaaaggcttttgatgttcacaatctagattaggcccggtatcaactttcaaaatctcagcatatcttttaaaataaccaatcctatcattaacccgcccatcgttcacaatcccacactccagtcctccattaataatattagtcaccagcccaaacccagccgtacgattagccgctacgtcatcatgtgatgccacgtatttcccgaccataacatcgtgacaagagggcttggggctctgtggggtagtccagaaccaaagggcagtcttaaaagcaatgagggagttattagcaacaacttccgggttcttcaaaccatcgaagcccaaggccttaccagccgggccatagttgtagttccaagagagttgaatgggcccacgacccttgtaactcttgccaggggagcagggccattgggtgttgtctgggtcacagtagtcgctgcctgggctgacctcttccttgaaacacaaaccccacgagtatgggccgtcaggggctgttgcccacccaccggttgtctcgtgcgagatttgggcaagaaaggctgcgatttcgcgcttgcgggtgggtaatggtccggttgagccgaaagaagggaaagtcttggcggctttaaggaaagtgtcgtaggtgtagaagtttttagctggacatgcagtgtcgtccttgtgaaggaatatgctgtcgaagacttggtttgagatcaaagaggatatgcagttagaacgtggcgcaactcttcttggtgttgatggtcgagttgcgtcgacaccaacaccattggctgttgctgctattactataacaaggagaagagaattaaggaaggaattgttgaaggccattgttgtcgagtttgtgaataatagtgggtggtttatgttactatatatataaataaataaatatataatatacccgtggaccgtggtggtgttgaccactaaacttagaaaagtttagtaatgttataattaaaaaaaaaaagtcagaggttttcgaaaaaaaaaaagtcagaggtcaaaattgctgacttggcttggtcttaagcacaaagagggaagcacaccacctatgaactagctttttctcatggttatggattatgtatctccttctactccgcgatttgtttgtcttctctttgatttgtcttattatttatattagatatgtgtatatatcaaccaaagaaaagaattgcatatatatcatgcccaagcagaaaaaatgaaacgtgttacatgcgtgttttcttttccaattatttcaacttcaggtatatgtataccatcgaaaataattgaggtctcgttggacctttttgtaccatatatttgttcagaaaaaaaatacattcgaacgaaataacaattacaaattattcatgcatacatatattctttagcatttgctccgttaagattcaaattattgtatgaaattaaacatgtgtagtggtgatatataatagtacaatagattttgatgaggcgtgttgtttagtaataactaatggattatgaagtggagcagcattgcatttgcatatttaacaaatagaccattcaaggaatatgtaatgaccactcattctcaccctaagtgcatccttactataaaaaccactgcctgcctcattatcaaacacattgtccattactttgaattgactttgtttttcttccattaacaactagaggtgtgaaaaaaacaaaacgaaaaatacctaggtgtggaatcattaatttagcgatacaggcaccgagatttggacccatcaaaactgaggtgtaagtgtagcccatataaataagggatttttttaagaatatactaaattaagtaactttttacaaaaatgacgttttttttaaaatgaaaacaaaatgacgtgtgtgttttaaaaaattgggcc

SEQ ID NO: 111777 - DNA, 9303 bp, Cannabis sativa
  modified_base (9252)..(9265): a, c, t, g, unknown or other
taaataataagagtttaaggagaataaaagaactatgatgaagaacacttcaaagttgcgatctccgtctcttccttgctctctctctaagtttctatctcaatttggtagcttttgggttctggcctaaaagtattatttataatgcttgaaaatatcttacttaataaaagatatgatatctccctttaaaaaaaaaaaagataaaaattttgaaatttcccagaaatcacctcctcaccggggccatgacttcttgccgaaaaatttatgtcacatgatttgtattttggctataacttcttcaatacaactcagaattcgatgattcaagatgttgtgaaattttaagaacgagatctacaaattttatatggagctccaagtccagttctgcttctaatgtcatcaaaatttgtaattaagttccctcttataaaaccgagctcgcggacttctacaatttttaaccaaaatatgctaaaatcgctccaaagactccaatgcatgattagtctttaaaatatcaaaaatacattaaactcacactaatcaataatttaataaataaatttaagaatattaacacataaattgattatatttataaacaaatatgtattcatcaatcattgtgggttgattcactaatagcttgagaataaaaatatgatgagatcaagacgatattttaggctctcaatgtaagcatcaaaatgtaacttttagccaatgacaatgagtcaattaaagtaattagaaataattaataatgataataataaagataaagcaaagagaacaccgagtttgttatagaggttgccatatggtaatagcctacttcccttttacttgtattaacttataagaagagaaacaagaagttcttgatctctctcgaaagctcttacaatgatttttgagtatttctctcttcaatccatgattgttttctctagctttttatccctctaaatagtgaaatgacttcactttaatttatagggaagaattacatcgaattagtttctcaaaacaaataataattaaaataggaatgttgtttactttccttaaacaaataaagtaaaatggaaaactaggtaagtttcctcttatttcttgtcaaatgcgaatatatccctcaaataaggatacaattgtggcttgaatctttgaaaatttataagatgtatattctaaagatattttcttttcatttactctactcggtgcatgcgagctgactgttggtcattcccggtttcttcttcaaatcaattgtatataagcaataaatcaatctcgacggtcagacatggagcgtgatgtccgcccaagttatggaatcttttccatgtgtcaaccagatggatgccatgtcaccccgtacgaaaattaagataacaatttttaaaccactaaaagacaaggaatcaattaaacctaaggggaaagataatacccttaacttgctttctaaataaatccctaacctaggggtaattcggtcataactaattacccagaaatatcccaaaaaacttgaaacttattatcaactcaacttagaaattccaccaaaaccataaactaatattgttgtgatatttctggccatcgatcgagtctccatgggtgtcagacctgaaaatatttttatttcacaaatagcatgtatgttacccacatattcgaataaaatctctgtaatttataaattacgcttatttattcatttcaacaaaaatcccttattatggcataattagattagaaagatcataatcctactcataatacccttaacacacttattactccatattttataaaatatgctttaattattcataataagattttcagaatattacacagagagttaggtgataggcactcagtgctcaagttgatgtttagcatggtgtggtgggttctgcttatcttttttttttttttttaattctgtcgtgagcatctgcctatttttccattataaatgatatctacaacttgtggcaattcaaatttatactttgatattttacgttttcgaaaaggtagactatcggcaaattagtcacaaatcgggtaatcttgaatctcccgattttgcgaaagagctaaacctccgagaattggtgaacgactgcaacaaaacaaattaattagctaagtgatgcaaacatatattactaagtattcataaaataacaacacaattttccaagttcccggcgctaaggttgacatttgataacttttcaattgcaggattgtcaacatggtcacagggtactgaacatcgatcctgcaaaaaaatggtcatacctcactgaatattattctgattgacacgattctaagtgcgttgaaaataaattttcaaggtctttctacccatgtctcacactcatatcttaattctgaatctttttagtctaaaaatggctcccaagtcaaagtgccatttttgccgtagataacaggaaagcaatccaacgggcacgattaaatctctaaaaattagtgatcatcatctgaagtcaaatttgagcatctcaaccattgaatctcaatccatggtcaaaatcactctagattgaatattcccaaaatataccatatttttgtaatattttattattattttaatggacctccattcctataaataggaggctcttctaagctcattttttacattctgaaaaatctatataatgttagagaactctctctaatttctctctctaaaatatgggatctcttccttagttaattgccttgtgtaattctcgtgagaaataaaataaaaaaaatctctaagtagacgtagctccattaccgtcgtaacacgaagagtaaactactataaagttatggtgtccctttcttttatttgctttcatttattacttatatcacgaatcatagatacggtgttggccaattctgagtgtcaatagttagaaaaaaaaacttgttgctgccaaggaatggaatttttggtttaatcctctcattctctatgggattttataaagtgtttgaaatttcatcttgagattcatatcaggtttgtcgagaaatgggctcttcatcactagattagcatttggagttacccagatgggaatttagaattttatttttgtatcagtatttcatattaattagtatttaaaatgtatcaattatttttagttaatcttttttttttaatgtgtattaattggctataattttgaaaaatttttgagttttcagttaatatgagatatcttacacttttttgtgttaatggatttttttttcttgaaatttgcgactacaatattatttttattaacttttaattttgaatttcaaattattatttatatatatttatcatgattaatattattaaattatttattatatttttcaaaataaaagagatttatgtttaacaaagctcgacatgaaataaaataatataaaaaaaattatattttgttggacatgaaaacagcatccctaaggttctcatgatcatgtccagcaatactagatataaatttttttcatgtccaccattgttagacatgaaaaatactcatttcagtgcgttggatatcaagtccagcagaaaaagggacaagaaagagttttcgtgtccaactttaatggccatagaaagaaatttttgtagtagtgtacttgttgtaatgtatttcgaacagtcataatagcacactagttcgagttgttggatgttagcctaaaggttatctcaacaatgttgaagttgcctaaatggtatcccaacaatgttaaagtatctcagttcataaacattacaattattttcggatgagattacaccactagtcatgtcatgacttattgacgccttcttatttgcatttactaaaataacatttatgccatgtgccacacaattcgatctacttatcaattgcttaaaaatggttataacacatacatattataagtataacaacatataaaatataattacttgtccaaactcaattaaactactaatcagtttaattggatacaagatatatattagatttcaagacactccatccaactgctgatccgacctaattggatattaaaaagtagcacccgatcagatctgatccaatcataattaaatatcaaatatttgatagtctatattcattagattggttaattatgattggattgaatcaaatttatgcacacctctactgccagccatatgagtggattaatgagtcagaaattgcaccattaataattaattaataagaaaattggttaaacctattttttaattactcttacctttccaataaattgaaggtattacttgagagaggagagaaaagagagtttatgaagttattaaaaaaattggtcattttttaaggaaataattacactttgtaagtaaataatggtaaaatgttaaaatatggtataaaattaaaaaaataataattaagttttttctctaacaaaaagttttggactagtgtaggaggcctgaggcaacgaccccaactcgccctactcttgagtcggcttgattttgaatctgatggatgaagaatcatttctgagtcatggtgttggttgatgtggcatgtggctttgttgatggataaaagtgtaatatgtggaggtgttgatggagtgttgtttttttagagagatgtcacatgtaattgttttgcgttttgtatgaatttgtagggtaggcaaaactgatttcaataagacaatctaatctaaaaataaaataattttctcgagttagagttgagaaaattacatatgtagattgaatacaaatattctttgctagtatttgtaagaacacaaaccagaaaagaaagaaacagagcaagaaagcagagtaagagaaaattggtataaatcaagattagcacagcaaaagctaatcaaggattaggccttgcctttatttatattgagagtttgttacaataaaatagctaacagaaagtaactactaactacgtttaactaacaactaacaaacagtaaaaaaaacagaacaaacattagttgttaacaccccccctcaaactaaacttggaaacaaccatgtttagtttggatttaaggtagtgattagatttggtgagaaggtcagttacttgattggctcaaggtacaaatctgatagcaagtttttgagcaacaatttgatcccgaacaaagtgtaagtcaatttcaatatgcttcgatcttgcatgaaaacaggattggcagctagtgtagtagcacttcgattgccatcccagataacaggacaatggttaagagggaatcaaagtttagacagtacagattgtatccatttgagttcagtagttgtgttggcaagagctctaaattcgctttcagtgctagaccgagcaacaatttgttgcttctttgctgaccatgagattagattcccacctaagaaaataacatagccccatgttgatctacgatcattgacacaactggcccaatccgcatcagaatagctttgaagtgtcatttttgttgttggtcgaagcactaatccctctgagattgtacctttgaggtacttgagcaatttcttacaagcctcccaatgataggaagtaggagccttgatgaattaacttagtttatttatgataaatgccacatctggtctagttaaggaaagataatgcagagctccaatggtgcttctgtacaaagtgacatctgaaaatggcttaccttcagttaaggataatttggtggcaatactggatggattaggggaacatttggcaccttccatattgagtttcttgagaaggtcagtaatatactttgtttgagaaaggtacatgctagaggagtctctatagattttaacacccaggaaataatgaacatcaccgagatccttgagtaagaactgcttgttgaggtcatttgtaagcttgttgatgagtgacaaactaggtctagtaactactatgttgtcaacgtatacaagtagaatgataagagatgtgcctgaactgtagacaaatagtgagttatcagctttggatggtgtgaatccccactgaataagacaatctttgagcttagtgtttcatgctttcagggcctgcttaaggccgtaaatagctttatgtaataggcatacatgatttggtttctgagagtctataaatcctagtggttgtcacatgtagactgtttcattcagagttccatttaggaacgcatttctgacatcgagttgcttgacaggccatttgtgagaaacagcaagagacaaaatagttctcacagtgacaggtttgacaacaggagaaaatgtatcagcatagtttattcttggtgtttgaagaaagcccttggctacaagtttggacttatatcgatctagtgagccataagcatttagcttaatgctatgaacccatttgttgtcaataacatgcatacccggttcacaggggacaaatgtccaagtaccagcagatttaagagccccaatttcaaagttcatagaagcaagccacttaggattttggagggcttcttttaaatttcttggttcagatggtagcaaagactgtggaagtggatgtttagtagccagataagattttggtttaaaaattatattttgtgatctggtttgcatcttgtgtgttcgactggaaggagcttcactagaaccacctataaaatgttgtgtatcgatttgttgaatggtacctgagacaagggagttgataggtatagatgtggtattgggatctatgtttggaattggtaagcgggtgggaggtatggttgatggagcttcaatgtttgggtcatctagtgtgggtgcagcagtagtagttgctggtggggtgatggtagaagattgattaaggacaggctcatgattaggagctaaaatatgtggtgtaggtaataattgttgtggcatgggaatggggtcaggttgagtgataggaggtaaatgtgttgtctcagtaccatgagtggacacactagtaggataagtagtattagtgtgtgaaaacacagatgaagtattaaaagtagcagtaggaacaataatgggagtagaatgtacctggtgtgaagttgaaggtgataaaacccctggatagtgatcttcattaaagataacattccttgcaatgtatatccttccgtgagcattctcacataggtaacccttatgataggaggaatagccaagaaacaagcaatgctcaggtctgaagtgcattttgtgagaatgataatgtctaagatgtgagaaacaagcaccaccaaaaggtttcatgatggtataatcaggtggagaagcaaacaggcattaaaatggactaatgttgttgagaacagcagtagggagtctgttaatagtgaatatagcatactaaaatgcacgccaccactaagaaaagtcaagattgcttttgccaagaagagtaagcctagtctctacaatatgtctgtgtttcctttcagccttaacattttgctcatgtgtatgtggacaagggtgagagaagaggatgccttgatcacttagaaacctcttaaatggtttgtattcaccatcaccatttgcttgaacagctttaataggtaaaccaaattatttctcagccatactttttaattggagaaacatctcaagagcttgagacttcaatgacagtggataaatccaagtaaacctgttgtaatcatcaataaaatagatgtagtaccttaaatccatctttggaatggatgtgagaaggtccccacaagtcagtatagacaagtttgagtggttggctagcacgacttgatgaaatgggaaaggggagtttgtgagtttcgccttgatgacaggcagtacgaaacttaagtgttttaatcgaaccactatgaggtaactgagaccatagttttgttaatgtggctaatgaatggtgaccaaatttacaatgccatacattgatatcattaaaaggagaagcataaaatgcagctgactttgaaattcgactactgtctttattaattgtgaactgattacatgaaacaaaatcattggtatcagtacaatgaattaattgatcattataatagggatgccaaacaaaattagaagcagtagttaggtgacattgtagtatagaactggaagccacaggttcttcactgagcatatacaagccatctttacgccttcctttgaggagaggtgctgttgtttgcttgtccttaacaaaacaacaatttttgtgtaattcaagaaagatgtaattatcatcaacaagcttagatacactcacagggttcttagttattaaaggcacttgtaacacagactttaattgaagaggacatgagggattgtaagatggaattgtagagtgaccaacatgagaaattaatagcttctaaccatcacccacagctcaggtttcagtgccattgtaggcctgctgattgtcaagatttatggcatcgaaagtgacatgagcagtagccccagtatcagcataccagtagttattatcaccaaagtcttgaaccatggttgttgagtaggcctgtggatcatactcgaaatcaacctttctaagaagtgtcgttactgtatatgggttgtttctagggaccacccaattcttgtcaaagtgataatggcacactggtgcagtatggctagatctgagacatgcttgacagatcactctttgaggaatataacgaggataaaccctaccacgacctatagatgcttgagggacatcaggttcgttattcttggtgttggcatatggtcgaacaccaccagatctgccattgccaagagtgagattggcttgcatctttatagcaagattggtcattaattgatgatgttcaagtctactttcgtgagaaagaagcaaagcttgaacttcctcaatcgtcaaggcatcacttcttgatgtaatcactgagactacagaatcaaaatctggtccaagaccgtttaaaagttgtaaaattaaatcctggttactgacaggagagccagcaacacaaagcacattagaattggattgaatttcatcaacatactcagaaatagagagacttcccttttggatattggagaatcggcctttgagttgaagaagtcgatgttggaatttattttaccannnnnnnnnnnnnnctcacaagtatgttgtttaacactctaaatatgaactt

SEQ ID NO: 111778 - DNA, 3661 bp, Cannabis sativa
aaaataatttccaacatctagatcctggtaaaataattccaacaatttgctccattaaactactatagatcctcacatcatcaatttctctcatcaaacccttctccctcattgacgggagggaaaatggctcctagtcggttctagtctgagtttcaggctgagtatttttactctaagttctttctagggcttgttgcgttttttcattttttcaagtgctattgagaatcagtctcaagaactagtcgacattagagtggaccatattgacactgtcaatagcaaaaccatggaatgagatagtgccatggagatggaaatgctggaactcttcgaaggcattacacttgaggatgtggtggcgaccaaagcttgtgttggaaaggtaatgggttgcaaagaaatgccacaatcggtggtaaaaaaatcctgttgggcatatggaaaaatttgagatactggagaatgaaaaagtgcggagaacgagttatgggatttttcttcgatttagaggaggactgcacctttgtaatggagaagaggccatggttggtgaatggggttctccttaacctcagaccatggccattagaaggagaattaaatgtggctgagttcgaagttgcgagattctgggttcagttccatggcctccctatgagacgcctctccgatgataacactcctattattgctaagaaagtgggagcctttgttaaatctgatgataagcaaaaagtggagatagtcagacggggtttcttgaaagcctgggtggatgtgtggatctcccatcccttcagtgctggtttttccttaaaaatggtaggaaaggaagatttgttgattcagttcaagtatgagaaacttccgtacctctgtttcaattgtgggaagctcgcccaccttgacagaatttgcaactctctaatggcaatggtcattccaaaggtgggtgatgctgcccctatgtatggaccatggataaaaacggagtcagatagaagtaactgtttagttgcagctggtaagggagttactcgtctccagattgaatcaaatgacggattatggcctgaaaaagaaaaaagaaacgaaggggacttggagaagaagaaatcgaggccgcgacaaacctactggaggacacaaagctccgatcaatagtacaaaggacaccaaagatggatgtggaatgctggatgttggtgaaccgtcaggtacgaatgcagtgtgcgctatagaaaatagtacactgagtggcagaggggcaatggaaagagttgcaggaagctatggccccttgaatcccaacgttccaatttcgattgggcaaaactttttgaatttacctagacccgactttgctatggggcaagagaatggtgtcctggatattggcccttcaattgcccagtctttggaaataccacatgcttgggtttgtaaatcccaaaggccccacaacttccctgaagacaccccaattgtctggcccacggacaatccttaacttcaggaaatgttccttaagctctatgggcctgatgctatagacaaattcaaagcccaacagacaattatatccaaccctactaacctttaagagttaatcactcatttacttggtacacaaaaaaggaaggcccacactttgtacaacgccgtgccgtctccctctcagtgcaaaataataaaaattccaacagaacaaatcccaggaatagagcctctactatcgttggactcaaatgcaaaattcactaggggaagtgaaaacgaaggagataattcgaaggctcaaaagaagagtagacaaaggaggagtatcaaagaaaagaaagcattgcaaagtgcaaactcaacggttaaaacaagaagcaagaggaaatcggctcagcaaatttctattggcaacttaaaagatgtgcttgaaaactggatcgaagtccaaatcagttatgttcagaattttggccaaggcgaggaggcggccggaagcatacccccacctccccaatgaggtgcttatcttggaactgctgaggacttcaacgtccctcggcagaaaggtccctctagggactcattcgagagaatgatgcggatctaatttttctctcagagactaaggtgagcacaactttcatggttcaattaatgaataggctgggttttataaacacttgttgtattcctgcggtgggcactgcgggcggtttctgtgtagcttggagagctggggtgcaagtggatatcatggaggtttatgatatgggatttaaggtcaaaataaacgcaattctagattatccacaacgggtcccgttctgcatctatgtacggcccgccctatgcaatcatgaagaaggatttttgggattggcttctccaaaaagtgcaactctgttcagacgcttgggctgtaatgggtgatctgaacgtaattatggatgaaaatgaaaaacttggggggcgaccgtatcaattacgtgaaggtaacattctcaaggagttcattttaaacacgggaggagttgatttggggtttgaaggtgccccttgcccctggcaaaatacaaggtcttattcccaccacatccgcaaacaacttgatagagcaattgcggatgatcaatggtgtgtttcctttcctagggttacggttgtgcatctgccaatatatggatcggatcatgctccaatcttgctaaaagtcgtgggagataatgaaaagctcttgtatccctttcagttcctagaagtttggagtacttccatggagtgtggggacatcatctctcgagcatggaactctgaagcgactgggagtgagggcacaatcctttgcaaaaaattgaaatatacgaagaaataactcaagaaattgaacgcctcgagtttcggctactatgaaaagagactaaaaaaccttaaaactgatcttcgcctgattcaacaagcaattatctcttaggaaaatcttgaaaagcaagccaatatccaattggaaattctagattttggaggagagaatcgaacgaatatggagacaaaaatcgagggagtgttggctgaaatttggagataacaatacaaaaatttttcaagcatcaatagttattcgacaaagatgaaatcgtatcagttgcattgaagcttccacgggtttgtggattaggcagaggaacagatttgggattacttccagagtaattttaaaaagctataccagtccgcagacccaatttttgatggagatttcgagtccctattttcagatcaggttactgtggaggagaatgaagcaatctgcaacattctgagtgaagaagagatcagaagtgtggttttcagaatgcaccctctcaaatcccccagctcgtatatggtttctccagccagagtgttgcacctttagggaaaattcgcctacccctcactgttgcacaagctccgaagagcattagtgtgatggcacaattcctagtacttgatcttccaatatcctttaacgtcatgttaggtcgaccaaccttatatgacttaaaagctgttacataaattttccattcgcgcatcaagttcccaacaaagaatgtggtagggtgcctaaaaggaaatcaacaagttgcacaggaatgttacaaccttgccc

SEQ ID NO: 111779 - DNA, 5478 bp, Cannabis sativa
attcatttatttccttccgaactcataatataatacttaatataaaacatagcatacgtgcatcgcacgtaacaatatactagtatatcaatatatatgaaggattacacaacaagaatttaggtgggaacctattttattttcttcctattttttctattttattatacattttcttattttctttaaaaaaaaaatacactacacatacaaactaaaagtttcacatcatttaaaaatcatttagatgttttatccatatatgttataagtagtagttatattattttactttctttaatttaaaaatattatttttattagtgattgattaatatcttatccaataaattttatatatatatatatatttgtataagtagttatttattttctaacaattaactagcaataatttttaattttatatacatctatgaagtaaattttagtttaagaattttattttactattctagatttttatattgttatgtgttcgaattaaagtaattttttatctctaaaatattttctcttaataaatttttattttatattgttataaaaatattatctcttaaatttttatttttaaattgttatgaaattaatttttttatttttagaattttttattttatattattagtattagttaaatatataatattattatataaaataattaaaatatatataattattcataacaatttattaatataaattattttattatattaaaatataatatacattttattaaaattatttttaacaaaaaaatcttatcgtattctagtaattagattgtattatttttaactcaggtcaactataaaagaaagaaataaaaaatacgaggtgagatcctttgatatttttcatccattttgtctattttattagaattttaataaatttagtttattttatatatttgtagatgttgagaaatatgttgttgttgcccctagatgggtaaagttgttgctaactattttggagcataatttatttttatgtgacctataaggccatccctcaactagacatttcccaaatgtgaaaattttagactaggctttcaacttgtccaaagctcataaggtgtccttgaaactactttaggtggtactttatttagaatgtaaactactatccttaatgcctctcctcatagggactcaagtaaggtagaatgagtcatcatgctccttactatatctttaagagtcctatttcatcttttagcaacaccattcatgctaggtgatcctaacatggtatactatgggacaataccacattcctctagaaatttagcaaatagtcctggacgttcttcacccaagccatcatatctttgggcttagacttggtatatgcatcttaacaggggcatggagaaaacctctacgatacatgacaccattaatgattaagtatcgaggtattttccttacctcgtttttatcggtagggagggtacctagttcaaagtatgcaacaatgggggtaatccatgattatgtcgtatcaagtaagagtacttcttccttcacgttgattcttggtttagataaatactctacaggtatgatgaggttagctttatctaccttggcatcgcttgctagtctagccaaggcggcagcggtagtattttcctcccttagaattttttggatggtttacccctccagttgggcaagtaggtcttgtattttgctgagttaggccatcatcctttcccttctcaacatgtattcatctagaatgtggtatactactagttgggattcactataaaggttgagtattcgaatttgacttccctttctagtttcaaactagtaattaatgtttcatactctactttgaacttaatgtgttggatgtaatccttgagtgactcatctagcctttgcttaatggcaactgagccacccaattctacaggtatctgacaatctgaggagaaattgggtatagaataacctttcaaactcatccaaggaagtgatccttcttggggtaatttggtgaaccattgttgtgctgtttttgtgagggtcgtggggaagatacgacacctaaggtcatccattctcccttgaagatccatatggatcttaaaattctcaaaatagatgaggggatcctccttactcgtatacttacaagtgggcatcttgaactttggtagaatggggaggtcattgattgtttcagagaaagtagaccccctcatcctttcctgttctaagtcaataagttttggtgcagtaaagtccctgactaacctaattagctcgtcccactgaggatggatcactttatctactgttgcttgaggttggatggcattaatgccttcattaacttggtttcctcgaactcggtctggcggagctatgtgattcgagtcgccgttatgcctacttttgttgagggcattccgaaggtctcaacccccttggcgtcccattttctcaaagactggctcgtgtctttgtggccttcccctgacattttggctatcaacccttccaaacactgggcgtaggcatttggtcatttccacctctttggggtggattattgcgcgttagtgttacctattaggggcatatggctctatggcttggaaacctcccctactagggttagcacgactttcaacatcatcattgccatgactgtcagggtagttaggatggtacccactactaaatttagggtcctcccttctacccctaggtctgctatttcctggctaactattctcatctgaggttggttgttacaacacggttcctagaagtgttgttcttctagcctccttttatttccatcatggccaacattgttatttaatttccagagtttcctcccctgccaggccttagtcgaacattatgatgatcatcctatcccatgtaatgtccgggtaggacttgatcatccataggagtggacgattattgttatccctgtttctaacaatggacacgtggattccaaatagaaatttaaggcccatcaatgggcccaaataatgtaaaatgggctaaacccaggatccattctgctttctgggagaacatcaatacaactcgaccatgcggggtttcatcaagcctactcaacatctgaaaaggctatctttgtgtatctggaagaggtccttagcatgtatttgaaagcctagtatagtttcccatttattattggattgcacaaaatcttgaattaccttcctgcaatctcgaatgtaagatcatatctcactaaataaggaaataaggtaattggaaatcaagtaattaatgcatcacaattacccacaaagataggacatagttttgacaactaggatcgtgatgtggcatccacatcagcatacaaaaggtgcctcatgggctgggcttcaccagataaaccaaaatttaatgtattatctataaactccccattagagagaaaaggataactagtatgacttctatgcactataaatacttattgaatccttcatgcaaagggttagaaattcttggcttacttgctcaagcaaagaatagagtactcatactcattgtaatcccttaagcctttatagctaaacacttaataatattaactcgttgactaaggctcgttaatgccccaaccacgtaaaaactatgagtgccttctttggatatttctctttaaattatattttctttgggttaaatatttaataattcattttttgaacttggtaaatattttggtgctttcattgagaactgaagaaagcagtgataccatctaagattacgttcggtaattgtggtactcacctgaacaaagtctggtcttcattaccaaggtgaagctggtctaaattccaaaactaggttcaacaaagatcccactgaggcattaagatgatcccatcaatgaaggagtagaagaagaatctaaggattcaaatcccatggatccagaagacaatgatttcaaaaagggagataagaacccccgactagattttgaggtcattaagatggccaaaaaactagaagaacttgaaaaaagaaattggcggcaaaagaagagtttctatgaatgatgctggagaaatttgatatatttgaagcgatatttggaggagaaaattagaatcgtgatagaaatatacctgatgaagctgatcctcaagggaacactgttgagaaaacataacctaaagatcctgacacccgaaatcctcctaatggtaaaggaaaaagaaaaatatgagaaacctccaaaaagcttgctcgcaatgatcagaaaaagagagaaaatcctgctagttaacctcataaaaaagggaataatgcttcaaggcaacattactggactgattctagaggcagaactacgcataaggaaaagtctcatgcacaggcgtgaaactcttctaccaagaaagatagaaattatcctgagaattccactagctggagtgataatgtggaggaagttcatccaatatcagatgatagtagtggaagtctctcgaaaaatgatctctgggcacgattgaatgccaagaaagaaaaggcaagaaatgagaaagccaagcctcatagagatgatttgagaaatcacatcaatgactgaatccacaaaagagagtctcaagatgcagctagtcaacgtctggaacataagattgaagagctaactaagatcatggagtgcatctcctgaaagcaaaatggaacagtgtgtgactcaaaagacgaggacacaaaaccatgtgtgaaaataattatagaagcacaactaccggaatatttcacaatgccacaaatggagctatataaaggaagagcggacccagggaccatctatccaaatataccagaatgatgcaagtggaaaaagtgagcgatggtgaaaaatgcctttgtttttcactgattctgtctaagtttgtagaagactggtaaaaaagattatcttcaaaatatgttcgtaattggaaagatctatagataatgtccaagaaacaattcatagcaggaaaagattacaacctggaagttagttcgttaaagaatatcaagaaacaaccaagagaaagccttaagaagtacattcagcgaataatggatgttgctgcaaaggcaaaggttactgatgctataaagatggtggctttaacatcaagaataacaactggatctctgttatcgggagaactttaaatgaaaagagcaagttctctatccgactttttatccagggcccaaggattcattaatatggaagacgcttatgcccaggcttatggtgtacttccaccacaaaccaccagcactactacaacacaaaatctgcagtcaactacaccatctattcttcctctggcaagcatgttaacaactccaaaagtatacagaccaagtgttggaatttattttaccagaatct

SEQ ID NO: 111780 - DNA, 848 bp, Cannabis sativa
acattagttttatgtgaattaaattgaatttctggttgaattttagttttgtagtagtttttctacactttttttttcatgaattcgaaataacccatgttttgattgatttcggccatcttttcaggtaaagtcgtcggaattaataatagttctctttctgattgtgtttcgtttcgattgtgttaggttactaagttggtcgatcaaagattgtgtgcgtgaggttgcttgtttcgttttgtgcaattgaagtagtagacgatggtactttagtaatatttaatttatagattctataaatattcatagggtagaatttaagtatttttgtaatttaattatctttttttgtatataaataaaaaaaactccaattttgaaagctgttttcacaaatatgtatttctaattggtactatcaatgtacaaattctttttttttttttttttgtactttcacttacactcacttttacttttacttttaccacctctagtataatatagtttagtatagtcctcttcctatatgagtacgagtttttcattattgtacaaagatcacagtttgaatgatttttcattgctgtacaaatatatatataaagaaagcaatattcatgcagttctatgttttgttttccacagtctatatatagacgattgattaggctattattttatataaatttcaaagaaaatatatatttcgagaactttatttttaagcaataaaaaaagggaaaaaaacaaaaaaatacaaaaaaggaaaaaaaattacaaaaatactttgggccggcccattaaacatttatacagtccacatacaaatatttataaaaata

SEQ ID NO: 111781 - DNA, 6859 bp, Cannabis sativa
  modified_base (119)..(120): a, c, t, g, unknown or other
  modified_base (255)..(256): a, c, t, g, unknown or other
agtaaactacattgtagattatcctatcagttaaaccctgtgtaatgataaatcataggaatacattaaatcacacaatcttaataatttccattgtgctgacgacacaataaacaagnntatcaatgtgataaggatttggataaacatataaatgatcacatgaacaaaataacacactaaataagtaatgaaaataaaatctgtttctttactgatagttgaatagaaaagtttacattgaaatagagtttnntttagggcacaaagcccaacaagttgctcgaacaatgatcaataatggagcttcttcaaacattcttttcaaaactacatatgaagagatggtgcttcagcttaaagactcggttccttgcacgcagctcatatatggtttctctagccaaagtatagctcctctgggacacactctccttccgctcacaatagggaaagctccaaatgccaatataatcatggcacaatttttggtaattgatgttccttctacattcaatgtcatgttaggccgaccaaccttatatgatttgaaggttgtaacctcaatttaccacccatgcatcaaatttttaaccaggaatggactaggttgtgtgaaaggcaatcaaaggactacacggtaatgctacaacttttgctttaactaaggccaaaaaagaagagacatctcaccagagtttagagaaaggtaaaagtattgctaaatagggatcttcccaaggtggggacgaagacatggatccccgccttagggaaccaagtacaaatgttgggccagtcgaagagcttaaagaagttgaaattgatcttgctaagctaaccaaaaaaataaaaattggcaaaggtttgttgcttgaaatagaatccgctttgataaaattttgaagataaaatcttcacattttttcctggttgcatgaagacatggtcggggttgacccaactgtcatttctcacgccctcaacatcgatgccaattttggtcctgcttagaagtaaaggagattgtttgataaagagcgtgcacaagcataaaaagaagaggttgaaaggctctaagcaaatagattcataattgaggccttctacccagcttgggtagccaaccctatattagtgcctaagccgaataagaaatgatgggtgtgcattgatttctctgacctcaataaggcgtgtttgaaggaatgttttccacttcaaaggattgactagattatggatactacagtaggttatgagaccctaagcttcatggatgcctacttggggtataatcaaataagaatgcatccacctgattaagaacacactagcttacgaatagatgttggcttgtactgctataaagttatgccatttggactaaagaatgatggggctacctacctaagactagtcaacaggatgtccaaagaccagatcagacataacatgaaggtgtacgtagatgacatgctcgtcaaatatagaaaggttcggggaataaagaggacctagacaaatgttccaagatcctcaagaaatacaacatgaaacccaatcccctcaagtgttcttttagggttagctcagttaagtttcttggttttattgtcaatgctcggggaatagaagccaacccaaagaaaattcaagcccttctggatatgaaatcaccaacaaaagccaaggaagttcaaagtcttattggtcgatagctgcagtaagcaggtttgtgtcaaagtcaacaggaaaatgtgttcatttcttcaacatcctctacagcagtaagaagatcgaatggacaaaggagtgtgaaagagattttcaagaactaaagaggaaaattgcacaacctcctatcctatcaaaacctttagacggagaagaactaggaatatatcttgcagtgactaaatacgttgtaagtgtcgtgctgattagagaagaaaacaaaacctaaaattcagtctactatgttagcaaaaggctaattgatgttgaaagttgatatactctgattgagaaattgaccaattgcttactcctggcatcaaggaagttatgaccatatttttaagctccccccatctgagtctataccgactagccattatgtcaagtactgcaaaaacctcatgcttctggccggctacttaaatgggcaattgagctagggcaatatgatattacttatcagccttaaacaataataaaaggtcaagccttggcagactttgaggccaaatgcacgagtaaagaatagcaattttagaggagaatattgagccagaaaaggaacaagaaaaagagtccccacagatgaaaacaataataattaacaaatatggaaatggcatgtggacgggtcatccattgaccaactatcaggtgcaagattagctctcattacacttatggggaacccgtacaaggagcaataaagtttggcttcacaacatctaatgatgaagcaagtatgaagcactcatagtcaaactgaaacttcctcgggatgtacatacttagtacccatacatttgcagcaattctcaattggtcgtcaatcacaatttggggaaatacatggctccaagggaaaatgatgtcatatttaagtaaaattcaagaccagctcacataataataaggatataccatcaaacaaatcccaagaaaaaaaatgtaactgcggatgcttcggcactaatggcaagcaacaatatgactaacaaggaaaacttagtcctaatttagtttctaaaagaatctagcatcgcttgcactgaagaaataaaaatgttggatgacacacctaaatggatgaacccaatttcaccgtatcttaatattagaacacttccaaaagactgaaatgaggcttgaaaatgatgagaaaagttgcacggtacctaatcgtggatggtgtgatgtatagacaaggtttatccatgcctttgctaagatctattacaaatgaataagttgtacgactttgatatcccaatttttgcccacgtgacgtggcatgcttacgtagacaatatcaatgccacatggcattacaactcactaataaggaggtcaagtcagcatcctgaccaataggggtcccgacactcaaatgggatgacaagcgacagaccagccacccttggtcggctagctttaaagggtatgttccatcaccaatttttcttataacttcctatgggccttccgagtttggtcctaagaccccactccaggctcatgagaggcagggaagacacttcttaaaataaggtcttcgtttcgaattttctactcttgatacatttggagttagacctgtgactgttcttgaagctcctcaattaaattcaaagattcctgaagtaaagtatggttttgagttgggtcgtaggtgtccctcttgtgtaggcactgtggattcaacttggattacggcctcgcacccataggtcatggagtatgaagtgtggcatgtagaagttctttcagtggttctataggcccaaagaactcttgaaagttctttcggcccgtgtgctttacaagcatgaagcttctttttcaaagtggtcttcagaattttactaacggcttccacttgtctgcttgcttgacgtctggcaatagcagaaaattgatgattccatgtttggcacaaaaattagtgaattgatcactatcgaactgctttccattatcagacactatcttgtgtggaagaccatatctacactctatatttttaattacaaagtgtgtggccttcttggaagctactatgtttatgggttcagctttcacccacttagtgaagcagtcaacagcgacaatgatgaatttgactcctcccttatcggttggaagtgatcccactaagtctattccctaaacagtgaaaggccaaggactgttcatgagggttatctccgttggtggggcccatggaacttttgagtaacgctggcattgctcacatttgtgaacatattcagtacaatccttcttcataataggccagaattagccttgacgaatgattttcttgaaaagactgtgtccgaatgtgtgatctccacaaaatccttcatgtattttgtgcatgacgctacttatctctgttctagctatgcacctcaaatacggcattgataatcctcttctatatagttttccatccatgatcacatatctggggacttaatactggaccttctgtgaagcagctctatctccaggtagtgtacctgtctccaagtacctgagtattggagccatccaggaagttgagtggtcgatggcagaaacccctagtattttcgtgctcatagtgatcaaatgtgcgatggggactagtccatatttctctacttttggatctattgataattttgccaacatatctgcaaaaacattcttatccctggggatttgctttacagaacaatgattaaaatgttgcaacagctctcgagtttttgctatgtaactatccattttttctccttttgtctagtactcccaagacactttcttgactacaagctgtgaatcacggtagactttgatgtgtttagcgccgacctcttttgctagttataaatcagcgatcatagcctcgtgctcagcttcgttgttggaagctttgaacttgaattgaagtgcactttgaagctggagggtctgtggagatattaaaatgatttcggctccaaaacctttttcatttgatgcctcgtctacgtatatcttccaaacttctctctcgtggaccgacatttcaagatcgtcatttatcccagtgcactacacaaagtcagctaaggcttgacaattaatcaaaattctaggatgacattgtatgtcaaattgactcaattctattacccacttcaggagtcttcctgatgactatggcttctgtaaacttgatagagagggtggttggttagtacccttatggcgtgagcctaaaagtatggttttaacttccgtaaagcaatcagtaagcaaaaggaaagcttctcgatcataagatatctagactctgcgtccagcagtctcttgcttacttaatatactagaagtagtacctttccttctttttgcactaaagctgcacttatggcatgatctgacattgccaggtacagattcaacatctctccatcaacgggcttggacagtattagagccttcactagatgttcttttagttgctggaaggatgttttacattctactaaccattcaaatttgtgatttcctcgaagtacgttgaagaacagtatgcacttatctgtggatttggagacaaatttgctaagtgctgttattctccctgtcaatttctagacatctttatgcttcctgggtgaaggcctgtctataagagctttgattttctctgagttcacctcaatccctcgtgaacttaatataaaacccaagaacttccctaaggaaactccggaagtgcatttctttgggtttagcttcattctatactctcacattatggaaaaagcctcttctagatctttgtagtggttcttagaggtttcgactttactagcatgtcatcgatgaacattttgtttaccattaattcgtaagtggctccaacatttttcaatctgaatggcatgaccttgtagcaatagattcctttgtcagtttggaaactagtgtgctcatgatcagccacgtgcattttaatttggttgtagccggagtatgcatccatgaaggttaagagttgtaatctcaaagtagcatcaaccatctgatcaatgcgcaaaagtggaaaacagtctttaggacaagctttctttagatctgtgaagtctatacacatcctccatgtcccattaggctttaggaccaaaaccgaattggcaaaccacatgggatatagagcttccttgaggaaatcaatgtttatcaacttgtctacctctatttttcctgcttcttgcctcgctagatctaaaggtctctacttttgtcaaattggatcagcattgggatctatttttaatgcatggcaaataacacgaggactaattccagtcgtatcagaatgagtctaggctaacacatcactatttgccttgaccgtggaaatgatcttttccttcatgcaggaggtaggttcttccccactcggataaccttggtgggatttccatcatctatgcatacttcttccacttcctccattggttttatgacacgttccatgcaaattcgtggatcaagctcatcttcttagatcaccccctgtgctggttgggaagatgtcctggcttcagagttatttcctttccggaccataagtacagttctggttgaaacaatgtagcaactttgcgtacttctttgatctcttttgatagtccctatgcttacggtatagcttgagaattttaagcacagatgttggatgaatgtcactactccaaaatctattaaaaatggtcttccaagaacaacattataagtagtagggtattcaactatcataaatgtgttgtacttgaaggatgatattgtgttgtttctaggaacttccccacttataatcatcagaagttgtatttttcaaatagcgattaacgtatctccattgaaaccttgcagttgaattggacatggtagcagattggctttcaccagaccaatggcgtggaaggctcctttaaaaatgatttttacagagcttccattatctactagcattttggaaactcttttgtttgttatttgagcttctattaccaaagggtcattatgagggaagtgttgggttttgtgccctaaataaaaaccatttcaatataat

SEQ ID NO: 111782 - DNA, 7210 bp, Cannabis sativa
tcagatcaaataactctctcatctgacggctgtcgtacatcacggattgtaatccgtaaaagtacaataacgggacaaaatcatatccctatatttatattgaataaaactactattgtatatactattgtttttgatgaacaacaaaaaaaatcatattaaacaaagaggaagtgaagttttatactaatttctttgtctaaatatgactttgattaaagttaaatgtaattatagagtaaaccaaatacatactcaaataacacaaaatttactcccgcatgagtctgggctaaggtaaactatgtctgtgtttaagacttacccaaaactcaaaactcaaaatttttatacactatataaatatgtggaggaatttgtgaaattttaagaaataggcccactaatacccaattcacctcttactcaagtaaaatactttacttataacacaatttatagtcgaaaccctctagctctagggccggtttttagaataggcgagataggcacgtgcttagagctcccacccaaccaaggtcccaaaaaaataaatcatttcatttttagtataaaaatttaaaaatattgatataatatgatagtataactttggtgtggtgataatatattgcttgagttggtaatgatattatatgtgcatgattttatttaactatgaagtatcttatataattctagttgcaaggtagggtagagcttcaagttactatatccaatattggtggtaatattcataccacctatgttccatcatattatatgtatagagagtttgaaggatgtggtttaagtggtctagggttaattaaaagagatataccttgaaattctcttactattattttgctcctaatgaagacacaatataataaataaaaatcaaactgacacatctttaagataggctataatggaccacaatttttttctaggtgtatttatatttgaatgagattgatttgagtggtataagaacaataagaaaatagtcatagccagctctttattattatttagtatttttttttttacttttagttataatagacttatgagtaaaaataaaattataattaattataaattatcagttttatgttgtaattaaagtctgtgattaaaaatattagttacaaaaattataatttgttgtgattaaatgtatttttaaacacaatacttattgtgactaaaattatattagtgacaatttgtatctatatattatgttttaatcataagtaattttttgttttgactaaaaattatatttagtcaaaaaaatttatattatgactaaaaaagttatcatttaaagtaacattttttaatggtatcaataagttaataatatttgaatttcctcccgtaaaagagcaaccaaagcataaacgtacatttttcttttaaaaggaaatcattttgaataaaaagactagatctcgtggttattacaaaataagtttgttggcagagaagaaatagaaagataatactaattgtgggtaaagacccactttattacattatagactgtaaaattacaagatatgagatacaagaaaataaacgaccaacaaaaaaatgagagatccttttacaaaaagaagaatagttcatattcataatttctcatctaaaattcttttcgttcaaagtattaattactattttagaatcgcttttcactatgataaacttgtaagcttgatcctttgctttctccatagttaagtaacacgcagtcgccttgccacagagaacatcagaaagacccaactaaccgtgaaaatccaaaccacctcactgcaataatataaaaaacatctaaaatctaaaattaaagtcacatatataaaaaagacttatcccacacaactcaagaccttacaatatgtagataaatctttctcccatcttaccatagtaaggagtatcattcatatttcatcaaaagtcaaaatacgagtcatgatcttattaatggagtaccatactagtagggtaacattttgacctttcatcaaagttagttaatttttttttttttttttgtccaaaaaaatatattaacatttaatgaaatattaagattaattatacttactctaccaataaagtatatatgttccaatattttacgtgtaacatgttgtaactaattcacttcacttttcttttcttaattaaattgtattatatggctctataatatatattttaataattttatatgcttgtgagttgtgacaggcctggccgacatgtagaaagcccagttaacaagctcaaacagtgggccagtgggcctgtgggcccatgggctagtctgtggaggacctcatgccttattagctaatgagttggactggcagagatcttaaaacaaccaacatgtttgtcttttgactcttctaaagctaaagttagggcatcaatagggtttgtggggtctatttctttaattcttttcctacccaataaaatccctaataaaaattaatggaaaattctacattgcacccttaaaagaatatattgatacacttttatttattttagtattcaaaataattttttagttaatttttttttcttatggtcatgtacgttatatttatttgtctgtaaaattttaagaaatttataaaaatttaatatgctgaaaaataaggttcaaacattatgttgcactcgcaactattgtattttatatgtgtgcgaaatagactgtttgaacactattttttatattgtaaattattttgaatttgtcaaaattttgtagaatatcttaaataactacaacaaataggaatatgaaaaaaaattgcactaaaaattcttctagatactaaaactaggttgagggtacattcgtacatctcttttaagcacccatatatatttttgaaaaattctacaatgcatcccttaaaaggggtctaccgatgcactcaaatctgtttcgaacatctcacaaaattttaaaagatttaaaaaagaaattaacacgtcaaaaataaagttcaaacagtatattttacacgtgcatataaactaaaagaatcttacctataacaaacttataatttgagtgagtggccaaacttattgacgtattgccaacaaagcatttacacaatcaaaataaaataaaattaataaagatccttatttttttttatgcttttgcattaaaatgatgaatgtcttaatcttatcaaattcaaatttcataaattgtttctttagtacctttatatcaagtcttgctataacttatctacacataatatcacaatatcataaatcatggagttacatcattgatttttggtatagacaaaaaaacaatcaaataattataagaagctgacaaattctactaattaaaaatctcttatttttaataaactataataattatggttgattaatattgataatccctttctttcttattcttttcacatgaaaggaagttttagctatatgtcatgaaaataaaatatttttccattttttatttctataagtatgcttgtgatattaatttagaaattattacacaacatattaaatttttttaatttttttttttattataggatggattttttttttttaaaaatactatatattgtgttaaattttgtatattgttttactattatattttagttgttctactattatttttaattgttctatttaatgttttacagttattttataaaaaattgtatttttataaaaatttcaatataacaataaaattataaatttttattcaaaatttaatatttttgtgaaaaaaaaaagatcagaaatttcaaaatcaagtggttagaaagtaactgccaatagttggtgttttaaaaagaaaaaaaaaagagacaaaaataaaaataaataatgtgtgggggaaaagcatcttatcactctcatctatggctaagctgccttttatttatttatttattttttattattttagtgataagaaaatcattagtggatttctatgtcaataactttatatttatattacctcttttttttcaattatttatttgaataactttaaaataattgttattttttatggctcctatccaataaaatcctagatagtttcacagtacaatcgtacggaatatggctctcgattgagacattatgttattattttttacccaaatctgcaaaatgataaataatttaattatacccaaacatatctataactttatgtaaagtgtaagtatatacctttagttaatatgatatattattattattattttgtttttggttcattaaaaaaatattgatattaatctctcaattgacatttaccaaacttttttttttgataaagtaattaatatgcacaaattcaatcatatattatgtagacaaatattcatgattaatttatattgtgtgtttaatatgatcatttaagaaggcacacgggtgtgtaaaagaaataatttttttaatttttaatattaatatattaattaagatcatgatcatgacttgagtgtttttattttttatttatttatttattagtatttatttgtgaaagactagctacttgagaatccactttgtaatttacgaaaagaaaagcatctaatgagacttattagtttggcaaaaatgaatgattattattatttaatatatattaatttagttttgtctaaggtgtaacaagttgaacatatatatatattttgtattattattcttattgaaaagaaaaattaactataataaattaattaattatagctagaaaggattgtgagttcaaaacaccatggaggctacgtttggttgttaacatcgtttttatcaataatattgatcttatcatttgtaatttgtaataataataaaaacacaaaataaattactaatttaattaatatgttgttcctataatatataaataattaatgaagaaaaaaaaactaaaaaataataattaagccaaaaactacccttttctcatttcatctatatactaattttgtaaaaaataatgatctaaatattagataattaggaaacaaattacgctttacttgcgattattttttttttataattttatactatatatatctaatatttttgttagtaatgtttttttatcttatttttttcaatgaagaagatcttaacaaaattttattcttatgcattctttttttttcacaactcactatttttcttcacatacacacctctcttatacacaaaatacatatttataaagttacaaaatttgaacaccaagaccaattgtggaccaagacattccaaagtttctttaaaaagactcatcaaaacttgactactaagatattccttttctcacaattaataattacccgaaaaaaaaattgtaacttaacaaatatagatgaataaataaaaaaataaataatttgtcaaattccaacaatctcaaccttgttttaaattctcttaactcacaactcaagccatcattaagagtatatatatgcaccagattcatactctcattgaacttcacttgaccacttatctccacattcttcaatcttttattgatgtcttctttcttcaaacaatttttaactaaaattggagtcatctccaccttgtcacattctttcccactaatggaatgcctttttcacagctccacctaaaatagtcttcctgactgatttaaacaaatttcgctctttcttacccttcacaactaccaagccacctttttttataattatttcgccatcttttgcaaaatagatacaaacctcaagtatctaaaactcccaaagagattaagctcctccttaatgttggaacatgcatgtctcacatcagttagtgttctcacaacaccatcaaacatcttcaccttaacagttcctattccaataactttagagttagaatcattgcccatcaaaacagtacaaccatcatacatatgccttataagttataagtgtcaaaacactctatatacgggcacatgtggaacgaacaaccagaatctaatatctaagagtcataaaagttttcatcaactatgacagagagaacatcagagtcacttagccttcaccatcaacatttgtgaaatcggatgtgctttgcattcttgattcctcattacttcaagatgattggtcaactcttcacaattttgcctaagatgttcctttttgtgacaattccacttccctcgaagagcgtaaatgagtgcgattatctcttcttttcatcatatcttcctctcgatgtactcttaccacgacttaattatgaccttgtcacaagagcttgatcagtatgagacataccacttggttgtttgatagtactatctatctccaaaatagcagttaacacctcatccacaattaaagtagttttttcaagtaaaatgcagtcactagtgtctcatataattttggtaaagaagccaacaaaataataacttgatccacttcatcaatttcgacatctacacttaacaattgggttatgcacttattaaatctatttatatgacgcctaacattaccttcttcaatcatcttcaaatcatataattgtttcttcaaatataatctatttattaaggattttgaaatataaagctttctaacttttttcataactaagacggacatgtttcattcaatacactatactttaattcatgagctaaacttaaatgaataatagtgcttagcgctttcgcctgtaactccttccaatctacatcagtcatactctcaggtttctttccatgcagtgcctttatgagcccttattgtaccaacatatctttcactgtactctgccataaattgaaattattctttctatcaaaaagcttgatctcaaaatttatagatgataccatctttggcatattcggtgtagatctgaacattggctatgataccacttgttgagaaaaatgataaacttcaagcgcaacaaaataacaaagaaaacaaagcaaaataatttactcatggtaaaactactaaacccacaaagagagatatatttcacttatcacttcaaaattacatatactctctatctcaatctctccacccaaatctcaataccctttgcttcttcctcactc

SEQ ID NO: 111783 - DNA, 1776 bp, Cannabis sativa
  modified_base (1731)..(1732): a, c, t, g, unknown or other
aaagattaataattttaaagagtatttggcttgctaaatttaagtttccttgtcaatggaatttactttgctgcaagcttaatcaattcattaattacttctttttataaccaactatttgcagctgaggagggaaaaaattgctgaaaggatgaaagggttgcaagaacttttgccaaatcctaataaggtaaccatttcttttggttatctcttgttaataagttgggtatttttgttatgtaaacacaaatttttagtggagacatgaatgtctaaaaagaaaattggattttttcttttttttacatgtgattatttttcaccttggttttttgtagactgataaggcatccatgcttgatgagatcatagactatgtcaaatttcttcagctccaagtgaaggtatgttaaagaaactagttattctattgacacacacactgatattagttactttcttttatgaaacaatcacttaactgaccatgttaaaaatgactcttattgataggttcttagcatgagcagacttggaggagctggggctgttgttcctctcatcacagatggtcaggctgaggtatgatcttgttaaatcccaatacttattaattgcttcataactaatgataatactttttttagttttgttttgattgatgagatgatctgaataacattagggaggaaatggttttttactaaaccaatcatcatcagctggtgaattaggtgaggttgtttttccatctgatgaaatcgtgttgttcgaacgagagctagtgaagctgatggagtccagtgtgaccaaagccatgcaatttcttcaaaccaaaggcctctgtctcatgcctgttgctcttgcttctgccatctccaccaaaaagagaaatgatcaatcaccaccctcttctgtgtctcaggattacaccaagaaaaatgacttcactaatgccaatgcccccatgaaaagtccaactacagaaccagaagatgggactaaagtttcttgcaaagccagacatacttaaaatataagctttttttgcacatctttctagcttctatacatatatttttatgtatgtatgtatgtatgttgttcttgttgtaggatttgtgaacttagaagagtggagatttagttggttttcttctttctcctttttggtagtttcattttctttacattggaagtttagtagcgttatttatgtaaagatttattatgatgcagttgattatcgatatttatgtagaactttcattttctttctttctcttaaaaaaaaaaaaacaaaaaattgaacaagtttgagaaatgaaatacaatacaggacctagtgtgctaatgtatgtgtgtacgtgtcctctaaggagaggttattacaaatgataataattaaccagtaatattaacatgaaaaatagtgtgctaatgttggtttaacatactgtagttgtttgaaataaaagatcaagataaccaatattaacagctatgtgaatattggaaggggaataccaaaagtgctagctaaactacaatatattttgcaaagatgagggagcaagagcaacaggtgtggagagagcgaaaaaaaaaaggccagtttttgtgaggagatactgaatgtgcttggcctagctagctggctcaacttacaatcagctggagattttttttattattatttaagcgtgggtaaataccattttggacccnntgttttgcaaaagttacagattgtaccctgtattttgttaaatg

SEQ ID NO: 111784 - DNA, 6759 bp, Cannabis sativa
  modified_base (906)..(912): a, c, t, g, unknown or other
tctgcaaacaagttggctcatgttttagccagggattcttgtttctctacaggtcgtgtgcttcagttgaaggattgttccaacaaagtgcattctattgttattgacgattgctagttaataaagttgctaagtttattcaaaaataaataaaactaataagttcaaaataattaaaagcttactaaattaattaaaatttaagaaataaaccatttttagcttataaaatatggtaaaataactttaatttctagtaaaggcatctatgtttactgcattttaaaagaattataactggtctacaggggtatcccacccatttcataaaatattataaataatttataatgtgaaaaataaaatttaaatatttagttgcatgtatttctttttctttttcttttttttttcacgcgtgcacataaatatttgaacttttcaatttcgacaatattaattattctaaattgtttgaaaataagtgaaatatctgctactataactataatatagacagttatatatgaaaattaaattataatttcttttaggctaattaggaattttactacccgaactttgacatgtaccaaattatgctccctgaacttttaaggtcgttaaaaatgtcccataaactattgagattgttagatttaaggacttttgtatagttttagtaaaaaaacgtctaacatggatgaaagttcaggggtcatgatttagtatatattcaagttcgagggacatgatttggtagatatcaaagtctggggagcatggcttagtacataaacaatcattgaaatagtaaaattgaatgaaattaaataaaagtctttaaatctaacaatctcaatagttcaagagaaatttttaacgactaaaaaagttcaggggcannnnnnngtacatgttaaaatttaaagggtaaaaatcataattagtctttctttaaagtgctattttttaattaaaaaaaaataagatgtgacaaaagttatattactttagaatttttctatatgtaaaaaatgtttcaatagttatatcaaatataaaactaccaataattattacattaaattaacatttagttagagataatgaaatggaacaaaatgaaaaagaattaattttcattctattttttagtttgattgcattttaatttaactagaatggctattttattttaaaatagaagaaaaatccattccattgcaagataagaaaattttaataatttttattattattttttttatacattttaaattttatttaatttaaacattccctaaaaacaacctaaaagaaaatgtacttaggaaaaaaaaaaaaatacctcatgtgacaatatcaaaacatgccttggcaaagataaaatgccaaaaaataaaataaaaccaagtccaacttacaataataatacaaataaaactgccatgtaaagaactaaacataaatgaaaatgttttcatcgtaaggaaaattaattagtaagagtaaagatttaatattattgttgcaaatattcttcactattattccatgtaaaacataatatttgtaataatagacacacaaaaaatatacttgtgtatatgtaattcttgctaaagcaactgaattatgattaaaagaagcatattatcaaggaacaaagtaaagattatgctattaaagttcaatactttcgcaagaaagttaacatatatggtcataacaaaagccataagaatctcattggtctaaaagttcatgaccaaaagatggaagttcatgcctatatatatatagagacaaagaaaactatgggaaataaacaggccagttggcataataagaatctctgtggtccttatccatgtactcgttccactgcaacaacaacaatgtcaacatgtatcaactcccatacgagaacagaaagaggacaatttgttatatcaaaatcataggtcacatgatttgatattgcaatagttattgacatgaaactattaggatgcatgaaacataatgtaaattcaggatcaaaggtagaaagggttagagaagaaatgaacaatccaagagtgtataacataaaactctttttgtttgggaatgaaatgtaacacaaagaggtttctggcagtttgaaagttttaaggggcacttttgcaatgtgataaattttatttttccaaaacactattgaattcagcacaagaaaaaggactacaaaattggcaaaccagtctccattttatgaaaggatagcagttgttaatgtcgagtcttaccttaaacttgtaaggctgccctttcttcattgctttcttccagtgatattgttcaaacaacatggctttgtcgtgccagctgcaagaatttcagattgtcagacagttggcatactaaataatccaagcaaggaagcaaagtcatagatacaaacacactgaaattgaacaccaactatcaaaggtttcagacaactttcaccatgaagaaagagaaattaaatgaaacatgctttgatcaaaaccagagacattcttattcccatccagtgagaaacataaaagggagaatcatagaatgtagagaaacatgaagggagaaagggcagaagagtttcaaaaaatgaccgagtttaccatgtgaatcacaccaatgaaggataccaaaacaaaacactaagccaagaggggtagccgtagctcaaacagttagacaacgtggattgcgtaaaacacacaataaatggtaaaaaggaaatagtttaacttaagggcactaaagagtgtgaaagattttttaaagagaaatgctaaagtgtaccactgctggtgtaattaagtatcaattctacattttcatttaaatacttattatgcaaaatcgcaaccactcgcaagatgtaaccttgtgatagtaggtgcagggtggttttgggaaagtgtaatgcactttctagaatgactatatttaaatagtgtaaaaaaacaggaagaaggttataaattgtatgaattagaattaggtcttaggagggtctctccaatatcatcatttgtatcatgctctttgtattgtctttattccttttgcagagaaagtttatttactgtacaattctattttgtgaacttgagtgacagtaatgctctctaggtcctaacactttgctctcacaaagtctgaaattcgagtctctcttgagtagctacataacaattgctgtagttttcagcatggttaatcatatagcgctagtgaaggaacaaaaatataacaatgaatgtcgttcagatacagaaatcttttcatccggctataccatatagcagcagcacagtttatcataaaaccaaactgaaagattgaaccaataacaaaatttaattggctcgttcaagtacatgatcaccgccattcagttacacaaaaattcacctacaatatacatcttagataaattggaatggaagactgggaatgcttacttgaactggttagagagttgccacatgtaaggattgaaccaggtgagtgctgaaaaggtagctgatccaatccatatgttccagaagcggtctggatcagcatgcgggacaccggggtcacctctatacgcattgccaaaatacttctccatttccctctttgcttacctcctgttcaacaaattgaaatggataagctaaaacataataaacgtatgtcaatccttaacatatctaattatgaaatccccatttaattcatatattttcatctgctattttctctacctttcattttaaaaagtaatgccaaacactcttttatttttcattcaaagacataatgttctacagttatggaaagcaggataagtgaatctctcactacatgtatagagattagaacaagccacaagaaaaaacacagaacagcaatacacaatcactctgataaaagcattatctttagaaaccatggcttattgagagctgtaatttcttcttcatcaaatctcaaattaagtgcaatttaaactaatatacttacgaccagtaatacacaaatacaagctagaaacaacttttcagatgggtgaaatcatttgcataaacacaagaaaacaacccaaacgagtttgccatattttgatagataagtaagagcaatgaatacccaattaccataatcaaaatcaatttccatataatgttagacaaagcatttgcatactggaaacttctacctttgttatgaaatacccaaaataaaacaatgaaatcaaacagaaattggaattgaaaaatgataagaaaagaaacccagaaagaaaaaagaaaagggaaagggttttaccttgagagagtttgtgatttgggtgggactgtctctcgacggagtctaggcagctctctagccggccggactggtaggataggagtttgcaaagacgctgacaataggataatatattgcgataattactattttatccttttatttttctttgtattttggttttatttttattttgaaataattttttgtattttggtttattcttgatttttgaaataataatttttttagataattgtgacaaaccaaataaaaaattaaatgatttataaatatatatttttttattggaaccaagagacaatatattggacaagataatagaaatattgttcttgtatttttttttttacataaagaaataattatataaaagtttcttaataaaatttgtcaataaaaaaaaatatttttaaagcaacattcaatcaaacaatcaaaccatagttcatatctaaaataattaaaattatttttaaaaatcaataaaaattcaaaagttattttctcaatctttccactcacaaaaataatgaacacttagggtttgtttggaaacaatttagtagttactaaacagtgtaaatgtggtacttacattgtattctaaaatacaatgtgtatttgaatattaaataataattacatgtgaatttcaattgtcatgtctttgtaactactatacagtgtaatggtagtaattacactacatagtaattacattgtattttaaaatacaaagtgtatttaaatgtcaagtggtaattacatgtaaatttttaattgtcatgtctttgtaattactatgcggtgtaaggaaagtaattacactacatagtaattacattatatttgaaaacagaagatgtatttagatgttaagtggtaagggtagtaattacactacatagtaattacattatattttaaaatacaatgtttatttagatgttaagtggtaattacatgtgaatttcaattttcatatttggcaagacagttggtaattacacaataaatccatgtaatatttaaatataataatcattatcattttgtaataaatatttcaaataaattttatctattaataatatttaaaataaataaaaatctcttcataaaataaactcaaatttcataataattttgcaacaaatatttaaaactcaaatttcaaatctcttcaacaaatatatggaacgcaagagcaattagatagtcttaactgataaaaattatttaaataatctttcttaattaagatcatttaattgctcttgcgttccatatatcttgagttattccattttgtgtatagttttcaagtttgagtatttgtcatttttatattgattaaagtttaataataaaataaatttaagcatttcatcaatcaaaatttatgctaaatcatgaataaatctattaaatttctaatttaaaagagaactcgaaaactaatgttaattaaaaaaaatcaaatatcatatatttgtatattagttttttttttttattatgtataaacaatacaagaaaaaacacactaaaaatattataaaatagcacatgtagaatataagaaataaaattatgtatatgagaaaataaaataaaaatgaaggactaaattaaatcaaataagtattatatttgttatacccaaaattcggctaccatctcagtggaggacacgtgtcaagataaaaggaatacggatcgacgatgtcactttttatgaaataaatcattaattgcgtaaattgcagagtatattcacaactcgctgactgtaaaattttatgcgaggaaaaaatatacaaactgttgcttagtatattaacgagaaaccatatgtcgttagcgaggcatcaagtatgttacatctgggaagatgaaagcgacgcatatcgactgcggaaacacttagtgtataacgtacaaacaaagtataatagtcgggttggcatgagacccgataagtgaggtacctatctcgctatgggaaggttcattcctgtaactttccccagttaacttcagacatcttctcagtgaggctaacaatcctgacgagtcagaagctaacattcaaatgagcctcaaagaactctttgttaataagaattgcgatcgtcacaaatgaagcgttaaactttcaagcaaagaagcgacaagacgtacatcgtcaatctcaaaaggataaggaaaaaggctccagctggctactacggtcactggaaccaagatcttgtcgagacatcctcggacgtacacaattaatgacgtattaaaacacacgatcactttgacctagtaaaagcgggaaaatcacagctatatgattttcaaataataatcgtatttacattacgtgatatgtaatcaaaccccatgatt

SEQ ID NO: 111785 - DNA, 2692 bp, Cannabis sativa
atatatatattctcatcctggtactcctatctctcatgtctaataaaacctattgttttccaataatctaaatgatacacatgtctcctcacttctaaagtgtatcaatgtcggcacttttgatttaactgaactttctgctgatgtttttaatgtcctgttttctagtgtttcataaataattacaaagtcaaggttaagtgaagtaggattatttttgtttttgttttttccctttgtctgctatattcaagtgttttgcttcctttccaactttgcttttcgagaatacaatcatgcaatgtatatgcaaatgcatgtgtactttggcatgtattacaatgtaataaaattaagatcaacatattgggatttatgatttttctattcttagtgtaattatttctcctgtcaattttaaattttcatactttgtaggagtactggttcttttgttatattatatagggtaaatagcggcagaagtacccaacattttaagtttgtaagcggcataaatccaatgtttatttttagcggcataagtacttaatgtttataaaattgtaatttttctccagtttcatcggtgcagattctattttgaatttattaaaaaaatatttggaaataattgctactacatgtttatgtctagaccaaataatctagaaactgggccttgtatgtgtcttgtttaagacaataacagagtctgtattgacgaaattagagaaaaattatagttttacaaacattgggtaattatgcctaaatattaggtttatgctactgacaaacttaaaactttgggtatttatgccgttatttaccctattatatatactattgttgtcaattgtgacacttcatatttctatttagttcactgggtagtcctactatggaatcttccttgtttgaatttttagacttccatctatgcacttaggaaaactacttaggcagccagagactggtgttactcatactcatagatagagtctagtgttctttggatctttgtatattattaggggtaaacttacctgagttctaatctcaaatataattttctgcagtgctttcatggttcactgtgtggaaggactacaaagttcgtccaaaagtaactgtttgcaatggcattgtcctttcccaaagagcaacattggatattagcacatgtttataaatgtgaatttttaattggaggttgtaaattacgagattggagatgggaacattaaaatgccttcatatttgaagattggggaagaaaatgcatcaagcttggggttgaataattcattcctgtcatgctgattgttgcatcaatattttcatagttgggggataattctcaaagtatcacatataaagtatggaagtcatacttgtgagggtaggctgagtaggcaagcccctggtttggtcaatgggggtatgagctaattccttatgggacccttcctagcaatatgctaaagttcttaccttccagatatttatagtgttcttcggctggacaagtataaaaaataaatatatttattgaagttagcatgcatactatgtcataattagttgtttttgaggtgcgagtcagtatgttagggttggttgcatttaatttgccagggtacatattattctgataaggtgttaaatgtatgtaattatctgtcgtagatcgaattttatgctttggtaatggaatgttggattattggctgatgaaatttgaggggagatgaacttggagtgtgttctgtagtattggttgcagtttatttttctttgggacccttcctagcaatatgctaaagtgtttttacctcccagatatttatagggttcttcagctggacaagtatataaaataaatatatttattgaagttatcatgcatacgatgtcataattagttgtttttgaggtgtgactgagtatgtcagggttggttgcattgaatttgtacatataattctgatatggtgttaaatgtatgtaattatttgtcatagatggaattttatgctttggttatggaatgttggattattggttgatgaaatttgagtggaggtaaacttggagtgtgttctgtagtattggttgcagtttatttttctttggtccagcaattttcagaatgctactattgttagactagtttttaatatcgtttccccttagatctagtcagtttttctttagttttttgagaacttctcaaaacttgggattatcctggtggcctttgaagaagttttattctactttgtttgaccattaatacatggtaaattgacacttattattcatagattgctcttacccctttaaagatattaaagtaaaatgctacaggactgtaccagtgatcatattgttatatttaggcaaatttagagtatatttatagctttattgtaaaagtttgaactggcaccttgttggcagttaattaatgcccctattagacatgaaatataatattaagtgttacaacatgtatctgctctctataatcagaaatagatgccttttgttccacttttagaggtttttggccatttaatggtttttcatattcaatttgaacaaatttattctgcccaagtccaggtgctctttttccctttgggggattcattaatattttcattattaaggttttttttttttt

SEQ ID NO: 111786 - DNA, 3682 bp, Cannabis sativa
ataattaaatatataaaattataaatattaaatatgattggatggacatggaatgatattggattgtatcggttcgattattcattgaatcatccaacatccgaatggatttttaaaatttacatattgaatattccattttattagatcgattgagattggatcgatcgattagaattgaatcgaatgaatttctacacacccttaaaaataatggatttggtttgtgtattataaggcacgagagttatatgaatgagaacataaaatattattatttttattagcgtgtcacttgactgttaagtcggctgaacgagttcgaaagtgaacattattaattaatttaatattatagtaaaacatggtcgtgaggatgcttatgtgtcaaagatggagagactctatatttgagttcttcaactccaacggttactaccacaaccttcttcaatgtgttcacaacggtaacttcagcgaaaccccccaaatcgtaatgaggcatggggcccaccctctacactctggcaattatgattggctcgaccttgtactttgattaagtcgaacataacggtctttcccttatcaaagaaggcaaattaccattttgttttattatttcttttattggcctaaactgcaatttaagtcaagaacaccactactttcactgtttcacacttcctccaattacctaatccaaatgtataacgtgttttgacccttagttctataattattattatctacctcattctcattcttctttcaaagacatttttacccccaagaagctcttcaagtctttaattttgattaaaattaaaaaaaaaacatgtgttttggccaaaacattacatgaatactacaacgttattttatattattatttatatataaatatagaaattacatattggaaaaaacttagggttaaattcggcgttggtttagtcaaataaaaactgcataacttttggtaaaattggtataaatatagcattggtaatggtaattaataaaaataaatgccttttcaaaaatagaggataaaaagagggaactaatttacgggtaagtattcagtcaagaacaaaaaagaaacaaaaatttgttctaaataagggtaaatacgacattttcaatagagccctcaaatcattggtcgaaactttcgtaaggaccgctctttaaacacgggaagaagagaagagagaccccaccatcacgaccttcgtcacctcttggctctttgtatattaaccattttttgctctctcttttctattcaaatcaaaaaaataaattatatctaaaaaccaaaaccaaaaacagtgagagagcaaaaaatcgataacataacgttaggatctgaaatatttaagaacaaaaaacatgtcgtgctccgttgcggtttcaaattcgccggtcttttcaccatcgtcgtctctgttttgtaacaaaagctctatgttatctcctcccgaaacgctgactctaacattgtctcacttgaagccctcacaaggttcttcttcgtcgtgttctgcttcttccccaactccttcctcgccttcctccccctttaggcttaggattcccaagcctcccacagggctttccggtcctggttcgtcgtccccgagtactgtcttcaagagaaagaggcccacgagattggatattccggttgcatcttggagctcagctgctcctcctgcgacgccttcaccggcaacgtggagagagcttgtggagattgaaaatgatgggtattctgtgtattgcaagagagggaggagagaggctatggaggatcggtactctgttggtctcaatcttcaaggtgatcccaaacaggtaatggctttttttttctttctaaagtttctttttaattatcagaatctagagaattgaaatcatgccaatattaatatggtgttgtaatttcttctttgcaggctttctttggtgtatttgatggacatggaggctcaaaagctgcagcatttgcagctgataacttggaaaagaacgtattggctgaattagtgagcaaggatggtgatgaccacattgaggaggcagtaaagcatggttacctgaacacagattcagactttcttaaacaagattttcgtggcggttcttgttgtgtgactgctttaatcaggaaaggtaaccttgttgtgtcaaatgctggagactgccgcgctgtgatgagcagaggtggtgctgctgaggctctaacatctgatcatcggccctccagggaagatgagaaagagagaatcgagaacacggtgagcaattaaactcatcccatcaaaattttgtataatctcttatattattgtattaagtttttatgaattaagactgatgtttacattgattttctttttcttttcttagggcgggtatgttgatctttgccgtggcgtatggagaatccaggggtctctggctgtctctagagggattggagatcgtcaccttaaacaatgggtgattgcggaaccggagacaagagtacttcaaatcaaacccgagcacgagttcttgattctggcctcagatggattgtgggataaggtgtgtgagtttgatcaattttactcaattcttattatgtatgtttgtgtctttagtttcaaatgaacttacaaaattaattcttttgttttgtttcaggttagtaaccaagaagctgtagacactgttcgcggtttttgtgtaggagttgagaagccagagccattgtttgcctgtaaaaagcttgtggaagtagctgcatcgcgaggctctttcgatgatattagtgtaatgctaattcaattagggtgttacatatgattccatagttcattaatagaagacaaccagcctaacactctgatgttgttctgtttttactgttatgctgatgttggtaataagctgcaggctaagtaagatagggatgataatgttggtggttaattatatgtagtgattattcatttgtaaatggttttaaatttaacttagttttgggcaattttagctccctttagttagctaagggactaaagattgagacgtagtcagatcactgattgtattctttattctttgattaatttattcttaaccattcttttctatacaaaaattgtattattgttattgttattcttttgaatctcgtaaagaatataagactaactcaaacaggcacattatattaattctctacttctatggaagatgtgataaaagcacttgctcggtctcaattgaccaacttctaataatttcgattaatcttggcaactagaatctttgtttatttcattattaacacatttgttaccaaacaattttattatctctttttcctcatatgttgaccatttatttatatcatctgttgctgacaaaaacaatggaaaagaaatccagaacatgtaatatttgaggtttttgactttatagatgatgctttcaaaaagcttttgactaggtcagcaattttctatgaaccggactttgtttttgtttttattaattttgattgaacgacttgaccggtcctaaataaaacgatagcggcctgttagggtcaagttaattatgttaattttattttaatttttagttttttttaatatcataattttaaaattaataatat

SEQ ID NO: 111787 - DNA, 3546 bp, Cannabis sativa
  modified_base (2766)..(2769): a, c, t, g, unknown or other
aaaaaaagttatcaaaaattaaactcagagtcctatttttactattttgaaaaatacaagatccattttgtcatttaacaaaacacagagtacaaaacacagaacccaaaataatatttacccttattattattattattattaaacaaaatcatcaattaaatgtttttggaaaactcaaaggagtgcacattttttgatgcggtatagaatgatttgaagcctatcaatattagagcattgttagtgggcactagtagtgtccaatattttttgtaggtagtgtcttacaatattagagcattgttagtgggcactagtatccaatacattttgtaggtagtatcttataatattagagcattgttattaggcactagtagtgtcaaacactttttgtaggtagtgtcttataattaattagcgacattctctaaaatatattttttaaaattatatgagactcaatacttaattaaactatatatagcagtataatatcgaggagggtgctagcaccaatatcatttaacgatctattaatattaatgtaagtgtcatagagtgctccatatacaaaattgtaaaaatataaaatttcctatatattcttattgagttgtttttttctttcctattattggatatttgtgatgttttgaactcaattttattttaaaacacatgtattgattggatattttggatatgatacaaaaatacattaaatctcatcaaattataactacatttttggagaaaaaatttggttttataaaatttaacaacaatttcattataaaagtgttgtagaaaaataaaagataaacattaacaaagatttatattacaaaattataacaatcatacaacatagttataatatgtaataaaaaattgtaccattacatttaaaaaaccgtaattaaatgtaacataaataattagaaagtttaaatatataatgcaattttttacaatatatataacactaaagcaacattataatttattcaaaaaaaacaacattataaatgtctatttaataacatgtaaaatgtaatatgttatcttcttacaatatataacactaaaccaacattatataagtctatattattacctcaactagacttaacttaacacttaacaaagtaaagaagcaaatactaatttaaaaaaaaaaaccaaaaagcaatattatcaatctattatagtttattgccacaaaatatatccatcattttattttgggatcaaccctaaaatggtgagaaggtttagtcccatctaggccttgcttggtggaatgagcaatatagtcctttactgtggtttctctatactttggagggttattttctgataacaactctttgatcggtcggtacaattttgaagtttgcagattacctgtgcagaagaagcctgaaatcgatactcgaggacccatatcattggccaaagctactctatgctcaacgcttttaaatctatcatttgttataagctaaaccaaaaaacaaacaaacaaaattaataacattatatttcgaagaagaaaaaaacagtaagaccatatatataatgaaaaaatatagttaaatttctatttttgcttatagttagaattaagtacatctagcataagtgaaagttcttgcttttttcttttgtttggataataggttaattctgtttttggagaatctaagatttctagtgtctacttaaattttaacgacgatgatgtgttaagagtaacaatacgtgtcacaaaaatactgagactaaattaatgaagaatatgtaaagtcatgatagttaattatgaagggtggtctgaccgttagcatgaaagtcagacaatcaccttacccctagattgagtaaggtgggtatctccgagaaggaaaaataatggactaacaccttcgtaagcggaatgaacaatcaccacacacccacatgccaagctagtctagagaatatatactattaccccttataccttccaaagggttggtctaggggtatactctcacctcctacaccctcttaatacaagtcatgcattttagatataatgatattctcagaggtatataaggacatccacattacaccataactactgacaacggacgagtgtcacccaacgaaggtggtggtcacccccctcaagtcgggttccgaggggttcacctaacgatggtggttgtcaccacccctcaagttgggtctgagggggtcactcaacgatggtggttgtcacccccctcaagtcgggtctcggggggtcacccaatgatggtggttgtcaaccccctcaagtcgggtcccaggggggtcacccaaagatggtggttgtcaccccctcaagtcgggtcccagggggtcacccaacgatggtggttgtaagccccctcaagttgagtcccgaggtcacccgacgatggtagttgtcacccccctcaagttgggtcccgggggggtcacccaatgaggatgtttatcactcccctcaacgaggatctcgggggtgttgccctccaatatgggcttcatcactaaaggtggttgaggaccatgtcacacccataaaagattctcattgttagtagctccttcaaatgttcaaatcggctcaaaatccgttgtcaatctacgaaaatagtaagatattatcataaaaatcagatttcaactacctccaaaagatttttggagattgatttacattagttatattattattattattannnntattattattattattattaagtgatgatatttaaataattaataagaaaggtaataaatgtggaaaaggttgttctaacttttgaggttaccgagaaataaacggacacttagagcagtttgtttggaaagattaataaatgagatgaaaaaaataaaaatagatagtaattattgattggagagacagggttgggactggaaaatttgggacatatgattttttttctaaaggctaagccaaacaagtatatttacctgaagaagatctccgatgttcacaactaaagctccaggatgaggagaaacctcaatccattgattgttattcaaaacttgaagaccaccaatgtcatcttgaagcagcacagtaagaaaatcaatatcaacatgtttggttattcccatagttagttctggttccggacatggtggatagtaattgcatataaccactaatccttctgtacaatctatgtcatgtaagtgattcggattcagcccaagagcttctgagatcaactcaaacaatagaattcctactttcatcacttgcttcgagtactctacaagtatgtctcttcaagtagaaaaaaaaaaaagaaaaaaaatgaaaaagatcacatattttagattgtcaaaaaatacaaattcaaaagtatgcatgtgtacctgcatacaaggggtaaatcctctggcttaggagggtcaggagccattcgaacaagaaaggtatccctccaatcagcagtgtaacgtccccgcttcaagcctcca

SEQ ID NO: 111788 - DNA, 2793 bp, Cannabis sativa
cccgacccgaacataaacccagacctcgaccctgacctggacactaaaccctgattcaaatccatacactagactcaaactcggacccaaaccttgacccaaacttggaccctgacccggatctaaccccgatccagacgcagacccaaacccccgactctactcagacccgaaccccgaccccgaccccaaacaccgacccggacccaaaccctggacgtcgacctagaccccagacttgaactcgaaccaggacccagatccagcttaagacctctgacctagccccaagttcgagtttgagtttggggtcgaggttcgggtcgaggtcaaggtctgtggtctgggtcggggtctgggattcgggtccagggttcgagttaagggtttgggtccagggtctggggtctaggtccagggttcgggttcaggttcaggttgggtttcaaggtcggggtcggggtctagggtttgggtctgaggcaaggtccgaggttcaggttcggggttcgggtccggggccaggtccgagtctgggtatggggttcgggtcttggtcctagtccggatctaggtccggggtctaggtccgagtctgggtcagggttcggtatttggtttcgggtccaggtttgggtcctggtacgggttagggtctaagtctgagtcgggtcagggtccaggtctaggtctgggtctagggtccgagtatgtgaaaatatgtaaaatataatatgttagacaaaaaaaatatttttgaaaataaaaaataaaattttgatgctttttgttttttagttttttaaaatttaattttttttgaaaaaaaaattaaaatttgaccaaacgacctctattattttttaaaaattgttttctatttcaaaaagctgaaaacaattttaaaattatgaagtcaaagaaatttttatttgcttttaatttttgttctttatttatttacttttttttggccgctagtgcaaaagaaactctcaatataactccgtgtaaagaaagctctcgtgttttttttttcttttttttttttttctgaaattgtgtaaagaaagctcttaaagcatgccatacacatttttatatatgtatatagttgattataatgcccaattagctatcttccaaggtcgtaaggttagtttagtgcatgaatgtgtagcttcatagctttccacttatataaatatatataatgtacagtgcatatatacaaatatatgggtacatagaagtagatcattttatagttaattaaattgatttttccattaaacaaaattggttttcacttttcacacacatttatatgtaggccaactcatatatgtataatgccaatgaagtctattagattccaaagaggcagcacaaaagagaaaaaataaaagaaaaagtatattcaaaaacataaagctgataataactaatgataagaaagcgagaggaagaaattgataaaatatatatggccaagaggcccaagagtagtgtttggtgagcttttgaattaatcctcatgatccatgacttacgtggtgcaattaataattgaattatattgaattgttacccattgggtggtagatgaatcgtcatttttatgttgtgactaaaaaattcgtgattaagatattagttacaaaaattataattaattgcgattatataattttttagttaaaatacttgttgtttcgaaactatattaataacaacttgtatctaattattatattttaattataagtaatattttattgtgactaaaaatcacatttaaccataaaaaataatgttgtgattaaaatattattactaaatatatatttctttttgtagtgggtgtaattaaaatattaaaggattgataggaattgcaaagagaaagaaagaaaaaatgaagaagaagaatactcaggtcacagtttataagtgaagttttccatgagcttgctgaaagatttatcagcgacacgtctcattaaaccctaaaagaaaatagtgttgttttctatttacacaccgtctacagaagccttttgttggtgcagtttcgaagcgctagcaaaagtcttccactttttttttttttaaaaaaatcacgttcttaaatggtgagaaattttttttgagaacgttcaccagtgccatgttattgtcgaaaaaaatgaatttactaccgaaaatatctcatggaagattattttaatagttttgtcaatgtctttatatgctcacaacgatggcaaaagtttttttaccaacgattgttagcatcaatagaatattgtttcccaccaaaattgtcatgtcttatggtgggaaacgtcttcctattttgttggcgcattagataattactaccgataatagcatatgttctgttgttgttgtctacagtcagtaacccctgaggaaagccctcaacatcggcaataaagagcaccagcaattctcatctcacaaataaaaaatttattttgtattttcttttagtgacatttctcttcttcttaatattattagagcaatgctattagggaccttatgatgtctaatattatactgatgtatcacgttatgagtggttaacaatttcttctattgtttattaaataaaaaatgtcaagaatttgatattaatttgtaccaatagcaaaacatcatttcttgtggtgtttggcataagcttcacaaaaacatgtcattggacctatatatatgtatatatttaatatatggaagaggtttcaatggttacatttttattgt

SEQ ID NO: 111789 - DNA, 4325 bp, Cannabis sativa
  modified_base (28)..(36): a, c, t, g, unknown or other
  modified_base (3373)..(3386): a, c, t, g, unknown or other
  modified_base (4294)..(4298): a, c, t, g, unknown or other
cataattaaacataaacaactgctaatnnnnnnnnnaactaagcgggctttacagtttttgtttaaacattgaagttaaggtattatcatgatcattatttaattttttttagtattattttataataaaaaaaatgttttatatatatatatatatatttttagtttgaaaatgtacttgtaaaagaagtctatagtaaagttgtcatgtaagtatttttggtttgatcattgaacgtaagatatatccaccatgattattatctcatctttttatttctttttacagtcgtaccctgcagttctcaaagtacttacattatgcagtaaatcttactaattttatttagtttatgattatacagtagtgtttaaagttttcatttatgtcatcatatatgtatgcatctttattcaatttagagagatgactcaaataaatatttttttctccaaaaaatattaatattaaagtttacaattcaagtttttaatttcaacttaagtaatatgtgatatatatgagtgagtactcaatagttacatttttattgtaactatcatggttatatttttcttttacctatagtaggttactataatagataaaacttcttcttttagaatcaattaattattttcttaaaataattaattaaaaatttaacaagacctcttttagtaattaatttataaataattttttatataaatctctactataattattttaacaattaagtcaattaattataatatttataatgaattttttttttttttttacaaaaattagacttctttttacacaaattagaattctctttttgtttaataaatttttaaataattaattatttttaaatgatattaaattattttttttataattagaagaactaagtatgaatttttctattcaagtttgaggttgtttatttcttaggggaacttaactttgtttttttgactatggttttgttttttgagtaaatgattccttataaaaaagagttggaggaatttagcctgtttttggaaaatacattcaacctatttcactttttactttttaaatatttaaataaaaaaacaatattataaattattattaagaggatcaaaacgttcattattgtgttttataaagtttagggtaaataccatttataatattgttaacagacttaacttttttttttattattttttaataaataaaattatttttttttgaatgattaataaataaaattattaagaaaatatgtaattagataatataattttaatattattatatatatattaattttatttataaatataatttatattaaatatgttaattatttttgttgatttaattagaggtttaattttattataaataaaaaatgaattgacgtgtataattttgattactttaacatagtatcttgattccctaaaaagtagctatattatctagttaaaatataatttgattgtacttacgaaagaaatgcatttgttgggttttctcatatattcaccagtttgcttgagaaagacgtcgatgcagtggcttggaatcgctttttcacaacattattattgttgttgttaggactggaaaagctaaacacatcaccatggccctttgcttcatccctttcttcctttgggtccttaaagcccacgcaacctctttcgaccccaaccaacaattcccacaaaagaacatatttattctcgctggccagagtaatatggccggtcgcggaggcctcattattaacgacgaccgcacccgcactcagatctgggatggcgtcgttccctccgcttctcgtccaaatccctccgtgcttcgcctcaacgccaaactgagctgggtccaagctcacgagcctctccacgccgatatcgacgtagcgagcgttgacggggttgggcctggcatggcatttgccaacgcggttctggctgatgaccccagcaacgggcccattgggctcgtgccctgcgcgataggagggaccaatatcagccaatgggaaaagggaactcctctttaccggcacatggtgaagagagctcgggcttcagtagctgccgatggtggaaccatcagagccctcctttggtatcaaggtgagagtgatactattcttaaacaagatgcagaggtttatggtcggagattggagaggttgtttcaagacattcggctggatttaatgtctcctatgctacctattatccaggtaaataaattataagattttgtaatttgatctcttattttctcgtcaatttttagatttttgttttgactaaattttatttttagatataactaatatccatatgtatatattgtatagtccttgtcagtactgatctagctatatagctataattatatatcaatccccatgctatatggttgtgtacatattcagttgatgttggagtatgtgcgtggtattaaatatatatatttatactgtactatatattaacatttatatatgatctagccacattctacatgttgccaacttgaatggtagtgtgaactgcgtgatgatataattttttctcgtaccatctaagtcatttttaacaatattaaaataacatttggaattgtaataacttattatttgtttattgagtatataaccgaaaataattagaacactattgatttgatgccaaactcaaacaaatatagatctgccaacaaaaaatatctcttatatagcttgtttatggtcattttacacgagttataatatatattcacttgtttttatttgttttatttatagtttttgtgatgagcttaatattgtgatccatatgtatataaatttgtgtgtaggttgctttagcatcaggtgtaggaccttatgtagatacagtaagagaagctcaattcgggactgaacttttaaatgtaagaactgttgacccaataggattgaccgtaggacccgataagttacatctaacgacggagtctcaggtccaacttggggagatgatggccgatgcttttcttaaattcctacctaagcaactctctattgattcaactggaacccaaaccacttcttcttcttcttcttcaacaatatttttcttttcaatgatgccacttataaccattgtcataagtaccgtttcattactagtataaattagctgcctcattttttttttcactacgtacccttttggccgtgggttcaacaattttatgtcgttatatatcttattatttgtagctatatgatttacatgtgcacatattattactccataaatttcttttttttttttcttttaagagaccataaactattaatatatatatatatannnnnnnnnnnnnntatatatatatatataaagctttcaaaaacagacacctaataaagaaataaaagcaaaaggatcatccatgtacatcgaacgtgctgttttgctgtaagttcttcatacatgcttatatatgtaaatgatcaaagcaaaaaaagaaaaatgttaaataatataagttgtaagatagagggtctaaatcaaaagtgtaaatatttatgtatagttggggtagagtacgtagactgaaaatcacaaagcaactaaagaacactttaccaatatcgatctaatttctcctacaacaaaattgatggaagaactgctgatattataatgcattctgatatagacacttgtccaaactttggatgactgtgatatatgcagtaccgtttcacctaccggttcaatttagcaaggctctagctagaaagttatatatacgaatcataaaatatatttatataagtaaatttgtcattatatattagtgaatgtatactgatacggtatttttgcatatactaataagtttttttttcatagcagtcaaaaaaacgactataaagatctactataacagaatgacatcttgttacaacaaacataaatttgtaaaagcaaaacagaaacaaaaataaatagtgcaaaatttaaaaaatttacacaaaagaattatatatgtggtatcagtgttctttcaaatacttttagttcacttctagtttacgggaccacgctcaaagaatgaaatcaattagtaaaatatcaaatattacacaagcaaatgatttaaaaaattttagactccatctaatgatttgatgtaaccatttgtaatccatcttgcttgtaacaccctaactagcataggcgtattgcgtgatttttaaacgtactgtccagctcgttgctaatnnnnnaggtttatggaaaacgtgattaattaa

SEQ ID NO: 111790 - DNA, 3416 bp, Cannabis sativa
gagtgttgggacagtactcctcgaacctaacctcactcacatgtcttttcactctcaacatagccgacgccgatgactctcgactctcttcatcttcaccgctcgaagagtctgtagcttcgtcgtctgttacatatatccttacgactctcaagtcatgcttcctcgactgagatgacttaacaactgtcaccgttcgatgctctgagaacttaactgaatccatttcttaaggtatctttaaaatgaaccagagactaattttatcaatactgaaaaatggaccatcgacaccaaaagaaaaagctcagatagagagagggaaagactatggagaagagaagaagaaaaatgaaggtgaatagttggaatttcagttcacagaaaatggcaggaatcccgtttttataagactatctttggtatcctctttttaccttttcatatttctatttttttcctaatttgttttttttagtttgtgaattacgtggttttgttttagcattaggaggtttaaaaagattttaagtttgatgttacccgtagataccggcttagaccaacgattccttacgaatcgccgcatcttggtttaggcattcgattttgacgcgtgtccgtacggattaattgtgtgccattcgatgatgtttgggtcccaagaaagctggcagggcttccacgctccaatcactctaatttccatttcattaccattttttttccttttttttttgaaaggaatttcattacacttaaatatagtatatttttttaaaaaatattttgtcaaaagatttaaagagtaaatatcaagtgaatgttattgtagttgcttcttctaattgtcgagttaagggcacgtgacgaccagatcctgtagcttttgcctttgcacacgttgcaaatgtcattcgtcacagtcctgtcagtcaaactttgacttcgtaccaaaattacaaagttttcatttatcccagcccataattacacttccaccctaataattaaccaccattattaatttccaaataaaagaagacttttccaatgaggaaatcagatagagacacataggtgtatttaatgagatcttaacaattaattaaaattacttgtcaaccaagaattagacttatttctcaaaaaaataaaaaaacacgaattagactgtttatattctctttttgtattaaataataatttacgcattagttagagcaaaaacaatcttaaccattgttacctaccaattattatttatacctaatttactgtcttgaatcttttttattccagttccaataatgtaacaaaaagttgttagtttagttgcgtgccaattcgtaattgtataattttgcatgaatatgattaaatcaaccattccaaagctctgatttgatagctgcctatgcatgcaattagatacgggaatactttttttcttttgggaataaaggaagttaagacaaagttgtttgtagtatatatcaatctttataagaacatatataccaccatttcaaaatactgaattactgatcactcatttacatgaactagctacatattcatccactctagctaatatagctttttttttattctaatatttatttatataaacaacatattgctgacctaaaatattgtaggctagctatcttatttattatccatgtggacactctatatatatacatatatatatttttaacatgctatctcggatggtataactttactattgaagataaatttgatttatgtatattgatcctatttgtcatttgtgatattgatttgccattttggcttatcaaaatttgtattggatatttggtccttcagtcactaatgaaaatttcactttgtagtttgtatactcaaaaataaataaaattattgatagatatattataagttataactacgtacactacatcaaatattaattaacacaaataagataattttttatttattagaaaataataataattaggtagtctaagattgtttatatttcatcagcagtaatactttggtattctcgttagtaattcacttattaaaagttgaagcactaacaacatataaagacccataaatgtaagcaaataaattaagggctgtaacgtagtatacgtttccatgtagttaatcatgtttgagtaatagatttatatatacccacgtcagtatattttaattaatggaaaggaaaggaagtcatatgactttgtaacaatctttaattaaaaaaaaaaaaagagtatcttttgaattaagaaaaaaaattaaaaaaaaaaaaaagagtaagtaattctcaacaaaattgtacagggccgcgagcgagcaacagcgtgattgattggaccgtaattgggtctgataaaaaagaaatggtctggactggactggactgaaaggtgtggctagggaagatgagaagttaggtgggaaatggaaaagaaaccttctcacactcacactcactttatttgctgactcttttctcatttatttcacctgactttcccaattttatatattttatgcttcatttcttattcctaattttataaatagaagaaaaaaatccttacaagttcatagaaatggtatggcaatggtagagtagaaaccattagaaggtgtctgatcttcagttaatgctatatgactctacattcacaaggcagtgggccttataattgtatcatttttcaaaactaatacatacaaaattgtcgttattaattgatcagaaatatgttttttttttccttaaaattattcaatagtatattaattttttattccgtagtggggtttggttcaaagtaagttacagttgatatgaacagatcatacttctttacatgcaattggcaacttgcaacacttgcttttttgaccaaactccaaagagcaaatatttggggccctgttataacgtctagtgttacgtgataaactactagattgtataggtataaaatttaagctgggtgaactaactttttataaggaagggaagaaaaaaagaagataattcagccttatgcatgggttattcttcatgtcgtcaaaaaataaaaatggtaatataaaaaagcaataaaagatagagctacttttgcatttcaattttgagtttatatttcatcaaaaaaaaaaaaaaaacacacaaattatgttatgttactattaatgtttctcacagtcacaattgaattgctatttgaaagttgaacagttaactttacaactaccacattttcttttttttttagaaggatttaccattttctttaatacatataaaaaaaattgaaaaattctacaatgcacacccttaaaatggatacattgatgtacccctatctgttttagcatccgaaata

SEQ ID NO: 111791 - DNA, 4102 bp, Cannabis sativa
ggaaatgcgtgaggaaaaggtcgataaaggtctcccatgtcgagatagaagcctcgggaaattggctgaaccaatcgtgggcattctcttccaatgttgccacaagaatgtgacatttggcgagttgaggtacatgatccacttccataatagtattgaatttctctaaataatcaatgggatacaggtacctttgtattttagggattcggataatcggaatcccttagggagctgagcttgtcgcacttccacagtgaaaagggaggtcccatgcagcttgtatatgggctttctctgctactcgagcatttttaaagcctgcaggagcatgctttggtcaatacccccggctaagtgagcagtgaccggtgcggctgtaggggctgttgctattgcagcgaggtttgctgggattcgctaaaaatgcgacaagtgccagaagcacacaaactacagctggcattcccccactgagctcaccagcttgaccagcccttggcccttttccgtgtgggggatggatctactaggagccctaccaacaggaagggcgggagcgaagtacgccattgtggcagtggactactacaccaaatgggtggaagctgaaccactggtgcacatagctgccaagcatgtagtctcttttgtcaacaagttcattatttgtcaatttggagtcccatataagattatcacctataattgaactcaatttggagacttattgggagcttactgcgatgaaaggggaatacgctaacgatttttggatgtcgtgcacctttttaggccaacggccaagtggaggccaccaataaggtaatcaagaaaaaactcaagaccaagatggagaagctcaaaggggcatgggttgagaagctccccaatgtgttgtgggcttataggaccaccccatactaccaccagagaaaccccattctccttggcttacgggtgcgaggctgtactctccatcgagatgcagataaactcccactgggtcctaaaattcgaagaagcaaggaatgatgaggcattggcagagaacttagacctgcttgaggtaaagagggaagaagcacaaaagacagtggttgtgtatcaacaaagagcgaccaggtattacaactccagggtgcgagtacacgccttccgggtcggggatttagtgttgaggaaggtcctcccaaatacaagggatctgacagcgggcgtactgggggcaaactagaaaagtccttaccatgtagcgcaaatcattcctcatggaatgtataagcttgcccacacaatgacactgtggtaccgcgagcgtggaatgctaagcacttgaagaagtattaccagtaaggttgtgataaccattgttagagactgagtaaggagtttgttttctttaagtaatttatttctaatcaaggaatacatttgaaatgtctcacattcccatgtaatttgagtataatgtaacactaaattttgctataatgcatggtatgacaagttttagtgagataattgtgcagaacaccaaaacaaaaagcaacatacctcgagcgtctattagcaccagtgctagcataagcctgggggagataaaatatatataaaaaaagagagaactctcaagattatggggattagctacccccatcaatctaaggaaagagaggacccggtaagggcatacaaaaaaatacatgtactcctcagagtactcaaatcttaaaaaaggggaacaaacaatgaacacgtgcaaaaggtcaattcggctcacggaaccatcatctcccttaaaataacaagagattaaggacaaaaagcacatcacaaagttcttaaatgctcccttatcaaagatcacacaacaaaagaagcataattagcaaaattcgataataagagtaataagcatggtgggagtagctagaaaaaaaggtacattaacactcccttaaaattcaccaccgctaagtttaaaaaagacagggaagcaataaaataagcaagtctagtacattcatccaacatcataaaataaagacacccgctctaacatgcctgaagggtgccaaattaataaaaccgatagaaaaaatcaacactcgcctcctccaaattgattaaaataggatttccatttggctgctcgctaaacagctttgggaccgaaggagctaaagtcagtattagggttcgcacgccacatgttgtaaagggcttgatccacaattttgctgtcatgcacagctaacccttggcagatctccttcaattcttcttttagctcccagatgcaagattaaagctcgccgacttggctctcaagtttcctcttgctcttgtgagcactcttaagtcgatgcatcactttctccctctccttgacagccttagctagctgcgttagtgcatcatcccactcccctataacctattaagcatcaaggataattccacctcataatcaccatgagcagtgagagcctcagccgcttgtttttaagcttccattgccgtgctaaggtcactttccagctgcgaaatgtgagtctcatgggaggccaccaaagcagacaatcggtccctctctgctttagtggactccaaatcaccatagagcattttttaattagaagagaaatcgaaagctccaccttgtgagagcacttcctgagatgttgctgccatttttaaaagggtgtccaaacaagggaagaggttagggtcaaaaagtatataataacatcaacataatgacatagtcaaaaaaagagaataaaggggaggagactcacccagatagaggagcagagtagctactcgcacaggcccagtagggaacacctcgaatgccctcttaatcttctcttgactgttgggacatggattgctatactgtgccggcataatgagacccataggactactcctaagatatatttcttggcacaaacgagggcgctgagcctgaaccaccttagccagaagtgaaagtctcgttcgaacaaaagcactaagtgtgggtgcctgatggtgggtaggaagccaaaggcaccagatgacccggccaaaagacaggaggatcgtaatatccctgctgctcatgtattagtgggtagcctaagtgatgtgagtaatccctctagggatcctactccatggggtgaccgctccctacttcagtaaaagtagatgaaggggcatccttaagttgattgggcacacttgactcaacctgggcaatttgaagagaagaaactcgacgcttcgaccgcctaggacgttccctccccttcttttaacaccgaggcctacgcactggctgcttgatcaagatgggggatgtcggggaattcgaccccctaaataagttgggtgcgctagtgatctagagtgagtggggggacaaagtcaaagcagtggcaatgggtgtagaaccatgactagcacccaattgcgacaggttgggaggagaaccaaagggcatggagttccaaagtccaaagctaaccctttcttctccccgagaagggccctatgaggaagagctaactgagggccgtcctctaacgtttttcttaaaaaaaaaaattagtcttggccagcaaacctttaggcgaaggctttgggtgagtggcctcattgtgatgggtcattggcacggctagcttctcactcgaggaatgaccccccgaggattcacccacaacatgggcttaccaatgactcacaacaatgttacccaccgtgtcttcagccgaaccttctgcatagtaccctccttcagtgcctcgggagaagcttggtctaacctgacatcagccccggccgcctctttagcctccaaagcagtctccttgaacatcatagcaagtggtataaaatagaatcaatcagcctttaacttttctcccatcaaaatcaacccgctcttgatgacgttaagcaaagtcaagagatgatggtagagctttctgtcacaatcaactctgaacagcttcaacaaaccagaagagtactcctccttggtgttgggaatattttaccaagatctagatttactaacaagttgtttggaatattttaccaggat

SEQ ID NO: 111792 - DNA, 3935 bp, Cannabis sativa
gagcctatacaaaagtattaactgccaaaatttctaagagattaagttactactaacaagacaaccacaagaaaaccagcaaatttgttttcataacttaattacagaggaaactgaaaaatagaggtgcaacccatacacagagcctacttacactatcatgcaggcaatttagcacatacttgtgcatttgactatgtcaaccaacatgactatgatttattcaagtgtgtgcacatggtcaagtttggttatagtcatcatatttactagagaacatatttttagcatcaagctaacttatttatatcacgtgaaactttatataccaggttaatttcatcaactcactttgcagaagcaatatgcagtgaattccttcaagataaatagaaaaatccggcatgattgaagttgaactatcttggtttgcctgcatcaaacaaacatacaagctaaacaaaagttgaacatgcgaaggttgacatataaaagcctacagtttaagccaacatacctgttccagtatccagggtatccatgaatacatctcctgaaagattataagtgccacattggtctgtggatatctacagaaggtgatgcaaagcatgctaagagctgttaaagctagatgtggttttaaagaacttgcactgacagctggagattttaaagatttaagtaaagaaagaagtgaagaatgcatattatgtgcatagtcttctctttcacaagcaacaacaaatgcatgtttttgcaccatctgattactgtcatcagaagctataatttccccatccaacttctgccgtttggtctggaaagccttattatcgtgaatgtgtctcttttccccaacccttgtgtttccagcagatttgtcacttgatagtgaaaaatctagatttctacaactagtcacttttcctccaacacgatcaggaccaagtatggaaagagctacttgaaggcagtctataagggagaagcatggttctggaagagaaagtgtgtaaagaagtgactcaggcttccatatatgaggaggacaagtttttgcaatgcgaatatatgcagtgcacattgcaacctgagaaacagaaaatgcttttagatctcagaacaaaacaatctggcagacctatcagctaactgattaatggtgcacaatggatactatgctgtgttcatgttaaaagatggaacattaaccttaagctcctggcttttggttctccttattgattgaggaaacacatttactaaatcagcagctgttaacttaacaataacatcagagcaactagagtgtaatgcattcaggcaaccacccaatgacgaatcataaaccatgtttctgcagcatagtgacattgttagagaaggaaaatattattgttccagtgaatttctaaaagagatccactaacaggatgactgattacaggctacagagtaatgcacgtacacggcttaaacatagcctaaccactaaaaaataagttaagcaattcacgttgcattattaaatatggaagttctataccagaaaataacaagttcttccaatcaaatacctatacacaggaagcccctctttgtcctcacttaatatagtggatatcgattgaattatattctgatgaggaagaatgtcaaaatttactgctgaagcaatgatgcttgccaagtcaaaacatgcctttaacaaattcaaagtgtcaaaatctgttaaaaaatctaaggaaatacacgtataaatcagacagaaaaaaaacctgtatataaatctagtattaatacattaaaccgtaaaaacgataacaaatcaatgattacccaccacatgcaactctgcatctccataacataacaaagagcatgcagccattacaaatgatacattaaatagtccttctacatatagagttccttctgtaatgcattttgcaagaagcctgatcatccaacttgcaaaaggttgccacctttctttgtttgataggttaatcaaaataccagtgccatctgttggtttgttacatgctgcaatatctcctagaagagctggatcatttgaaatctcatcaaatgacttaatgaaacaccttaaagttaatctagtgggttctgaagtgcttgcatggtcagcgcagaatgatgctagatagaaaatatctgcatgagagcaaaggtgtataagattatatgccttccaaagtaagaaatagaaaatacgtcacaaaatatttgagagatttatagtatgtgaaagaaggctgaggcaggcctaaacactctcccatgtagcagagtataaccaaatagtccatctggagagtaaaaaaaacttatatgacttttacctcccgattcaatatgccgagcaaagattgtcaaaagcaattgatcaaaaatcatttcttataccttcaacaaccaacatggcgtcaataaaaaaaagacggtaagcatctcgtgttccagtccgaagcaaagataaaagtgaccccacggtttcaaaaattacaccatgccgagaactgaaatgaaagatattatttgagcctatagccattagtaataatagcaggcggctcaacatgaacaacaagaaaaaagtacaaatcaatcagaaaaaagtaacaagtaaacaaaaaagttataaacgctccccaaagaattattgttccgaagtatatggttgccttaccataaaatagaaacttaacagtcatatgaagcccgggaaccagtaaaagttgtaaatatactttctatcaaagcgcatatagcttaaacttctcaagaatggatataggaaaccacgttggagaaaaatatatatatataaaacagaatcacacacaatgaactagcatttaaattactagtatcaaaaattaattctgttaaaaaagtctgctggggtttctaagaactattcatataaaaattcgaacataaattagatgaagagttcagaaatcgtcatcaaactacaagttttgctctttgctagcagacaaaacttaaaacatgcataatctaaagaccgtatgaatcatactgaaaacttctctgctccaaccaaccattcaatcacagaaagttccgttgcttatctagtagtttagcaaatacatagagaagtgtttagattttagctaacacacccaggctgccaggcacttgcatgcatacagaacttgagtttccaatttcacataaatagaaaccaataacgttgtcataactacgctcatcaaaatttcacacaaagcaagttcatgaatgtgttaccgaaatgcgggttccgctaagaaaggcagaatccgaccaagaacaggtaaaatagagctcgccttcccatgataaaagactccgggaaaaatcttggcaatttgggtaatgagcttcaaaatagctatgacttctttctcggctgcatatcatatgaaagaatcccagtaaaaacttacaaatttttttaaacttctttaaataatgattaacgagtggaatagtaattaatttatggagaaccaaacgtattttaagagaagggataagagagaacccgagggtgagggaacaacataggcgtagagacaaggaagcaccgcacggaacctaacattgacagcttcatcgtctgcattggaaggaggagaggaggaagaagcagcaatgcgttctcggagctcgtgaaggagactgggcaagttggccatgccctaaagcatctgagcgtatttcctttccttctctgtacagtaccaatttcgaaatgaccagaccagtagtagtgtagtgtgacgacagttaagcttttatactattcaaaggccgcgccactttatcattcccgtccctgcctactacctataataaaacaagggaaatttcaatttttgaccctaataatacaa

SEQ ID NO: 111793 - DNA, 2318 bp, Cannabis sativa
atgaagaacgatgagattgctgctctgttcgaagatatgaaggcaagcttcaaggaattctcagaagctcagtcgagacaatatcctaagatgttgcacaaccatgaagtcaaatacgaggaaaaaattgctcagattccagctatgtttacgcacatggctaattctcacccaaataacgaatgtggaagttcaggaataccaacccctcgacaaacgtactaccatgctactagtgatagagatggtgatctcaatagaattcttaaaaaccttcatgtaaaggtagtcaaatttgatggatccaatgtggaggattggatttacaagatcaaccatttttttgatctggatcaaataggggatttcatccgcttaacagtggtgccattttatttggagggggtgtcgttgaagtagttctaatggatggagaagagtggttcattttatgaattggaatgtatttcttcaagccttgcgaatgcattttggagattcattatacgatgatccccttggtcgtatctcaaagattactcaaacaggtcatgtgtctcaatttcaatctgaatttaaagaactgatgacaaaggtaacttgtgtttttgagtatttactcttgattttttttgtttggggtctcaaaacggaaatatgcagagaactcttgctctctaaactggtggatttagttgatgccatggctaaggcaaaactatttgaggatcagaatgacgatttggtggtgagtgcgaagggggatgcatggattttgatctggttgatcccctcatactatcacttattcatctccgtcaggcaataatacaggtagttcatccttgtataactccacaccaacaagcacttcaggtcccaaatctttcaaaattggtaaaacctcattgccagtaaagaaactgacccccactgaaataagagagaagctcaagaaggggctttgtttcacctgtgatgaaaagtataatgtcggacatcgatgcaagaatcgcatcttgattttgtgtggcacaagggagaacgattctgatactttggccttggcagatcaagatagtggtgaattagatgatgccccaatggatgaggtaagcctaaataccttatctaatttggcgaatccacgaattttttgcttaagcactaagcatagcacagaatcgttggaagttcttattgatactgacaagcaataataatttcattcaagaaaccttagctaatcgtttatgattgaaatgtgatgatgccaggtgcttcaaatttccatgggcaatggttactccttaatgtgctcaaaaatatgttttggagttgaactgtggttgcagggatatcaatttgttgtggatttgtatgtgctgcctatttggggtcttgatgttgtgttgagaatgcaatgcctccaaactcttaggccttgttggcacgatcataaggctcttaccatggaatttcaatagcaagacaaggttttcaagttgacgggttcaactgattcgagtgttcatcctttgacattcaatcagtttcataccttgctcaatgaaggagaggttcgagaggttactgcttaatgacagtagcgaaaggagacaattcctcagctgcagacaacaagagttgggaagataacttaccaagggaagggaaagatttgatttctaagtttcaagaggtcttcgaagaaccaaagcaattgcctcctcatcgaagtgttaatcattgaattttcctttagccaggttctgctcctgtcaatgtgaagccttatcactattctcatttccaaaaagatattattgaaaaaatagtgtgtgaccttgtctctcggggttttacaaaaactagtactagcccatactcttcttctattttattagtcaagaaaaaagatggttcattgcaattttgtgtggattattgagccttaatcagtgtgactgttaaagatcactttctcattcccaccattgatgggatgttagatgaattgggcggagctgagatgctttcaaagttagatcttagagcagggtatcatcaaatttgaatacacccaagagagaccgacaagaccatttttagaattcatatgcaccataaactgctaacttcccaacatttttttatggcctaaggagtccgagaaaagcttaaaacctcttagcaaaagaatgacctatttaaaatcccctttacaaaagagtaacaggtcatcagcaaagcaaatgtgattcaagtttaggcttttacatctcgtgtgaaacttgaaaaagttttttttttttttt

SEQ ID NO: 111794 - DNA, 2670 bp, Cannabis sativa
gccatggaaaacatagtaaaggccaaaaggaaactattacgtctttggaattggaaatgagtatcatcttagtttcaagtttaccgttgccttgctcatccactgtgattccttctctctacaactcaactccttcgaacccatcactcttttccacctcagctcgattttgtcttcgtcttcctctattttctcgccatttcagagttcctaccgcagccaaaccatcggccatggaagccgtctccaccgagcatagtggagccgccgataaccaaagtgactctccattgatgaagctcctcttcgtcgagatgggtgttggctacgaccagcatgggtgagtcttcagattatagatttcatcgcttttcactttaaaagtatcgatctttaattaaaattaggtgaaacagccaaaatatcacttcggctgcaatgcgtgcttgtagagatgccatttcttccaattcgatccctgcttttcgaagaggtattttttcgtcaatgcccaatttgggtttcttcattataatgtagcatttgataaatcttgttgtcattcccgggatgtaaagtgattgagatatatggttcttttgtgggttataattaaatacattttgggtagcttaggtagttcttctgctagaatttaagcagacattgatgttaattctgagattctcttgatcacaaacaagatggatacaagaatgaagacgaagcttaaaactgaaacatgatatatttctatgtagtttggaatcaagaaaaaaatgttttatccaaggcaaggcctagttcaaaccaatattatatgaagcaggaatagacctagtacaaaacaaggttctgaaaatcctcattgtgctcaaatattgtcccatcctttacaaggacttattgacatgtattcctaagtgtaggtcagagtcgaagaaagccagttagttatacacttggctgctgtccaagtaaatcctaattattaaaaccaacacaattgactataactgatatgtaccaaagtagagtcatctacttcatgggtcttgtgaaggttcttggcattgataggagtgctttgagatttgagtttgatgattagtatcatgttatgatgcgacagtcaatgaagaattgtttgaggataatcacaccataaaattttagttcaacgttccgaaatttcactgaattgatggtttttggtctggtttaagattttaagtcttgttaagctgttgttttaatgtttttttttattggaaattatttcactgctaattatacagtataaatgcagggtccatacctggtgtttcatttgatcaaatgaaattacagatcaagctgggagtgccgcatcctctccaacaatctttggatattgaaaaagttaaatcagtttttccatagtgagtatctttatatttctataacctggatgcagtagtttccttacctaaactattaggaagttattttgatcattcctacgtaatcactcaatcaaagaggatgaatatctttcaaattttcattaaattgccttagcatttttattttcattaatttgtagaggattaggctttagaatttgttgaaccaaattaaaaatataattggaacgaattaccaaatgtatttttgtggctgagtcgcggactaagtcgctctctttaagacgtttcgcggttctgcccgaagtgtgcacggtagtctagcaaccatagtgtctccaggataaaacaacctctgtatgtatataattcattctgcaccgaacgatatcgctctgaaacaccccaaaaatatttgctctgagaaatcataaagagattgaacagaaaggaattttttgtgttgaaaagttgtattttgctgtaagtcaggtgcgacttaaatagatgttaagtcgatcaaattagaacggttagaagaacgttatttcaatcgtggttcatgggtcattagcagttaaaacgtatcacgtttactgcttctataaacgcgtttaaagaaaaataattaattaataaataaaaatatttattaattaaataatttttttttttctgtaaaaaataaagtgacatcacaacccgtgcgccaagcggcgcacgcgtgtgatggtccggtgtgtgagtcctcacctattcgcacaaaattgagtgacccttaggtcccaaacccaattctcaaagttacactttatatacactttcaaggaagtgttcctatcccaagtgcgactcaaatcaatatcacacactacacttctcaaatttttgtaaaattttaactaagttccaacaatcccccacttgaaaatttttttaatatcagaaaactataagacagtgcttaaataaaaatatctttcgatttgaatcttagtgaatacgatttatattttactagagtgacttgaagtcttgaactctatctttaacatcgtaccacgcaccattcttttgaagggtgtaatcaaaaagcctgtgctttaatggccatgtacgtctatcccagtatggtgaacgttttagaaatttttccccaaattccataggaagtggccccactcccacattcacataggtgagtctatcaagagtactcctgtagctcggtactccactccacatagagtatagatctcattaa

SEQ ID NO: 111795 - DNA, 2736 bp, Cannabis sativa
taatcatatatgttacagtttatacatataaatgtctaacattactttgttaccaaaaatctcaccatttttggaactatgttagaattataataatttagattagaaaaaagtattttcttcgattttatgcaactctcatgggttcgatctcgtgctttacaatctctacactgcaataaaaatctgtgtgcttgcgagttgataaatttaaaatgtaccatttttggtccaacaatggctgtctccaagagttcttctctctaaatctttgtaatgtcttatagcgcattcaataggatctgttgtgctagaagagatttgaccttccttctccatatcatgtaatcaccaaatctttcaaacctatcaatatcaatcttcacattattcatgttattacaataaaaaatagatagagatatagttagaggtatttctattagatcgttcaaaggaacatctattaagtcttcaatgtcataaactctatgctggagatcaacttcctccagcttttgtttgatttttgatcacttcttgagttgaatctttagccaatgtctgactctgatactactggttggattagaatactcaatccctacactaactcaccatacacattagatcatatgatcaagatcataatttgacctttgcattcaatcaaacaattaacaattatgagatgcaagatttctcatacacattcaaattataatctttaaacacaaactgatttgatcaagcttcgagggattaatttacattcaaatcggtcagaattagcaattcaaacatgaacaaacatcgcaatcacattaaagaaaaataaacaaaaatgcaaaaagatagaataaacacagaatttttcttaaagttcaccctaaatcatagagtttcatccccgttgagcttgccataggaactgatttgctttaatactataatcagtcttgaattacatcaatggtgttgaggattccaagtcacaaattgactggtaattaatctacttgatcacactcgtcctctttcaatctttctttacaactttctccctttccctctctaattaactccattttatttttctctctctagctctcttggagctcaatttgctatttatagaagctttagtagttaatagagttagtttagttggttaggatagttaagttgccacccgatgcaactgactctaagtgagatagtctaattatttttccgcatgttcattgagcttgtaaagggatttaatccaacaagtggaatattgttttctttcttctgtttttgttttgttttgtgtaggattgaatttgagatctgaataaattatggaatggtatggtatttagattttttttttcttttcgttagggttggtgtaaaactattttttgataccaattgcgtcaattttaaaccgataataataacattttgatttgttagttgaaaactgatgccaattagtaattgcatacacgtcaattctatcggatgcttttgccataaatgttgctccgaaacggacggttttcggttgtagtgtttactccttttataactcctgtgggaagaggtgtagtgtactatgaccatcgttttagatataatatgttgtaggtgtataaataatgtattaatatatattacttttaataggaatctttagagttacacaattacacttatgaaactagaatttggtcagattggagctatatatatattgactttgctacataccataccagtatcattatggcatttatggcagtctatgatcatcatgtgcaaacgaatcaagttgaaataaatcaaatatataaatttatgccttcatacctgtttctttttcattattattacctatatatttcacgtaccattttctatgacaaagaaatgaaaaagtcagctacagcctacagtacagctgcagagaattagatataatttagaacaaagtcgtatatgtatcccaaaatttgggttgattttaagaattttcgtagtaggtttcttctttcaattccaatccccaaaatggcaacttgattcggaaaccatttaaatatttatatatatatataccattgacacgttcactagtgattactacaactctctccctctctatctatttatatatatctttccttataaaacttatcattataaacatacgtatcaagatacaaagaaagccgagagtagagagagagagctgggagagagtttattatcagttctatcactgaaaaaaaaaaatcatcatgtacgtgacaaaggctctgtctttgcttagaaggtgtcctgagttagtgagttcagcaccaaacgagggtccgagttctggttatctggttctcttcgaccaagaatgcgaaacgacaacatgttttggattgtgtaaagaaacgtcaatggagggcttgccgtttcctcagaacaaggatctatctgtaactcatacaacaagcaatggaaacaataacagcagccaaacctcttacgatcaagtggttttcattccagtgcttgatcaacctttgtcttccaatcgttactacgtcattcgccgccaaggaactcataaagggtattctttaaaggcttttttcgtaaatgtacaacaaaaacaaaaggaaaattttatttacaccccaaaattttctagaggcaccccattttaataaattttattttatataaaattta

SEQ ID NO: 111796 - DNA, 3693 bp, Cannabis sativa
  modified_base (376)..(378): a, c, t, g, unknown or other
  modified_base (3542)..(3550): a, c, t, g, unknown or other
gacaagaacttggggcttacagaagtaaacatctcgactcatagatgagaattttataatcaagaagaaaaccaagaactcttaaaactgtccttggatctacttgatggaaaaagtacttagtcgcaagttactaatgcagcgtatcaacaccgagtaacaagacatttcaacaaaagggtcaaaaaaaggctattcaatgttggagacttggtgctaaggcatgtctttgcaaatacgagggatacatctgcaggagtattcaacccaaactgggagggtccttatgtgattgaagcaatagtaggaatcgggatttacaaattggctcggctgaacagctcgctgataaagaactactggaacgtggaacatnnncgaccctactactagtaaattaatgattgtaactcatatttttgatgtaatgttttgaacttcagttatgaataaagttaattatttattttttcaagtaattacaaagtgttactccttaaaattacttgatgagcatatgtgtatgattaaccggaatttatctgaaaatacatggtatagtgcaaacccacaactttaaatttttttgaattatttttaaagtttttgatcagacctttctaacgagaaagggatcaaacaatcataactttttgattaaaaacctgtctgacgagaaaggaaaatcaaaagttataaatgagacataactcataactcgcgtgtgaagttgaatattaacggctcgcacagtataggaaagtattaaataagacatcaaggtgtcttgataaaagtacttaaacctagtatatgaatagacgacctaactattcatataagtaatcaaaaatatacaaactgataaatcattaatagtatattcaagtttgcttaagatagattataactgttactgcgagacacaattgataactgctcataaatcaaaagcttggcagataataaactgctcgcgtgcatagtagagtattaactacttgaataggaaaatatgagaaatggaaagaccaagggtattctgcatttgattaaaatataattgtttacattgtgaatgaaaacgcaagcaaacataaatatattatgttcgaatgtaaaggtacatggcatttaagataaaataaaagctaagttggccagctaacttcacaaacttgtctttacaaattattgggccattttcctaaacaaaacaaaataatatatatacaatacaagtctacattattataggggacttggtgagattttcttgttctgcttcaaactcttcttcctcgccaagatcttccttccaagtcttctcgcaataagcaagcatggtttcggccttgtcacccaaaaaactaaagtctaactcggggttggctgaccaaatctgatagatggtcctcctacctatattgttgaccctctcttcgaatccagcctccaactctttgagcttttgatcatgatcaacctgttttttaagatcagcttgaacagatttaagagaattctcgagttctttaatttttttgttggttggcttgatgctgcttttctgcttcatccttagtgcgggaaacctcagcttcagaatcactccacttcttggctacgacatccctatattccctagtttggagaacctcagtctttaacatctcgacccgttgagatgaccggtgatgtgtagcacaaaaaagaaaagaagcctgaggagaaagggcaaattgaagttagtaagaaaggcagaataggggagagtgagaacgaaaaagtatgatgattgacatgatgtagaagcccataacttctttaggtcaaatccttggtattaccgcgaatagctagaccccaatcgcgagacccaagtgtcaagaggttgcaccaactattagtggcatgttgtgagcttagttgtgaccctcaatcccaacttcgaggggtaggggacaggagggctcgaggagaaccatctctagtcaagaatcagaggacttgacctggtgtgccgacctagtaggttgcttctcaataatccctgcagcagacacctcaatccctacagtagagacctcattcccttcctcgagagatttatcaacatcaatagtaagctggttcgaggattttctcatgttggccttagtcttggttcttttgggttcttttgtagaatctgagacctcatcagcttgggctaccttcctcctggatctcttgtcggctttgggaggatttttgaacatgctctccaaatctacatccattcctgcgagacaaaaggaattattaacattcattcaaaaaaaaaaggtaaaaaggaagaatgggatttgattccctgcctaaggaatttaccataaccataaggagaagaagtgtcactagaagattgagtagaagttaaaatagcaggtttagactaggccgcatctcgtaagaaacgatgtttgccttcgaaaatctcttgtaggaatcgccttaaacgacaagcagtctcttcttggtttggcttaatcagatggtcttcaatcctggaatcattccctttcaatttggacttaggttcacaatatttgggtgtatatggggaggttcaatgtttggtatattctgatgctacaaattttggaggataaatttttgaaccagaatggggcatcttcacgaaagaagaataatcccaatttttggatgaaattttccaaaccatgggtttgaggaatatagccaacttaaactatgtctaattccaaaaaaaatatgaactttagatattaaaccgaatgaggtaatgaagcgtaaggaaaatcatcacttgagtaaaatcaaagagaaaataaggtactcactgtgtgacgttgaaaggctgaacgctaaaaaactctacaaatgaagacgtgacagccaacaagataagtttttcaaacaccaggagtcgaagggcaggtctaaacaaattcacaggaaaaatttcaaagatagggatggcatgcaatctcttagaaaatcagaataaaaagtcgtcagaaaacttaagtttttgagaagatggaaatggaggagaataaagtcttaccattttatactttgagcccagtaacggtaaggtcaagagatggaagacctaacggctgggaacgaacaagaagtggaaaggacgggtcattagtgctaataatgaccctcgaaaccatgaagctgccaaaatcaaagtcatgcatattttttaaaaaaaagggattatgacgaatataccctctatgatcatttaaaaagaacttttgtattaaaaagaactttttaaggggcaattgttatacttaaaattcggctagcgcttcagagaaggacacacgtcaaaatgagataatacgaatcgattaataagttgggttttgtgccctaaataaaatccatttaaatataatcagatttactaattaataaaagatcgaaaattgcattttattttgcatggttcacatgatttatctcatgattatttataatgtataaattctatnnnnnnnnnaacatatataaatatgtatataatttgtttatgattatagtgtcgttagcacagtcgaatatattcaggattatatgttcaaaagtttaattcccataatttgtcactttactggatttagacttgcatgataatcagtgata

SEQ ID NO: 111797 - DNA, 1669 bp, Cannabis sativa
aaaaaaaacaagtgaaaccatatttttattatctcattgccatacaaacacacaaaattataaccaaacaacaacttaacacagttcaaacttgactagaaaatactaaattaatcacacaaaattaaacatttgaaataatgaaagaaaagaaaccataactaataataatttgattaatcaaaaaaactttcaaggttgaggaaaagatccgaagaaatcaccattggatccagtattaccgaaacccgggaatgtcccaaaagtaccactgtccccaccaaagctaggcaggcctccaatcgaaccgccaaacacacccggtagcccaccgctggccgggatgctcccgtcgccattcccggtggagccagcaaaaataccaaaggttttttggtcattaaaaccggccgcgctagcctgattatctgctactactacttgatcatgatcagtagtagtaggcaaagttctagccgtaattgttcccatttgaacaattacaaataatgaagaaataaccgttagggttacaaacaactttgccataatttaattttttttttcacttgatatatatacttagcacagttaattataatatgtattattttgtaatataatatattgcttgaagtgattcaaataatatgaatcatgcccttttatagggatggaattatatgaatatgatcgtggttaataataattaattttgtgttgaatgaggtttaaagtatgccaggtaatatcagctcatcatcttattaatttccatatctccatgcatggaccatattatatatattgatgttatttttgttaaacaaactaaatatgatctcgtttgggagagtagtatacgtagaataataataatgaattaaaatatcaaatatatcatctatttaacaattatttatgtacaattattttatttataagttccatttataaattaacaaatatattggacattttttacacaaatattttattgtttttggtttattatatatatataaatagtattacgaaagtgatattatattagtaatataattttttgaaaggatattagtaatataattagatacattaaggatatcttatatattatatatataatatatatttatgctattgttggttcatattttttttaattaaggatacgtgtcattatttgctttggaagggagatgagggccaagacccaaatgggtgactgtcgggttgagtatgggccaccgaggagggcccatagtctcatcttttgggctctagtgcctaggtcgtagttcttagtggattggctcattgggccgtgaattaggatccgagaaaacatttgaccatcaattagaaaccctcaatgagagaggtaaagtataattagtttctacttataaatataagaccatgcacttactgtacacagattcaatttttcaattcttaaccaaaaccattgctaaacaaatcaattattgaacctctctattgttgtaacctatgacaaactaactaactaataaagttacttatggtttacatatttatctttattattatcacttttttttttttgaaattaaacttattaacaacaatcggaacttaatacatcaataagaaaagagggaaaatcctcaatccaagccaattc

SEQ ID NO: 111798 - DNA, 2045 bp, Cannabis sativa
  modified_base (248)..(252): a, c, t, g, unknown or other
  modified_base (1973)..(1989): a, c, t, g, unknown or other
cttaagccatcagtacctatttatagaaaaccacctaggattaggttaaatttatttgacattaaaataataagaaaataaatggtaaatatgctctataagtggccggccataggttggatattaagccccactttgcaattttaccattttctcatttttctattttattttctcaaaaatgtcaatttttcaatttaaccacttaaatgccaattctaattttttaataactaaaaattaattannnnntaatattatcatttaatatatttgctctgggttgagtacgggcgtatattccctaattattattattattattattattattattattatttatttttggtgttgtaaaaattccttcaacaatatgatgcattaccaatcagtcatcatcacatccttgagatggatccctataacgatatccgaattcttttcaatcacaagcccaataacatatcaaagaaacaatcagaccaccagtccagtgtatcattctttgtatataaaccttccctttggaaataaaataagaaattaaacagaatggaaaaatgaattgaactaaagggaccgaacaagcaccaccatggactgtttataattgaaatatagttctctatttttttcatctttaatttgaaaaaaaaaaaacacctgctcctactcactgtacttctaaactgacgtatgccttggccaccgaaacactcaaggacatggaatcgatatgatgattaaaagaagagccaggttctcaagcgtcctatctgctgcaccaaacaaaaagacactcgttcacgaacaaattcaggaggatagaatacaaataatgaaacaaatgacactggctaatttattgcctccaaccgcttacctggttgtagcattcccaagtgtcagttcaagatcatcagagacacattcctcaattctctcaccttcccaaggtttcaccaaacctgttgtattacttccaaaggcaaactcggctacaatattaccatctgacatgggaatatccgaggtgttatcaagtcccggagcaatggctggggagcaagttccgctttgccctggagtccacattcgtgagcctccattcgacaaggcctcgtccttaaacccaaatggatttcttgacaccaagctaaatgttggggaagatggcccactttggataccagcaagccaatttgaatcaggcaggacctggcgacctgggctttgtgggttggatgagggctggaaaggatagttctggccagctgtcattgggtcatcccactcgtttttgttccgaggagttctgcaagttggggaactcagtggtggagtcactggagcacttattgagccactatggatgaataggtggtggggaaacttggatgtggctgatgatgagcctgaggtaagggttttaagccatgggatgagtgaattaggatcagcattactgttgctgtttacgttggcagtgtaatgagatgaaactgggctgggaaaggaagatgaggccgggcttggattataggaagcacatgggcttggctgatatgatgaacacggacttgctgatgtcgaccctcccattatgtccatccggtccattggtttacatccctgaataaaagcagataatacaaggtcagagtgagacaacaagtactaaggaaattatagataccaaatagaaggtagtaggtttaagttcatgtttgagaaacttaaatttgaaacacaatgatacttgtacatgacaagcaatataatttaaagtacatatattcgtttctatttacttgacatcagcagctcataaccaagtgcatacacaacttgctcccttcgttctactaaatctacatgtttcaaataatatataattataatgtcccctccaacaccagatgattcaatagatattatcctaagaagttaagtgcatgtttggcatcatnnnnnnnnnnnnnnnnnttgtttttaaaaatagaaaattgtctttgaaaacaatttagcttgtttggtcttgt

SEQ ID NO: 111799 - DNA, 2228 bp, Cannabis sativa
ttaattacccacacttttagtataattacatcttatataattattggcattttaaataaagtgcacacacgtggcgtccctgttggacagggcgttacactcgtggtccactggcgagataggtcgcatggtttaggagctagatgaacttgtcgctattgagatacgagggagtgagtccactatatctgcttagaggagctttattgtaatgcccgtatttaaaaaaacacattaatttgggaaataaacattattatattatttttatataacctcgtaagtcgggatcccaagtttgaaaccactgttgaaaatacatgcatgatatataaagttacataatattttttttacaagctatagggtaaccacaaaatgaaactcaaaatataacaagatcgaaaccctccaggttgcactgccacgatatgtacaatccatgcctaagcccaactcactgctcctcaagctttgctttacccttacctacacaaggtagaaaattgatgactcgacagattcagtaagataaacataatatatataagcaatgcgataccgactttatgtttaagccatcctaagcccatttaccaagctcaccaaatgattaagaacgttctcaacgaaagtacgaccattgtaccatatacactagagtaccgacttcgtactcgtgttggtcgagccattattgtacttctaggagttactgagtgttgtaccacatgcactccgtaccccctggtactcgtgttggtaacactgtaactaccctaataccctatattgtactaacacccttaaaactaactcatttcagtgttagtagtgcaacaaataataataaacattcattcacatatatttatgctattctttaccttgttccagattcaagcgtgccgatcgacttgaatggaaagttctcgagctcaacggaggtcctaagttacattacacaattgggataaataactcgaataaaccgttctgaaaccctatctcataactaaaggtaatcttaaagatacatagagtatacaactaccctaaataccaaggaaaacaaaactaagctcggaaaatagcacaaatttggaaaagttgcaatttcgggggtcctacttgtaaactggttaaccaaatgcaaccaaactcttcagaacacctgtatacacattctaacatagtttccacaccaaaatagcaagagaaacacaataaaatttaacatgccattgttgagtcaagtttgagttttaactcaaacttgctcaacctcaaaattaatcatcaaaagcagtgcaaacaatcttagaatatcaattgagacctaaagaaactaaccctaaatgaaattgacccaacacataactaaactcatcaaaatcaaccctaaacctaacaaaacttaagcatcacatagtatagggtttcctagggcataccttagcttagaacacttcaacccttgctgaaaaaccaagctttacactgaaaatttggctgctcctacccctggtttccatcgtacctcagctatctctccagtcagagctcccatcctctgcacattattgagggtgaaagacttcaaaagaaaacctcttatcctaatccaacacatcaccttgtccaattttggatctttccaattaccagttaaagaccattcctcaagcaccaaaactccaccattgaaaattcacggttgtttgtctaagatagtcttagcattctttctagtggcaaaagaaacccttacaagcgcactattccctcttcaatatcaaaaacattcacttgccaatttaggataatttttcacattcttctaaagacggtttggaagaattttctattattaacttccattcgaattactactctccctactagtgatttttctttgaactcagtcaccgccgattcatactctccccactcctcctcttgttcaacaactagtatactatttgccaaatcatctaaccatcctacagttgccataaaaaatcaccaagaaaaaaaaaataaaaataaaaataacaaacaaacaaacaagcaaacatgaataatctcacagtctcatagaccatagaacgtacttagggtccttcagattattttttagaagggattattttacaaatacacaaaaataatgaaaaaattacaaaaatacggtttcacaaaatttaaaatatttttacgattttttt

SEQ ID NO: 111800 - DNA, 2550 bp, Cannabis sativa
tcctccgccacaagtgaggatttttatcttttcaaaattggggccagtctatgacaatggcctctttctttcaaaaaaaaataataaactaaaattagaattggaatatggtttttataaagtaatcgctacagcattgaaatagtatagatgaatgggaatgggagattctgctgtaagttgttttttcttttctttttcatttttgggagactggattcttttgtttttacattatgtttgtgggtctgggttgactgttagtcatgtgaactctgctttaggtatgctaagtcattctcctttgtttgcacattttacaataaataatagtctcttttccactttcttttcttttttttccgtcaaaaagaaaacagtaggagtgaacaaaccttctctttcaaaagttcagaagcatctatgctaccattggtatctggcaatggcagtgaattggatgcaacactggcttgctcttgcagacaagagtacatatccaagaccgtatcaagaagaaatttatcagcaccatgaaatgagataaatgaaacagaaatgggagaatcgttgtgctttccaactggaatcgtaacctggtaagcataggcatttgtacagattgaatcagttatgcatagaaccagagcaccagcatgaatgctaaagccagaaaattatacctgacagcacccagacatgcttgcaatacttgttagtgccaatgtgcggtcaaggaactcagagaatggccctttccttgtacgaagcttcaatggaggatctgctacagtgggaactactaatattccgtcatcctaagacaataacaatgagattagacaaagtacatacatatatttcggttgtgcacgcaaaagccatctatgatgtgaaagtttacaaagcactaaggacaagaatagaatgaaggaatcagtagcaagccattaggatagagcatattattttagtcatgagcacagcagcaaattataaaatttaaaaaatggctgaaagagtaccaatcacacccaaaaataatcaaaaatggaattgatatacaagcaaatggtaactgggtcaattaagcaacacatcttggctttcatactttctaaggcctcaagaagtagaaacatcagtaccatacagtatataagaccagctgactttgggttctaatactaaatccagatatccttgtcagtgctgacttggatctttgtagaagaaatgtgctgtggtggtcaaagcttgtattttaggttgtggagggtgctttttgttgttttcatatgccatcttctaaacatagtaggagagcttagtcagagcaagaaaggtggtattatgctaatgaaagcttactaaagctcttgtgctgttccaggttttcctgaaaaactttatggagttgctagatcccaccaattaagattaggaaaggtgaactatcagaaactctcataaaatcttcatgctttaaggaaaatttcaggccaaggatgaatagtttttcaaacaggcattgataaatagaatttgggtggatactttccctggggaagataaatatgcatgagaatcaacaaaaaaaagacatccttattatcatgatctgtctccaggctgctgtgttctatgcaacttaaagggtgaatcagagaatcatttgttcctaaactgtcagtttactctaatgttgtggttcaagttgctcaagaagattggtttgtcttggtgtatgctgccaacattaaaaagtaagaacttgatagattatgagataaagggtgaccgatgtgcttcaactctctggaaagcaggtggccatttttgggctgtgtggttggacaggaacaacagaatttttagagcatcacaatcacagaagatatccttggggataatatataattcatagtagcaatatgagtgtataatgtaaaaggcttaaagggagtcttgttttcagatttggtcagggatctgaaaaaccgtatgtgatcacttttgcctagttgcttttacaccttttcctgtatacaattttctgggtgatcatgcttcagtttttctggtgtgagcaaagcatgaccctaaactctgtttttattttaaagaccaatacaaagctgtttctttttcaaaaaaatatacatataaacagaatttatagttagacttaaagacgattcaggttataatttcagggattgaactcattccccccgtgaagagaagttataaggattttttccagaaagaaggtaatcaacgcttacaaattctaaagatgctatgttaatgcacatctcattgaaaacacttctagataacatcaaacaacctaagatgattccaatagaaactacaaagaaaactaattttattagtaatcaaatcaattaattaaatttaaattttagaacaatgaaaccaaaaagaaaactctcatgtatgagtttaataaaaaaaaaaaggggtcttttcaatattatacctaaaattgattttatttataaaaatacctttaagaaaattatt

SEQ ID NO: 111801 - DNA, 1336 bp, Cannabis sativa
aattttgctcacttgtttttttgaattttttttttttttttaaaaaaaaattgggtttttttttttttttttttttttttttttaattatttagtcataaattttaaaagcatttatattattattagagtgttaattataatctcttattataattttttaatcaatcccaacgtttaaaattacatatcgaaacatttttttttcatagtggtatttgttatgattacaatattattcctgtaaatttttgaaagattctaaataatttatagtaccgaaaatagagtttctaatattccaatttaccacacgtattcaaaaaaaattaaatgtatttttaatactataaactatttagatttttttaaaaatttacataaatgatgttgtaagtagaccgaacaccgccataaaaaaatattagcatgtactttcaaatacgaaaattaactcaatcagagattataataaaaagttgacgatactaatctcttattattatataagcatctattttttatatatacaaaaagaaactcttagaaaagaaatatatatttttgaagtgtaattgtgatccttaacaaatttgactaaaaaatgttatattctctggaaaaatttaaatgatatttattttctttaatttttttattgaaacacttttaaattttgttttttttggcacgcattttaatatgtaataatagtcaaatgtacacacttattgttttggctattgcgatagagtgtaataataaaattaaggtattttttttttatttttatttttatactttaaatataattttttttttacgaaattttacatagaaactcttattgtaactagtgctgcaacctaaattgcaataaaaaatcgtataaaaactctattgcaattagcgctgcaaccactttaaaaactcaaaccgtaaattttaaaaaaaagttaaaaaaaataatatataaagtgattcccctaaaattaatagttgaaagtataatttatcttatatcattttctttattttaatattagattttaggacaatttgatttaataatacttatcatcataatgtagagatatatgtctactaagtaagaatagtaagttgaaaatatttagattcccaccccctaaaaaaatttactacacaattagaagtcttatatacactaaaatcacaaaattaccctaaacatgattttatttattaatttatattgttgctcctaaaatcgcccaatatacgtggaccagtcaggaagggacacgtggatcaaattacttgagaagaactgctaagtctttgtatgacaccaggaa

SEQ ID NO: 111802 - DNA, 5716 bp, Cannabis sativa
  modified_base (5578)..(5580): a, c, t, g, unknown or other
ctctctctctctctctctcagacacacacacacacacacacactcttgacagtgctcacgtagacataaatatcacactcgttaacattgtaagtaatttgtggagtctacatgtcaaatattgagacaatagtgtaaaagtgaagatgaaagcttagcacgcattttattatattattgattttaatagttgtttttaacatatgaagttttataatttgaaggagaaacatgtggccttggccattctttttttaaaaaaacaatctgatggcactggcttgcttaaggcataactggattttgaccccagactttgctagttgatgtggctatgtctattgtatattgctttcatcttgtatttgcaatgtttgttgagctgccttttgctgcactttgttaacaatatattgctttcatcttgtatttgcaatgtttattgagctgccttttgctgcactttgatgtaacaccctcccttgcttgaatttgttcaaatgagattatctatcaaagttgctagttagtgtaaatacttactatcacatcatggaaataatttaaatgatgctttgggcacaatcctctcttgttgccaatttgtttccctttagtatttggtttttggtgtttcattgtggcaagtcttgggtggacgggcaggccaatattcttcaaacagctaatgctgaagatactaatagcatacaatgtgcaattcatatcatatatgtacttattgcttattgtatggatttattttaacatattgtaacggctcatttaacttttcaggctctcagttctgaaaaatcaaagcccaaaccaggtgccagaactggtgaaatgaatgcggcttctaagagtggacagcagcagcaatcctcattgcataatgttaatcaatatctacgtggtggaagtatgaagcctgataccccaaagacatctcatgggaagtttcttgttcttaaaccagtccgggagaatggtgtatctctttcatcaaaagatatcactagcccaacatataattcctctactattgcatttaatactcaagttgctgctgctcctccagttgtatctgctccgactaggagccccaacagtcagaaagttccctctcttgagcgcaaggttgctgctctggatttgaaaacaggaactgctttggagaagaaaccttctttgtctcagtcccagagcaggaatgatttttttaatctgataaagaagaaaacttcagtaaacccttcaacggttctcccaaattcaggtccccatatttcatctcctactagtgaaaaatcaggtgaagaggttagggaggcattcagtgctcctgcaagtcctcacactgttgaaaatggtgctgaagtgaatggcaatggtaatagctgtaaacaaatacagaggttttctgatcgtggagacgatgaatgtcccagtgctgctttatatcttgatgaagaagaggttaaattcctccgatcacttggatgggatgaaaatgctgctgaggatgaagggctgacagaagaggagatcagtgcattttatgaagaggtaaatatatcttctttgtatttgtattatctgttatgatggcttacaaaccatgaagatttacaataaattttttactgagttgttgagctcatgtagtacaagatagttttctcaaaactggactcttgttttactaactacatggtgattgttatgcagtgcatgaagaaggggtcatcttccttaaaagtatgccgtggattacagccaaagtttccgacgctgcctgaatctcatgctaaccctggtggagcttcgtctgaattaagttcatctgactcgggatctgatgcatgatattacttattacttcttttttccccccttacataattagatccaagaagttccaatttttttgaaagcagatggttagttcctttttttcattttattttttctttttgttttgaaaagaaagctgatgagttgggtatgaaagaagagaggttgggttttggttggaactctgtattctgcaaatagtgcaataagttacaggtgccccagtccttaccttttgctaaaacgggggtttttttaggttcctaaacagttgttagggagaggggtagtagggtaggggctgttttgtctggctgtgaaaggtgcttagaaattgcgtcatttggttggtgttattttggtccttttccttttttttatttcaggagggtttgattcaaaagaaaaaaggctcatgctgttttggtcaattttacggaaaaagcaatcaaagaagttttatttttagttgacgtcattctttcgtttcttcttattttatttctttttatataaatataataattaatcggcatttacaacttgtttatgttttttcattttgctcctaacttatcatgcagctcatatttaatcatgaaatagatgtaaattggattttaaaaaccaaaactctaaaacccgctgcacttgggaaagaaataactattttattttaattgaaggtttaatgatatatggacatataagtagtaaaaagtttcaactaattatatttattttagatggtctattaacaagtgagttgctatataaataatatatattattgttcataattaattatttgaaatgattgcactaataataatgtgtaagccatttttaagaaataatattcatgttaaataaaaatgaattttgcggtaagttggtaggagtgttggcagtatgggttgtaatattttttcaaattaaattatacatggcttttataaattttgaaattgtaattatactgagattttaaaattgcaaaagttacactgtaaaaatgtggtgcggtacaatgctatttgaacaatttacattattattattattattattattatcaaatattacaataaaaatttaaaaattaatttaataaaattttaaaaatgtaaaaatatttatattttattaaattttaaaaataacataagtactaattatcaaattatttctaaaaaataatataatatacacattaaatatatttatttttatataaaaaaaatataaaaatcataataaaaattgataattttataatgtatagtgtagtacattttatttaatttaaaactgcaatgcaccaaacgatttgatagaaaagcaaactataattgcactgccaaaaactttaaactatacttttgatgtgtagtggtatactgctgacaatttatggatgaacagcctaacttagtgttgcaaatattattagtcctattaaaagagccacaaattgtagaggttgttgggtgtaaaataggtgtctgcattgcatttgccagtctcatatgatcttatccgattgaagagaaacgtaatctgctgacagggagagggaggtgagggttttatcatttatgtaatttaagtttcacctcaccaatgagtttttaatattattattttctttttaccaaaaatgaaaagctacgctcttagcaaaaaacaatgaaagcctacgctagtcaattatcactcaaaatatgcatccaaacatacaaagagaaacactatcatttaattattactattttcttatcaatcttatttttataagtatattctttcagaaatgacccattttaatattttatattatgacaaaagtattaactatgccaacgtgtattttttttataaaaaaataactaaaaataaaactattatctaatgtgttgacgctaaaaattatttcaacaacaaattaatattacgatattaaattttttacattagtttcaatttaatcgagatataaaatctctgtcaatttacacaattctctctcagtttctactatttttctagtttgcttgcttcacgagctcgaaatagtttcaagaatgtattccgataaagtttcgactagcctgatatgaacaagaattcgtcctcttttttgaatgatgtgatctcctatttatagacaggagcgactgttagctcttcaccttctttcagttaagactgacctacattagttcctctctgtgtcttcccgcgttctttcttcatgttcttactcttcgaaattcctcgagctgtactcttaactctctcaggttttgctccacattctcatctggttaagctctgtattcctcactctgtccttttcctttaaatgaaacaatgtgtttattatacctgttatattgtttcattagtgtttcttatatttaataaacaaaattactttttttaccccaagatcatttttatcacatacaattgcctcttggttttacaatttttgagctcgtgactgatttagttcaagctcaaaattgtgaaactagttacctaaaataattcacacgtgtcattaatgagccgtaatagatttgatagataatcatttcaaatttttgagaaatcatccccgccctttctaatttctttgttatatttccctttttatttctattacaaattttaagatatagataaataaaggaaaaactaaaaaatttaagcaacttttgtgatattttattttctttgagtccctagttcaattcttcttctttgagtttttattctttcgccttagagattctgttatcctcaatgttgccttcttttgtcctctttttgcaccttgcaacaaagaattttagaacctccaagaacaaatctaaatccactactgagaaggcctttcccatgattgatcctaattttataatgaatatgaggtgacttttgtagagatttaatctcgatatccggttcgagatgaaattacttttggcttgctgacaaaagatgaacaaggtaagagcctagaggacctcaagatggctaatggtgaaatactagtgagtgggaagcacatggaacttctgcgcttccttgttcctcctttgttgccttatattctctccattactggagtttcaatgattcagcttgtccctaacttcgttcaaaggattttgggtctggcttccatttgttctcttaaaggcacaacatttcttactttagcagaacctcctgtctttctcgcttttatcacttggtacatttttatgaaaaatcctatttatctggttcttgatcttccgtcttcaaataaaggttgggacacctatgtttttgtattggtgggaaatggcttcccacgattattaatcttgaagtcttcaccatggctaactgacttgatatctcgatttgttggcctgctaaaaatttccttacaaatcgtagagataccttgttcaaaattgggaattatccaccactcgaaagatctaacttactatattaacgatatactgaccaaggaggtctttaattgcttgcttcccctttgctcatcttctacagttgattcttctgccatgccaatcatagtaaatatgattaatgtttattttaattagttgactgttaattactaggatttcttaaaaagggttaacgtcgctaatgattcattggttttttctgttgggaatattttaccagnnnctagatttactaacaagtatgtagattaacatcctaaatatgaattctcaaaaaacaattaaataaatacataagggtttaagaaaatcttacattgattacagcagaatattataactccttccgttcaagatct

SEQ ID NO: 111803 - DNA, 2772 bp, Cannabis sativa
  modified_base (2722)..(2734): a, c, t, g, unknown or other
gttgttataacttttattagtctcaagtttgctgtattttcttaagtgttttggaataattgtattaatgatagtttaattattttgtgatgacttaaaaaagaattgtgatagtccaaaccgcagaaaccgcatcgcaccgcatggtaccattttttgcggtgcaatttttacgattttttagtatcacagtgcgggtgaggtttaaaaagttagaaaactacatgtgcgagttggtttaaaaaaataattaaaaccccaccacccgcaccgcgaatacccctactaacatgtcatcatgagtttaaggcttcttttcatgatttaaaatttataacttgtcaaggcatattgtacagttatcgttaaattttattcttaaataattattgtattctataaatatctcatatgaatacaatttccttaattatttattttaatattttattgatattcccgattactttgtttaataaattattaaatctctatttaacaaacttcttgtcatattattatttgacattgatattgttcacattattctttaagaataatagatatgaaataaataataattgacatacatttaatttatatttatttatttatgctactagaaatgaattatctaacaattcaaattattgtataataaattcacatataaattcaaatgttcatatatagatgtcaatgattgtgtcattgtacactttttagatatagtttcgaactatcacatatacctttagtgattgtcatataatcaactctcttttaataaggttaaaaattttcacttgttaaaatttatattcaatatcatcttaatgtatttaaatatattctttgagattattaatgaatgattatcgaacagttgtatttcgactcctacgttcgagattagaaagtttgaacttactcattaatgtccttcacattaggatttgattttttaaattacaaaataattactaatttaaattagttagatattcaaatcatttcaagtatattatttattttaataaatctcatttattaatcttcatagttcttgaatttatgattattataaagaatattaattgttacaataagcaatctcatagtgctttgcagtcctaaaacctactaggtgtacaattcagcagtagtaatgctacccagactgctagtggcaaaaaattgggggcaagagcagcaacaacagctctgggcaaaacaacggtaaaaaaaggaagtataatacttctcccacgccacaagaccaaaaagataaggaggagaagtacacctactttactctcctaatggagaaacttgagaccatttatatggccactcagggcattgtcccatacaagaagcctcctcctatcaaaagggagatgacaaagagggacatgtcaatgttctgtcgatatcacaatgagttcggccatgacaccaatgagtgtcaaaactcgaggagggagattgaattcctcataaggaggaacaatccccacttgcatcattatgtgcagaacgaccaatcttaggcacaagctaccaagaacggagaccctaggggcatcattggcagaccccacgttgtaggagaaacaagcaaggctagggaacgctatgcttggacactccatcacgagcctaaaagcgatatcctagccatcgaagagagggactctaagcaatctaagcttggagagcccaccatttttatagaggaagatgctgcccaagtcaagttcctacgcaatgaccccttggtcattactgcacaaattaggaacatcacggtttcacgatgcatggtggagaatggagcctcctccaatattctttttagatcaacatatgaaaagatggggatccaactagctaacttggcaccctacacacaagtaatgtacgatttctttatccaaggcattgcgcccatggggtatatccgactacccctgacagtaggggagaatccaacaaccaaaatgttgatggcacaatttgtagtaatcaacgtgccttcagccttcgacaccatgataggtcgtccagccttgtacgacctaaaggcaataacatccatttaccacctctgtctgaagttcctaacaagacatgcggtaggatgtttgaggggagaccaacagtctgcctgtcactgttacaacttgtccttgtccaaagccaagaaagagaagatgcccgataagagctctgatgaagagcccaacagagggcaatgaagtctatcccaaagtggggaggcagacatagatcctcactttagggatcctacaaacacctttggacctataactagaagaagtggaggttgatcccacttttcaagcaagaagatcgaagattgggaaaggtttagttccagaaataaaattagtactgataaaatttttaagggcaaacttggacctctttgcatggtcatatggagacatagtgggaatagaccactctgtgatgacccatgccctcaacattgatccaaacttccgacctgtacaacaaaaatgaaggttgctggacaaagagcgcacccaagtgctaagagatggagtcaaaagtcttagtgcccatgactttatcaccgaagcattctatccactttgggtatctaactccctgttggtgcccaaaccaaacaataagcattcaattcagtatcataagttgatcctagatcacnnnnnnnnnnnnntgatatggttaggctcaatttcaagagtgttactcgtg

SEQ ID NO: 111804 - DNA, 5803 bp, Cannabis sativa
  modified_base (5731)..(5758): a, c, t, g, unknown or other
tctctctctctctctctatactctctcatacgtgtagacagcattatggtctttgtgagattaaaatcctaactctattacagtgtctcatacctaaatttgttcattcaaataagatctaatagcccactctattcctgagtgttgaggcatgcttggaagataaaggtgtggattcttcaaaaaaggtctttgataagatgattgataattatacgaaaagaaataaggatagcatgataggcatcaagatgtattatatttcttttagtagtttagatttaatctatatatattatgttgagatccttaggcttatggttcatattggataaaaactactttcattaaagttctgtttccacttttataactctgatatggacgataaaaacaaacaagaagacctcttctaggtcagtgctacgttctacagaagtcttggattttactagcatgtcatctacatacacttccatattcctcataagtttgtccttgaacatcttcttaactaaacgctaacaggtcgctatgacattgttcaccccaaatgacatgactttataatagtacactcccttatccatctgaaaatcaatgtgctcttagtcaatgatgtgaattttgatttgattatagttggagtaggcatccatgaagctcaacagctcatacttggatgtggcatccaccatttcatcgattcgcagaaggggaaagatatccttggggcaagacttataaaggtttgtgaattcaatgcatattctctatgtgccattgggttttagaaccaagattgggtttgccaacaatacttgctacaatgactgccggacaaagtcagtttatctacttcattctttacggccttcgcctttacaggatccagtggcctccatttttggcgaacgggtgttgtactttctttgatgttcaaggcatggcaaattatgttggggtttatccccgtcatataaaaattgctccatgctagcacatcttcgttttctttgatagtactcacaatcttttccttcaccactggatagaagttccttcccaccttaatagtcttggtgggataaagttcatggatttggacttcctccacatattctagtggctcaattactttttttatcccaatccaaggattcaatttattttcacagtctcccagatagctttagcttccactttaacatccatttcatgagtaagaaattcttcttcccaaaccataaacacggttcggatagaaatattataacaacttttgacacttttttgaacatccccttactactccaatgcttctattatcacaagagaacttcatgcacatgtggcttgtagaactcatagctccaaaattgattaggactggtcgtcctagtatgtcattgtaggctatggggcaatctataacaattaaggtctagtgcgtgaaggcacaaatattattctctcccttgaatgtgactagaagctggatttttcccatgggtatgagagtgtatccaataaatccttgcagttgaatgggtggtgataaattggcctccatgagcccaatcgcttggaacactaacttggacagaatgttcacgaaacttctattgtctaacaagacactggaaactctctttttggaaatctgagcttcaatgaccaaagggtcattgtggggaaattaatgtgcctagcatcatcctccgtgaatgtgacgagaaaattcatggtttaaggacattgtgctggtgattgtactaatgcacacatttccccctctccgtttcattcctaaaagtatcttttttggtgactccttgtacttctcaaaatatatggtcctcctaagatcgttgttacatgtccgtctactggtggccgagctaaactcggagggtatgggttccctggtcccaaagctaacattgctactacagcctgggctggcagagaatgtagggatgatagttgtgttcttggagctgaagggtgatgtaccccttgtagaggatttatgacaccttgctgtcgctgaacgataattagtccatgaacaccccctattcggcataaataatgggaatatggacccattatcctaggtgtccagctcttgccaacatttttatcttctccattaagtagccacatttaatggttgtgtctcccacgtctctgtatactcacacctcttattatgatctcttttgtacttttccccaggcatccttggggcttcctgtagtgtaccatattgtaggtttttttgtacacatttctcgagtgtccaccaagttggtgtactcaatgtatttttgctcataatccttctttagattttgttaagtctcgctttggctttggttctttacatttctattactccaggaatgattcaaatgttgttcggaacacctttttatgggtttcactctctgggagcaatactacatctggaatgtgccactccatagatagaaaaatgggtttgtgtaggtgcacgcacggatgcagaaggtccatagataggtggaatgtactaagttttgggaacaaggaattgttgagcttatcctggagtagatgcagaagggatcggtacaggagagactatgaaagctttctaggaagcatcttctaaggttatgaaaccttattctcttgacataaactcgcactaagtcttaactcttttccttttcacttctccccataacaaggattcaactatgagtctagattgtaagcctacgagtttcatgttgtcagtcacctttgccttgtctgcttcctccatcattcacttaaggaaattctttaagctttctcgcgctcgttgttttctattggtaatcgaccccacttcaacatcatagtctcagtcagctatgaaatgcttctagaaagtatactgcagctctttctagctatgaatcaattcgatagccaatctcttccaccaatcctaagtagacttggtgagtctcaaggaaaagaagaagcacttaacatcttcacttactctagccacctacatcatcttgttgtacctagctaggtggtccctcgggttggtacatccataatttgaggaatcttaaaactctccatgagtggggcttccatgatccttctgacacacggcttcggttcctcatcttcaaaatcaacgacgacaccactctacttctggaaaagttttatcaaagcagcaatctactcttctagcctctttgtatcactttccagaagattgcatctacgagacttatttttcaaatggattttgtggtcattccctcgtggcctcacctcttcttttttatccttttcgtacatggcatcaaggcaccttcgaagacctttagtggaccaattgtcgttagaatactaaccccttgtccgaccgtcctgattaatggaattattggggctatttttcctacccatgggcctgggtactttcgtaccagtccttttttcacgtcatgacctttctgggcagaagggcgtccaagcctattgccattagtggccttttgcgcctgtataggtctggattcttgctcttcttaggaggtacgagagctatagggttctgagggtcacctacctttgccttccccttgtcctatacaggagtagaggttccaacattggcagggttttccccattaattttattaacacattcaactaatggataatctttagaatccttatctagatctccaaatttgtcatggaggcgagccattattctctccatcttttgagaaatcttctcctgacgggctagcttctcttgggtctcatgcaactccttagaaactttagccatttttgggtcttattcataatgatactcatctttgtagttcttgtctttgacatattctccatcatcatcttcttcctcccctttagcattttggtttttgttaacatgcttttgatgcttgcttaggtcaccctcctatgattcagcttccgatgtatccccctctctcacatggcttggctagacgtgctctagggaaagaggattgacatcttccatgacagcatcgaggccaccttgagttgtcttcttagtaactatgttttgagtaaacacaatgttggtggtatgggtttagatcattctttagctctcactgaaagcaccaaaatatttatcgagattttttgaaactaataaaataagagcttatgaaataataagatccaataataaagaagacatgtattttcacatggtttaggtgtttatgaaccctagtccacgagttaatttgatttttcttatgaggctttgtatcatgtttttacagtggtgtttgcaagaaaccataactataccctctttgtttttcttgtagaagaagaaagctaataggaaatttggcagagcttcggctatcttgatctcgatccccccttcgtatgtaaatagaacggtatttataggctaaaggacaggtatggacatgcccatgaaccacctagggtttctgcaaaaagcaaactaattgggtaaaatacatgtcaagagctagctattaggccccaaagaaggttttgtgctcgtgcgtagaagcagctagacaatagaggacaacaatttgtacaagacacgtgtcgcctaaaggtttcaccttgtaaagtaaattctaggaataaccatcaggcaaaaaagtgtatggggtgtgtgcactaagcaagcaacttggaacagaataatatcatgagcctgatattggtaaaaataattacagattggataaattagattaaaatggggtcacaatctttattgaggttcaagaagagaaaattttatggttagcataacaaatatgtggttacaataagacttagttcaaatttgagagaaatgtagaaaatgaaaactaggttcaaagtgcatgagtgctactggttttcatatataggaaaatgattacaaaaataggcacaagttccaatcacacagtgacacgttacaaccataaaaagcaaagagtaacaacattctgttaaaggaaataatagatgaaatctacccagggattacaataattaagcattccaataataccctttagtaatcattgaagacatcatttggtggtgattcaatttctttgactgcaacccttcaaggtggaaggtgaggcagtcacattcaacttagcaatgagaaactaaaaccttgtaggagtgagacccttagtgatacaatcagcaagttgatcatgtcatgggacatatctaatttcaagtttcttttccaggactttatctcacaaaatacacatccaattcaatgtgtttagttctggcatgatacaatcagcaacttgatcatgtcatgggacatatctaatgcactagcacttaagtcgtcacaccatataactggagctgaaggaagcttgaacttcatctcactcaacaggccttctagccaagatatttctatttccaattaagctagagctctgtatttagacactgtggtggacctagccacaacagtatactttttggaagaccatgaaatcagagagtctcctaagtagacacagtaaccagtaatagacttttgatcatctgggcagcaggcccaatcagcatcgtagaagccatctaaatgcaagtggtgacttggtgatatgtgcattgttggaaaatattttaccaggatctnnnnnnnnnnnnnnnnnnnnnnnnnnnncaccctaaatatgaacttctaaaatgattataaaataaacacata

SEQ ID NO: 111805 - DNA, 7511 bp, Cannabis sativa
  modified_base (26)..(49): a, c, t, g, unknown or other
  modified_base (5087)..(5090): a, c, t, g, unknown or other
gatatttattaataagtaaatctgannnnnnnnnnnnnnnnnnnnnnnngggcacaaaacccaacaataggatcttgagtccgatatcaattcactctcaaaactttcgatgaatttttacgtttgatgtaatagattttattatgtttgttttaaatgagtttttatgatgttttgtttttattttctgaggtcctcaatttttacgcgatggataccctttctctgttggtgtaagtatagagtgaatttatgaaacgggtatgggagtgacaaaataattcttatcctgccacaacctcgtttacatccctcttcgttgccttttgatctctatctcacttttgtcttttttcaatttctcaaaatctcatagacacacattttatattatttataattaaaataatataagattaaacctgataatataacaaattaatttttcaatgtaatatattctttatattaaatttagttatatatttataatttctaaaacatattagcttataagttatgtgtaaataaatgaaagtatgcatcttttcaattgaaaattcttaatcctacaatatatttataaattatagttgtagagatatatattatttagatcaaattaatttagataagataagagtttttttgaacttcgcgtaatttcattgatcagtctaacataataaatttgaacatttcatttaaaataaatctcactttttaaaagtgatttgtgagataagtgtgagaatgtacagataaaaacgaagtattatttactaactagtaaattataaatttaattatgtaggcaactaggcatactaaattacctacctagacatatataaataaaacgtcgcatatagatagcttgcttgcttatcccatcatattatatatttatatgttttactttttgcaccaaatataatatgtattatggtttgattaatttggagatgaaggtttattattattggggccctgggacacgtctcatattcgttattctcttaatgatggcttagctagtgacggaaagtttaatatttaatttatataaaagaaacatatatatactaatgttagatattcttgtttctaaaaaagaaaatgttaaatacaaaaaacgactaataaaaacgccatgcttcgttgtccactttcgaaatcattgattcatacaataaaataattctttttattatacattatatgagatgtactttgcacgtaaaagataaacaattaattaataacaaatttatattaacacagaataatagaatatcgttactacatattttttttaataaaaactagacagcattcaaactattaattattgtttaatatattattttgttaggttacaagagatttctagattaactgtatatggatgatgattctgctcccgatcgacttctttttatcttttttttttaatataaatatttatatgtatataataaagacaagcctatatatatatttacattcttaatttgtaagtgttttgagtctatattaattaataaaccaatcccgccaccaatctctgccactaatgttgaattatatatttaattgaaatgccttaaaataatgctaataattttaatctcctcttttttgatctctaaacaaattttcatataggaatgcttttttttttttcttgacttgtctttgaagtacatataaatatatctctatatatatatataactgcttggactaatcatgaagacattttcatgattacaacaagtacgataaatatatatttattaatttgcagccaatttgaattcaacgtaaaatattcatggtcatgatatatctgaagtagtaacgcacgtggtggtataatagtatattttttgttatagatagagatattccaaaactaattagtatagtatgatgagttcagttaattgatatatggaacttaataaaaatccagctgctgagatttggaaaacatcaaatcatataatgtcggtataatattatttattatatgactttcaaagaagtgaattcaaaactactaaaccatgtgtttttgaaccttgacttatcgatcgatccttttctttctatacttgaaatgtgctctcttataatattaacaaggcatacattcaaataaataaataagaccagaatgatgtgatatgtctgtccccttcttttttacttctcttttaaaaaagaaaagaggagtgttattatcaatgtcctatatattataatttcttagtcaaaatctctgtgtttaaaaacacatgttgaaatatttcttttttcatgatggtgtttattatgcttataacggtatctctataaatttttgaaaagtctcgaatagtttatcgtgccgaaaatatatttgaggttttttgaacacgcgtagtaaattgaaatattaagaactctgttttcgacaatattataaactattcgaaagttttcaaaaatttacagagataatacaaaaactataacgaataccgatatgaaaaaaaataaaaaatatttcatttcgagcgtaaaaattaattaaaaaattataattagcactcctcaaacataaaaaattataacttaaaaacgtaaaaaccaagaaagtacttaattaaaattttaatggcaataacaagatactcatattcttcctctttacaataaaataaagagaatcaggcctatattaataatgtataaatattaaatacaacctcttagttaatttttatgtttatatttttttttctttttttcataacagtatctattataatagtatccctataaatatgtaaaatattctgaataatttacagtattaaaaataaagtttctaatattctagtgtaaaaaattttaaatttatttttagcactgcaaattattccaaaatttttaaaaatttataagtatgatattataaattatgaatatcatactcttatgaatatttattgtgtatactatacattataaaaaaaaaatatttatattatatatataaagggatgataaaaaaagggttttgtgcaatggtccaagctgccatatgcttaagccaaccctaactataatgaatactgacatgaattttttttttttaaaaaatattccagtagtatgtatttttgtgtacaaaaattgactaacaaattataataaaaggttgacgatagcactcatctttttcttattaacacatgatgaagaccaaacgtgagatttcaatgttaatactattcaattatattttttaaatatataaaatttaaattagttttaaatttatttataaaaaaatatctaattatttttattaaacaataataaataaataaatttaaatattttaaataatataactaatcatatttgttataaattatacttaattaattaaattaacatctaattaaataaattaagatttatatataaaaaaataatttaataattaattgattgatttaacagtgttaattttaattaataattttcgttaaataattatatttaatatagaatttatatatctatatatataatcccaagccctcaagttaagtttgtataattatatgagtttattttgaaaaaataaaatggcggcatcacaattttttctcttctaattttttattttattttattaattattgagaaataaaaattttatttttagcacatccttaaaatattgtgtataattatatgttaattttattatctctagagtttgtttggtacgtgatattgtattgtattatgttagattgtattgtattattattattatttaatgcaatactatatatgtttagtactgacttgtattaaaagattgtgtaaagttataatatattttcagtaaactcgaccctaacaccgacttcgggtcgggtctgggtctaggatctgagtttaggtccgatctgggttcaggattcgggtccaggtccgggatttgagtttggctctggctccaggtcggagattgaggttgacttcgaatcctttgtaaatattataatataagttaatacagactatttgttatgtattaattaaataatacaacttacattgtattaaaatttttagttgtaatatattaatacaatacattattttatctaaacatagtgttatttattatttaatacaatacgatccttaaaccgccttccaaatgagtccttaaagattaattttatacatatatatgacatttatataattaatatattgtgatttattaatcaatacttccataaatgaaaaatagtaattattataataattcaaatagctggtagtgaccatttttcaagctgaatgttgttaagtaacaattgtgtggacagtaagaattgtaggagctattgttcaagattggaatagagaaattatatattgcttattgatggatctaccaagatttcagttttaagagatgcttcgggtggttggaataatgtgttaatttgattctttttttctttttttttgcctcatgaagtgaaagctatcctttcaggtggtgtttcgtttactggcaggcccagccctaggcataggcgggctaggtccgtacctaggaccaactctttctaggggcccatttaaaatattaagaccttattattttattactatatttaactaaaattaacaaccaatataattaaattaggctcagcgtagtggctgtcgaatgataaggttaatgttggttgagatttgagttcaatcccaccaaacttcacattttaactacaaacaaacgtatacacttaataactaaattcaaaaaaaaaaaaaaaattaaatacataaatattatttaaactttctttctaaatctaacattttataagcttatctattttttttttctttctttcttgtctatatccctacttctcttatcatgtttttattttcctatttattttgcttcaatcaaaattacatttttaatattatgaaaagaaaaaaaaaacattaatcaagatataatctttaataataataataataannnnaataataataataataaatttcttgaatattatttaaagtgattttaatttatatctttttaaatatcttattataattatgaactataatttaatgtaaaaattattttaactacaggtaaatgtagacttcatagttttttttttatttctttttttatgaatttgatttattgtatggttgaaattttggcaaaataaaaatattattatagatgatagagaaaatttaagaatacaaatttgttattttagatttttaatatttttttacttttatgtcatgaaatgtagcatataattttttaggctattttttttatttatttattaaaaggcccaaaattttatatcgtcttaggcccccatttcttgagggccgaccctgtttactggaatgtaattgtaatagtaataggaatagtaatggtaatagtaatgggattacaattaccatgtttggtttattttgtaatgagcattgtaatcatttttttttatttggtttagtataaaaataaaattgaataattaatatattgacaaaaactcattttatttattgtcaactacatttgataaagaggtaagagagagaagggtagaaaagtctttttgtaatgtattggtaattgtaatcctcattcatgagtcatactcatgtaatgagaatttatgcaagtggtgtaatactcattacaatgtaaaaggattacaaaagttaaaagtagggctgcacacgggtcagatttttgggttttcgggtgttcggtttcgggttttcgaatttcgagtgttttaaatttgcaaccgaacccaatttttgggtggccgggtctggcgggtttcgggtcgggtgcgacgggttttctgtaatcgggtttgaattttaatgggtcaggtccgagtgaaatatttttgggtccaaataaaatttatttttaaaaataccattttattttctatttttaacatcttttttgggctcaatgaacaatcacattatccaaaattccttattcaatgaatcaaaattcacaacctacgaaatttccatgctcacaagcatgacctaaataaagaaaattcattttctatattttctcccaattatcaaacaattcaaaatgttaaataaagcaagagtggaaatttaatttcaataatttgtaaaaaactaaaaatatattataaaagacaatccaagaaaaataatggtgaatcgaattcaaagctaccagaccgatcgaattacactatttaaataatatatgtaatatatatgtatatatatgattaacattaaacttaaagagtggttattggcttggcttcgcaatatggccgctcctcgtgcttcgccgtttggtggtttgtctagttggtggacaaagatttggtttcttaatcttcctctaaatgttagactttttgcttggcaaacgtctcatgattggcttccaactaaaattaatctaactcgtcatggtctgttaattaatgggttatgttctttgtgtgggttggaagaagaaactactcatcatgctctttggggtgttcttcgttgtcacattgtaggaaattatgtgattttgtgttggaggattcgctcattcactttgtggattttctcgatttcattcacaggtttgtatatcctttcaaaggatgtgattgatttggttatggtatttctttggaggatttggttcaaacgtaataaaatggtccataacaacgttgaattgtctcatgtgctcattgtacattggccccgcgattaccttggaacatttcaccacaaataggtttcggtgacggctccctccacctgtcagtcggcagtggatgtccctgttggcgagtcaatacctcggacaacccctcttcaagcagtgctgaaatggaaacctcccctacttggctttctcaaagtcaatacgatgccactattaattctttgggcaattgtagtggcttgggtatggtgattcgtgatcatttgggaattgatatagcttcgacaagttgacatttggatggttattttgtttctgaagtggctaaagttttcgctattcgcaatgcgttgattcaattcatcttctttggatatggtacaattattattgagtttggctggttgaacattgtgcttaaacttaaaaacaatgtttctactattatttttttattagcttaatttagatgatatttttagtctttgtaataggctcgaaaatgttggttttgtacattgtatcagatcttataatggtattgcctaatttttggcaaaatgtgtaaactggttactgttggagtaaacctccacttacactgatattaagactcaatacaataaatacaaaggacagaaaaggaattaccagtaaagccctaagttgaccttcggtc

SEQ ID NO: 111806 - DNA, 2204 bp, Cannabis sativa
ttttttttttttttttttccggttcatcttaattcgaagaaaaaaacgtgaattggaactgctttctatgtgggtggttatggataaaaactgctagtatgtgtggattttctttattcaaatgtatgtgaaaaacttgtccattgtcaaaatgtgtgagctaaatgtatttaagtaatgtttaaaacgattttctgcctagcatgttactatttttatctttcttaaaagaaatgccattactttgatgtattgactgttctactttgcactctttctcagaaccaaacttagcctaacaagatggagtgctgattggaaaagcgctactgttctatatgaacaggctggtatgtacattcataaactgtaaacttatacaagaggtgatatagtccaaattggaaagttctttttttcattctttttcttgactcctgagtgagcgttattgctgcagctaatgcatttagagttgccaaggattatgaaaaagcgaaagaagcatttgaaaaagcttctaaaggacaagagatgatctcttcgtatcctcattttctgtcttgtgtggatactcaataatgtatttattaattttccttttaatttctacaatttctatctttctataacctttactgctaaactagaccctgggatgccgctaggcatatggaatctgctgctgctcttgcaaaggagctaggcaaatggaatgaagtagctgacttttatagaagagcgtctgagttatatgttgagtgtgggagatcacaaccttcatcagatgcccttgcaaaaggagctcggtaagacatgattcaccttttttactttttgtagctttttgttttcctttttcgttgcttattaccaatagcaattaccaccttatcaactgatttctcatttgcaaaaataatttttgttagtactttaagatgagtaatcacgaattaacttaactaagcttttgtctaactcactgtttgagctcaatataaattgcactgtcagttgaaattagcagagttaaatgttactgcaacccatcttcatctttctgatattgttaacaaaattgttcctgggcaatttcattcttttaaatttacattatcattgcatactcacatttccatattacaaccttcaaaagaccacatccttatttgttgggggactaaacttcctactgcttgttctgtctgttgttctggttagaatatctctctttatatatatcgtggagaaccagttgaaatgtttttctttctcttaatagtgctctggaggaggctgctcctgatgaagctatccaactatatgctgatgcttgttctattcttgaagaggatggcagagagcaaatggcttttgatctataccgtgctgctgcaagcgtgtatattcaagttgaaaagtaagttctagtaacctttcatatggttacatcttgaatgcataaatattaggcggggcttctggaattttatatttcaagttgtttgaggcttctacgccaagcaaggaagctaaaatgacatatttacaaagcaataagagctgatgttatggaatcaagttatagtatactcctggaaaacttaacattaaactgtgcaattgtattttatggattatgtagtagaacatttggaattatgcacttttaggattcattaggaaagggtcttatccttgtgaaaaacaggaagaaatcaaaaagtgtgtcaatcatgattgtaatatcatttcatgatgaggcttcctaaggaactagttggataaaagactagggagaagagaagcaaagattgtgaggagaagaaaacaaataaagagagaagtagggacagaagaaagaaagataatctatagagacagataacaaaaatgagactatctttccttgatagtaaatattgttttatgcagaaggcttctgataaattacaatgatcacactaaatagtgcagaaaagctctcaaataattaagaaaatcctaaatagagaactataatttaatgcgaaacaaggaccaatgcatttagtactcttatgattgtgcctaaccctgttgtctgatgaattgttgttgcaattaaatgatcttaaaagaatataatgtgactgctttatttcagttctaacatcatcttatttaatttatagagtggaaagagtttttttttttttttt

SEQ ID NO: 111807 - DNA, 2464 bp, Cannabis sativa
tgatagtattgcactatcaaatcgcagtaattgctatggatcaatcaggtacgcatacctaattattatatattattattgtgttctatattatatataaattggtcttgggtttactcttaattttctatcatgtcattcttattctagctatattttcattccttctaaccaaatgccgcctaatggggtgtttgttatgtgagtttgagttggagagagtagagttggagggagtagatttggagggaatatgaaacctatgcatttcaagggattatcattaccaccattttaatttaaaaagtgagacttgcatagaaacacaaatcccttgtcattcaaatttaatttaaattttacattcccattcccatcaagtcaaacctcataccaaacgccccataaggcaatcagactctaccaccaccctctgatagccaagacgacaggcaagcaagaccccagagcagatgcccaaagcctcagcaacatcaggaggaaatcaactttcccaagtccaagtatcctactctaagacataactagtatcatctcgaaacccagccctagttttctccaacttaggattaaaatcagcatcatagttgattttcactacctcaacgagaggtttatacaatctagcaattggttaattctcagatagaataccaatacaaggagcacaactattggcaggagtgaaccaatgatgataatccatgctctaatcaaataagaggtcgtcatccacacaaactttttcattcacccatttattacgatgataccaaattctccaaagacagactatgaacttttcaaacaaaccaataggcataacatcaagacaagcataaaagagctcatagatgacctaacaaagagaactaggtacttgaagacgtggacggtaataacttcacagatggaagaaagcttctcacaatgtcagagggcatgcaaggaagtctcgggacccatcagacaaaaggggcaagtagaagtagtagagacaccacaatgactcagattatcataagtagaaaacaaattatcagaggccttctaaagaaagtccttaacctttgcatggaggtgaacttgctaaactttttaccaaagctcggatttaccattggaactagagccctgcccaaagccaaggattcgaataggattccagtacccactcctgatagagtaaatacctgatctctcaaaatgccacatcatattatcgcactaaggaatatgatcccaagtaatggcaagtataacagtagcttctcatccacaaagaaggagcttttggttaaaggagaattctaactacaattagttagtacaggtcattcacagtggcatcatcaggcaaaacacgaggagaagaagacttgttaccatacaaacttgaaatcaatggtcatggtaaacaaaaacattagcaccttcatcaataagtcagcgaaccaactacaaaaatttccttttccataagatagatctccaaataaaagaaggttttttggactcaacaaccaagaagaaagaagaattaggataatacatagccttgataaccctagccactagagaattaggagcccaatatagtctcattgcttgtttagccaaaagagccttgttaaaaagacctaagtcccagaaccccaaacctccagcagacttgtgccaatataatttctcccaagtacacaattggagttttttcttgttctcatcaccaccctaccaaaaatgcgcacaaagcatatgaatcttatgcattaaagaaatagaaaacttaaaaatattcatagaatgcgtgaggatagactgggtaattaatttaataagtagcaacccgacgagaagaaactagactttcaaagtctattccttatcttatcaaggagagactaaaaaaggctcttctgactctaacctgcataataaggaagaccaagatacttctcatgacaagcaatcaaagtgacaccaagaatggttacataacgacctttattctcgtcaaaaacccaagaactaaagtagaagcacactttttaaaattcacagattgtctataagctttgtcataccaactcaaaaggtgtttaaatcttatacaagcaaactcagttgccttaaagaaaaagaggctatcatcagcaaaaaataaataggagatagaagcattagcttcatctaataaacgatccaatccagttaaaagttagattttaatttgattggatcggttatattggaagtcaatctcaaaatttaattgaaagccgatctaatcaaattatatctactccatattaaaaaaattatttatatttatttatatataataaaaaatgtttagattatatttttactagcttttttttttttttttttgaatttgtaatactttttttgtatatttattttcataattttctttttt

SEQ ID NO: 111808 - DNA, 5877 bp, Cannabis sativa
  modified_base (5705)..(5715): a, c, t, g, unknown or other
  modified_base (5837)..(5841): a, c, t, g, unknown or other
ggttggggtctaccagtgttgtgtatttgagactctgttttgccgcttgggccggttgaaagaaaaggacttgtaataatattttgtaaatgagtttttttttttatcccaacttttgtaacttttattttataaagtttaaagtattacaagtttattttcatttctattgttataaaagtttaaattatgtgcccttttgattagtaatcccgtttaggggattaaggtttcataagtatcttgggtagcatgcctaattatttagagcgttatagtgatcatcttgtttatgttaagaaaagaaagaggggtgatgaaaatattgtttctcttaaaaagaaattattttatcctgagaccaaggtttttatttaatttttaatgttcattatgtttcttgttctgtctatctttgttgttgtttatgttttagttttctctatttgcttatcaatgtttcaggatctagttcctgtagttgatcctgattttcaacctcaatttgttcaacaaacggacattggatctgataatttcaatggtaaggtatataactggtttcgtgtttatattatgttgatagtttgttttattcctcttctttgttttgaaatatttttgtttttaatcttttcttttttataacctttttataaccggtttcatcttgttattgttaaaagtttgttgtagatgtttctgtcaatgctcttcctgttcttgtgagtctggaaccagttctaaggttccagtcgaagagtataaagagcctaaaaaatttcgaaccaagaaaaagaaggtgagtagatattttttatcctttatatatgagtcttaattttttttctggttattttgtatattatgatttagtattagaactattttttttgtttttattaaaaataatttttgaaatgtttattttttataagttttttataatcggttcctttttttgtgtttaaaggatactgctgatgttaatggtgatgattttattgattgcgttgaaactagaaccagttctgatgttctagtcacagagaaaaaaaagtccactgttacaaaaactcgaagccaaaagaaaaaggttattagatgtttataaatttgtgttaatttttactgtatatgtttgttcttttctgtatatattttatttttgttgttttttgcaggttgggttaagtgatatcgatgttccaaaccaaccagcttgtcgtgtaatatgttctggtgttaaatttatggctttgaagggtactagctcttctctttctgatgattatgccaagaagaccacaagttttttaaatgtggtatgtgtttaaagttttttttagatatatattttgttttctttttatgtgtattattttttttatggaaccagatattttgaattattttttgttaattattatttttttttatttttttgcattttgtctaatttttttataactggtttttttttaaggaggttttcttgaaaataaaacctgaacatagttttgcaagtaagctacaaatttggaattacccttggtaattgacgagttgaatgcaaatcttattgattctcagaaggccttattcatgacaacacatttttctcactttttgaagatggatagtattaaatggatgattgtattgcctcgacttgctttagtgatggaggtgcatcaagagagagaggctattgagaagtggtttttcattcgtgattgagctgtacattttggattggacgagttcgtttggataactgggttaagttcggaagggtgttctgatttgaatgaatttaagcagaagatgtcattcaagaagaagatgtttgctcacttaattattaaggttgaacaagaagaggtaaggggtaaaattttgagtggtgattttgaagggtgtggtttatcttttaagtcattatttatatggctatgagaatggaaagaaactggataatgagttgttttgttttgttgatggggagctgtctgatttgaaaaacattacttttagaaaactattgtgggataggacttttcattatattaacttggcgtttagggatggtgacaatatcttctataagattgagaagaaaaaagatgaaaaagataagtgttattcttttaaattctaaggttatctgtttgcttttcttatttggttgtttgagattctgcctatccttagtcgtaagtattgcaagaggattgctaatacatatcctcgagtgctgaattgggagagtacaaacaagaagaaaaccgaaggttattctgaacttgtgttggaggtatttaataatcctgaggtacttttttattttaattggtttcttttttttccttattgatttataactagtttcttaactgttttttttttctattttgttaggccattgtgaaggatttctatcctgttggtcgtgagcttaaaaaatatgcactgtaaaatcttaagtttgaaccaatttatttgccaaaaaaacctccaggttttggtggcaaggtaagttttctctgtgtttgtgtttgtgcttgtgctttttgttttattggttattttttgtttgtatggtttttagttggtttttctataattttttaatgttgttattttttgtttgtttgtttgtttttagtttgctgaggtcgagtctgctttagtttgtattcaagaagactaaaagaagataatgtttagtattcaaagcttgagagatgagtttaggattaagtttgatgaagttactaatcttttaaagagtaagggtgggtcgtctgtgcccaatgatgtggatgatatagttgaggattcttgttctgagaatgtggatgtcgatggcagtgatggtaacttaccggatctattttttcagaggtattttgcttcattttgtttttgttcagctttataactggttattttgcttcattttggtttttgttttttttttccaattttttttatgttgtataactggttacattttagtatgttcttgttttttaagtatttttcttttttagaaaccggttttgataatgttttttttttgtttttttaggtcttgtcgaaatctgatgttcctaattttgatgatgagtctggtggattgcaattatcttttgtagggaaagataaggtgatttatttgctttttgttattagttatgtgtttattataactggttattttttacttttatgtttttttattcatattatttttttataggttcattctgggttttgtgaagggaatgatgagggctatcagtttacgtatgatcgcataaaggttgaccaatccattttggatttagttgacaacctcactcgggcacatgcttccccagagagtaaaaaaaccaatcaatgggagctggtttcaattcctgaatccatatcccctcctgttgatgatgctgaagtactcgatgtagtacctttgcaatctaggatcgctgccaagagacaagcaaaattgggagtccactgtagatcttcctttgtcaatgagtttggttcttgtgaaccaaaagatcaaaagaagaaggataatgagcatttttttcaagaagaggtcaatcataaggagatgttttcttttgtaagagagattgggatgaacactaagtctgaagattgtcaggaatttattaaatagattgaaggtgctcgtttgttgcagaagaagtatgtataatatttcttgatcttgttcttttttttcttacgttttttattttagttactgaattctcttttttttttaattggttttttattatgattttggattgttttgttgtattaacaaaaaaatgaaaaatcatatggtgttattaagcctcctttagattttagcattgtgcaaattgaagacaaatcctagtttgtcattttacagacttgtggacaagagttatttggattggtatgtaactggttattttgcatgttgtccctttttttttttgttgttttggcttgttagtttttaattttttattgtttttgttttttgtttgtagcatttttatgttgcattttattatcttaggaagagtattttgtttgatgctaatgtcaaaaagagagtgatgactacacacacctattttgatgcaacattgaagggtgtatatgatgttttcattaaagctaagcttgatcccagtgttataaggtatgacaacatggttactgactacattctgggccaatataacttctgttttcagccttgagttgttgtggatgatgttgttggtccctgtcacatttctctgcaacaacattgaatttttctccacttagctttttaagaaggaaaatatgtgtatacaattcaatgaagaataccaagaaaaatcaaaagaagattttaccaaatcttcttgcatattgtgagttactgccctatatcttagatttcttaaatttttatgatggtaggaatgatcttagcttggactcaggcccttatgttgttcccaaggacaccccaattgcatatgagtttgtggacaagcttcctactcaaagctcaaggtaaataactggttattttttttgtcatgtgatttttttctttttttagtgattgtttttttttctgttgaaataactggttatattttttttaattatttttgtttgtcttcagtgattgtggcatgtttgtcattaagtatgttgatttattcattcgggagaagattcatgagattcctccaaacatgggtgacataatagcaaattatagggatgacatcgcagtaacattgtataactatatctagaaaaagatcaatgaaggatatttcactgaaaatatatcaaaaggaaagaagtcgaagaggaagaactaagtgacttgatattatcacagatttagttttgtagttttatcttgaatttttagttggaacaatacattttgttatgtttatatttagattttgatttttataacaatatttggaaccagtttcatattttgttaatttcttatatatgtttctatttatacagtgttttattttttttttcttttgtaatatatctttttatgtttttacaatttcaataaaaagtgtcttttatattctgtttgttttatttattatttttcctttaagtagaatcgttttttttttttgcttgcttgactggccttgtggatttagctaaggttccttgaatctttgaccgagtgtcgttttatatttgctgagtggcttatttgaatcttttattgagttgcatattgtggaagctagtatgattgaatagattatcttctgtaagagataaatattgtgtttatctattttagtctgttgatttagagttttcctttttatttttatcttacagaatttgttttatttcagttaatattttctattagtagtgttattttttattttgaaaatttttattaattcaaagtctttattgttttagtggtcttgttatatgtttagtttcaatgaaccggttatttttttagaacaaaaaaaaaaaaatcattatcaatgcctttttttggtgtgaaagtttcatttttatgtatattgtttaagatttttaacttagttttctttgtatgtattttatagaaccggtttcattttgtgttgattatgtttaggctaattagtaatttnnnnnnnnnnnctttgacatataccaaatcatgctccctcaatttttttagccgttaaaaatttcccctgaactattgagattgttagatttaatgttacatggggataaaattactgttacaccctttcaannnnntttatccttaaaatacttggccacctataaatgata

SEQ ID NO: 111809 - DNA, 7688 bp, Cannabis sativa
agagagagagagagagtctaatttacggggcatgccatttggatggatgcagttgcattgatagaaattccttttatcacagagaagtgtaaaggacttgtgtttcaaatttttggtagagaggagacattagatttatttacatgatttcttgtgtgctttacttttatgtaataatattcaataataatatatatgtaaaaaataatggaaaatcatatgatgtaattgatgtttatctatataatgcatgttctgtctatgttgtgattggttgttgtaatgagaactaataaggctgtcggtggacattatgtggtagttgctatgcaatagctctctaataaaactcaataaaatagagcgtgagtttcaacttcttttctatctttctagcctatactacagagtgtggactagatttctagctttaagtaaggagttccttttggtaacagtgattgtcattgtctacctacctgctacgtctattatccaagaaagctacatatcatttatggtctattctctaaactaaccgcatattcactcacatagatttaattattccttcttttgtttcaaacaaaccttacggattgaatttgtagtcttaagtgctcaaagcatgatcgtttacgctcaaatgtgttgtgttaaaccaataacataaaaacatgtaatctctccttatcttagcaagaacaagaaacacggctccccgatttggttgggacatcaaatgataaaaaaagacatacaaataaagacacgcttttcaattccaaatctaagatatattattcagcaaaaaataaaacaaacctacaatattacattattactaaaaattacactaattattaattattatgtttctattttttatttaaaaaaaaatgaaaagaaaagaaaacatgcgcatgagaatctgaggagatagcattactgtcttttttttttttttttggctaactcaatattactgttattaaaattgtatttatgttcacgtttggtctggtctggactgctcctcaagcctcaagcgaagaagagtaaagagaaaaacagatggaagctcagctgaagatgatgatgatgatggtgtcgattgcagcactgttggcactctctgcggctgggaatgcctctgctctcactgaatcacaccaagaaagagtcttttctctgtttgacgaggatggctcctccgccgcagctcaacaacagcctcagcctctcatggttcccctcactcttatctcctctgctgcttctactggagctggtttgatctctctcactctcttctttttagccatagatctcttcaaactcttaaacatgtttcacctttattttacattcctaaagttccttgcttttcgtaagaacacacacttgtttggaaaacccaagttgggtcctctctcactcacatattcagtatcacttttttgaattttgaatatcaaaacgacagtgtgcttggatggaacactgcccggttaccatattcacccaggctccggatcgggagcaaacagctggctcattcagttggaggtgctatctcactcactcactcactcatctcatttcactatctcaactcattcatgtggatccattctctaacttgagcttttacttttaatttggtttctattctattctctaatagggaggagggtggtgtaatacaatccgaagttgtgtttatcgtaaaactactcgccgtggttcatcaaaatttatggaaaaacaactgcctttcaccggaatattgagcaataaacctgaagaaaatcctggtctcatatttatttaacgatatactgtttaagtatgcttagtttgcagtgtacattgatttaacgagcttacactatacgctcacagatttttttaactggaaccgagtcaagctacgttactgtgatggggcatcttttagtggagactcaaagaatgaggtttaaacaatatcatgattaatcatacttactgctacctacccctttgataaaaacgtgtttagtcttttccttttcattagttgtattgatttctagaatgatttggattcttctctcaggcttctcaacttaatttcagaggacaaaggatatggttggctgccattcaagagttattctcaaaagggatgaagaatgctcaacaggttttgattgatgctctttacagccaatttcattgtgtttctttgaaatttatttggctttgattgatgctctttagctattatccatgccattgcattttagactcttctatctggatgctctgctgggggtctggcctccatactacattgtgacgagttccggagcttcttccccaaaactaccaaagtgaaatgtttaagtgatgctggattcttcctagatgcgtaataagccactcttttagcttctataaatctttattattcttgtggtttatgtcactgtggaaaacacaatattgaggatgcaaacgacaagcactgtcaatatgatagtttgtttatttaactgtgcagaactgatgtatctggtgggcacaccatgagaaatttgtataaaggcgtggtttccttgcaggtagtgtgaatttataaagctactgttgggtctttgctgattcgatccaaagttccctaagttcatcaatgtgttctattgttgtaacaaacaatttcggaataaggcttggtcgaataatagtaaattatggctttcagaaacatttgtgcttgataaacttcttttttgtttttatgctgacaaaatatttttccagggaatacaaaagaatttgtcaggaagctgtaccaaccacctggatcccacctcggtgagcttctgtcttttcttgattgtgttataattgcacaagtttctgctgggaattgataaattgtctttttctctctcagtgtttcttccctcaaaatttggttgcaaatatccagactccaatgtttctattaaatgctgcttatgatgcatggcaggtaatgttctattttcatactttttattattcataactatatgcattattgtatcagggaccttcattctaatagcattttctttacccctcttccaaacacatggagaggaatttacagtcattacttgggatgcttaccgagtttactgtaaacatatagtctagcattgtcaagtttaatcttttcagattttggctacaacaacattctatctctccctctcttttcttttcttttcgtttttccttagctaagtgttacatttcatgtgtcgaccaacagctccaagctagtttagctcccccatcagctgatcctagcggttcatggaacgaatgtaaattaaatcatgcacattgtaatgcatcccaaatccagtttcttcaaggtgatcttttctaacatgtttttattttctttaagcatattatattcacccacattagcttaatgtttccatttcttctatctgaattaagcagacttcagaaatgaaatgattagtgccattaaaggtttctcattgtccagtcaaaatggattattcataaattcctgttttgcccactgccaatctgagagacaagatacatggtttgcggacaattcccctgttctcggaaacaaggcaagctctacctaaatctcttattacctaatttttcatatcaatggcagtaagattccttttaattaagttggtaggcatactataaggtataagtatgagattgctgctaagagtgatgtcctacaggcagatgctttaagaagcaacctggaaggcctaagagtacactgaatagattaatattttaccatagcaaacagttggggtgccatgtaataataataaactaaaaaatttatgtttttgtctgttgaaatgaagggtagctaattgactttggtcacattcccattctcaggcaattgcggtgtctgttggagactggtacttcgatagagaaaaggttaaagaaattgattgtccatatccatgtgacaacacctgccacaatcttgtgtttaagtgagtacttaaactaaccattcattccttagttgtcacctactagtactacctaccattgaaatatcaattgaagaaattgtatcaatcatttttatataaataaaacattcaatgttttgcttgcataactgtaccattcatttcagttgattttgatctcttaaccaaagaagaacataaaactctaatccaatgctctcctgcctggatattagtatattcgttttaacaattccgtgaacttgactttctaacaccctagatattagattttttttttctctccatgtcaatcctgatttgtgagagaaactgaaatgcatatttatcattgcagcaatgaagattcatcccccattcccaatctcatggtctatgaatctaagtccacaagattaacaacatttatcccccaaaatctgtcatctttggcttccatgacgcctctaatatgttttcattgcatcattctattatgttgtcagggttttcggatgagtaaatcaatgctattgtcctatggcctcgcattgattttattttcatacaatttcctgcagtccagagcatgatttttgtaaaacgcacttaatttgtaactttgttcgatcagtgtaacatgtcttggtaatgcattcttaacgtaaaatttagatagagggtttactatgttggatcagtgtaacatgtgttggtaatgcatatccattgtagtaattattgaaaatcacacgagtacaaaaatgtgagcaaatgacattattcctctacacccaaaactaggcaataaaaggccatgtttttgtgtattagtatttacaaagtaggagaagatgtacagagcataagtagccagagcaagcactcacaacaaataacctcaaaagccaaacaaataaatatgttgaaagtaaactaataactgtattcattccccttcctacaactgtgtatttacattgggatcgacattcttctcatggtctcacccccactcctatccccactcaaattgtatcaaaagttcatataacaaatcaaatgaaagaaaaagaacaccggtatatgccgccaaaaaaaaaacagagagaaaaacacgaagactaattaaaaatggctaaactaaaccaaaatcaagtaccgagtcaagaagttgcgtgtcgagatgtggatgccagtgccactgcttgtgcccaaaccttgagacgagccttgacatctcgagggtcgtcgcctggagtgccacaattcgtgtacaacagagaaattagaacaacaataacaacactactaaacaaacaccaatatttgaagtagatatatgtatatgtattatggatatatacctgggctagagatacgccaactaggagaattgccaccgctagtagaactggcagtgtcaaaggtcgaagggataataatattagaggggacaacagtatccaactccaactcaaatcccagctctttacaagccttgacttcgtccaaatccattcgcagagatctctgccctccctttggcctggttatgagaacaggcagtggctcctgcggctcctcaatcggctgatgatcatcactactcaccatccgactatgactatccaccaaatagtctttcatctcccaaaacacactgtcacgcagcaatctctctctcatgattctcctcctcatcctcatcctccgccgccttctgctgctcttcatatcgtccgccgcctcagtctcgctggcacactctttgtagcctagaaccacagctgggatcggcgtggtaggcccccgcgtcctccgcctcggtggggttgccgggagtgagtagcagccggcaggggatgcgtctttgtctgagtcggaagatagtagtcctttgttcataggaagtggaagtggtttattcccaatatcggagaatccatcttccacgtcgccatcgaagctttcaatggacaagcgtgacatgtacgggcccatatcaatatcaatatcaccatcgttatcatcatcatcatcaggaccatagattgagctgctggtacagatggaaagcctggagaagttttggtttgggttttgatgaagaagatgatgaggatcatcgaattcaacatcagcatcagcttccaataagtcatcttcttgcatagaaataaatgagcgaattgtcatactctcatctgaagccattggtaaagaataagaataagaatagggacaagaaggagaagaggaagagtgagtgaatgagtgtttgatgctatttatgatgttgaggagtgtcaaatgtgagagtagtggcgtttgagcttttgtgtgtcattcgattctattctactgatgatgataaggtagttaaaggtaataagattttcatccccctaaacaccttccactatttatagctccatcctttgctttttaatattcattcaaatcattcaagaaatttccttatatgccctttcctcatctacctttattactccactttttctcttttttctccttgtcatggtcaaatcacgatggcccccactttttggtgagaagagaaatggttttgaattaaagagtagagtaatggagcgtgtaattgtgtcacaatttggtaaaaaggaaaagtaatatattaattggtatggttgagcttatttttgttgtgaatatccaatagtgaaagttataagttgaaagaactaggaaaaatatgacaacactactagagatagtagtgtatggtaaccgagttaactgttaactgtaagaatagtaaatgtggtgatgaaatccaaaatgaggagtttttttctttattggtgtgtgtttgtgtatgtgtaaggttatccaaaactaaaacggaagaggataaagatgaacccttttcatcacaaacatgtttgtaacagtttgaaatatatctttattcatttatttattttttaaaattgaattttatttattattaatatattatatatatttgtttgggctaagaaatcattaatattgtattaaggaaaggtttggttggtttgactgcatttggtttggtttggtttggtatacgtggcaacaaagagatggagagtgggcccagctatccgaccatagacatttgctgatgtaatgtgaaacgcgttttgaacactgaaataataaaattttaaaaaaactcatctcctactaagagtcatgacacgtgtcaactctttcatttctaatcattctattcgtattcttttcttctttcttataatttttcagatatttactatacagctcttttgtcgtcttctttcatacaggtcacatgcattatcacgtgtgtgattgtgttttctcataattttccttttcatgttttttagtttgaaaagtgcttgtatatattttttaatattcataaaattaaaactataattcagtttaaattttaaatatattaaaaattgtgttaaatttaacataaattaaattttatacaacaataaatattattatttttatttactctttttactactcattaatataataaatagtttagaaaaattctacaatgcacccttttaaaatagatatattgatgcacccctatctgttttagcatccgaaata

SEQ ID NO: 111810 - DNA, 4356 bp, Cannabis sativa
  modified_base (4225)..(4232): a, c, t, g, unknown or other
gtctacctattagtaacctgctattacaggttaaataaaaatgtaaccatatgattacaataaaaatgtaaccattgaatagtcacccaattcaaagaagacataactttttcatttttacattttaaaatagtcaaccactttataaacccaaactgtaaattaaaaaaaaaaaaaaaaatagtatatacagtaattcctctaattaataattatgtaattgtagtgtaagttttaaacatacatactaaaatagtcacttaccggtgaataattagaaatggttttgacaaatccagtcccgccacgagaagctcgatcaaattcatcctcaacgtataaactcaatggtcccaaaccttcctgcttaccaatgaataactcaagaagagatgatgatgatgaggaatagactacttgtgaagatcacgttgcaatatataattgatcaaagaaactataaaaaaaacccaccttgaaataattgccaactggagaggcatatacaagaaaagtgtattcaggagcaggagccaaacccaagacaggaccagttccaatgagtagaggcctaacataaagagaccctttttcacaaggcggcacctgcacttatatagacgtattataagcactagtacaattttttctttttggaaatattcagctctttgtgttagcaacattacaaacgaacaactttaattacaatctttgaaaataatctccacccaatctctatctatttcactcatcttatacatatcaatattctttagcctgtgcaatctcaatatatagttggtaatttctcatctatgttcctgcttttccacacttggtagacaagagcagaaattgtagaaataaaaactttccttctccaagttgtaactttacatattttgatccagtttatcatcccaatcgtattctccattcccagccatatgcaacatctttccaaaagcaatttactataatggcaataaaaaaaataggtgctcataagtttcctccttgctcccacacaccaaacagtcagaaattggggctattccaaatctgagcaacctatcctttgtaattggcattcatttgatggccagtcaaataataaacgtgtgcttcggaacacaccatcggtcccaaaccagagaaaaatgccacttcagaggaggattggaagttaacattttgcatatacctgaaataatctattgaaagaggaatctgattgagagcaaacacctttgattctttgcttggtttggacaattcttttttgttgggctatcaatccaagtcccacattaaaagaataagtaagagttgtcttaagtgttccacctactccattagtatgagatcttttaagaatgtgtcaaaaaataaaatcgtaaatatctagccccaaaaccgacaatatcatattaatgtgagagtcacgctaaagtagcagccccacaaaatggaaaaacgggacctaacattatccaataccatctcgtatctagtggaacctcatagtcccatagtcctttccctttatgtataccgcattaaccaaattaaccgataagttgtccttcttttgcgagatagtccatacatgtttgccaattgctccaagatttcaaagaacgatatctttaaaactcaaaccccttatgtccttggcttgcataactcggaccaagctacaacccagccccattcgattcctcagtaccctctccactaataagctctatatatttatataattctgtgcactactgacttaggcactaataatctgagacaagtaagaattaatagttagtagcactgaatttaaaccactctccataagaaagattcctcgagctccaagtcttaattcgactaatcatcttatcaactggaaattcacaatccgctctaaatattctcttgggacttatcttcattacatgatatctaaaaggaagaatactctttttaaaaccagacattgcaacatcaatctcatatgtggtcatacttagtctatacatgtcagacttattatcatttgctttcagacgtgaagtctcagaacatgagcctttgcagctgtaaagtctcctttgcaaaaaagaagaagatcatctgcaaaacatacatgagtaagtcaaagacttttacaacgaggatagaatttgaaatcctctccagccgccacttgaaccatcatgcgagacaaatactcaaataccaatgacaaacaacatcgacaatattagatctccttgccgcaaacctcttttagaggaaagaaacccatgtaacactatatttatcatgaatgataaactaggagtagtcacacatataataataagctcaataaatcttgtaggaaaacataaagcttcaagcatatgtcttaagaaattccagtccaacatatcataagctttttttttgcaaattaattttcaccatacaagctgattttggacttctcctgtcatacctcttcaccatgacaaatcatgatattatgtgcaatttgcctgccctttatgaaactgctttgattctcagaaataatgaacgggagaacttttcttaacctgttacaaattagctaggtaaccattttataaatcatagcaaacaattggtctataatctccaatagtatcaggatagaaattttttggaactaaggtaatagtagttacattgatctctttaagaatattacccttatggagaaaagataacactacatcaaagacttcctgcctgacaatatcttcatgcctctttaaagaaaccactcctatatccatcaggacccgaaaccttatcaatgggaatcgaaaaaagggcattcttgacttctcccttggtataatctctagttaagaagtcggcttaccagagatgaatttcccttcttgcacaattttcctctttacatgtttcccgtttgctaaccttgttccaataatactttcatagaacccattgaaagctttaataacatccacttaagtatctacccttcttccttctttgtctcggattgagtagatcgaatttctgttgtcttctcttccttatgctagaatgaaatagcttggagttttcatcccctgccctgtcaaagctatcttagctttctgtctccaagcattcataaggttttagtgcacatttacatagcttcttcatgcatctatctcttttgtaatcttgtcttccgttggccttatatagctgtgattccattagacaaacaatcatcctcttataagcagtagcttcttgtctcttcaactccctctgcttgtgacgatctcgaagctctcttttgaaccattttatctttataacatcacgatacatcgaaaaaccagccatctttttagaccaggttgcattcactatgtctttaaaattgtccaccttactccagtaactgaaataccgaaaagccttcctcacattattaatactagggtacacagtaattatagctggacaatggttgaagtcaccttctggggaggaaagttacttcagtcatagtgtagatgtccagctacttcgagctagctaacacccaatccaacttggcgtaaatttctagcacttcctgtttattgctctaagtaaaatacgttccattatattttctgtcgtccaaaccacacacttacttcaacacaatattgaaaaggaacaaactctattgcattatcatgataatccaatctttcatacagaacagtatgattattgtattaaccagcgcttacaacactctcatttatcttcctcaaataaaattgaatgcacgtaatatgaaagaaaatagatgaattatgttgactctctttctaattaatattaatatatattaaaatatgcatgtattattatttgatattaattaaataagtcatatatcagaaggagataattattgtattacccagcgcttattagcgagtacagtttgcttgactgcgtggacaaactgacacacagagggggagggcatgcacatcctttcggcgccaatcttcattcgaactccgttttggtctggacggaacagaagtaaacctccatcttctttcctatatgcttttgttccttcaaatattccctgcacacatcaagtttctctcagacgcaaaattttattattacttaattttaggaaattacctcatatactattttnnnnnnnntttttttttcaaatttacgatttatttataaagtggttgcaacgcttgttgcaataaggatttttgtacaattttttgttgcaatttaaattgcagcgctaattgcaatatgaatttctatgta

SEQ ID NO: 111811 - DNA, 2112 bp, Cannabis sativa
ttttctaactttatatgtgtttattttcattgttttaggattcatattaggttgttaatctaacatacttgttagtaaatctagatcctggtgacacatcttattttcatgaacttcggacaagagtagtgcagcttattcatttgtgacacatcttagcaatgtcatggagaagccccttctgtacatcacaccatccactattaaatatcaagcagctttcttcatcattttttgagccttatacctattgcttggaagttcaccactattaaggtaggctgctataagagtcatccaatttgatgtggtgtccaccatctcaatttcctccatgcaagtgacattaggttcttaaagaaactggattgggataaggttttctttgtctgtaactattttgctcgctagcagtgctagtgcatcagttgttacattttattctcttagaatctactggagagtgtatcccttaaatttgtgtgagcaggtcttagatcctacttaagtacactgccattttctctccctgattcgtataatccaataagatatgatttaccaccaatgtgagtcactggaaatttctagaaactcagcacaaacctcccaagtaaggtttagactcctcattgtggatgctttgaacccaaacttaattattttgtgcacgggttgccccctaagcgtgatgagaggaatcctagccctggaaaattgatcagtggatgatccgtccatatgtaacttccaaattggtttattttcaatgctctcttctagtgggggtgcttttccttgctcttttttcgtacttagtgttgtcttttgagctacttacctccttgcctgtgcactcaaccataaaatctgccaaagctcatccttttactgctgtccaggattgataagttatttcatattgtcctaactcaatcgcccacttgagcagccggccagatgcctctgtcttttgcaaaacttggaacaaaggttggtcaatgtaaacttgaactagatgagcttagaagtagggccttaactttcttgtggctaggatcaaacagtaagtcaatttttcaatcgggcggtatcgactcttcgcctcaactagtcttttgctgatatagtagactgaatattgaacattattgtcttctcttatcggtgcgatgcttacagcatgctcagtgactgcaaggtagattcctatctcttttccatccaaaggttttaagaggatgtgaggttttgcgagttgcttttttagctattaaaaagcgttcttacattcttctgtccactcaaatttcttgttacctcaaaggatgttaaagaaagaaatatacttgtctgttgattttgagataaatctacttcgttcagctatccgaccagttagacattacacttcttccaccttcgttggcgacttcatatctagaatggcttgaattttctcttgataagcctctattccttgagcataaacagtgaatcaaagaaacttacctgagttgacgccaaaggaacactttaagagattaagtttcattttgtatttttgaggattttaaagaattcatctaggtcctctatgtgccctcagccattctggatttgatgagcatgtcatccatatatacttccatgttacgcccaatctggatcttaagcttcttattgactaacctttggtaggtagccctaacattcttgaggccaaatggcataactttgtagcagtatagtccaacatccgtttggaaactagtatgctcttggttgggtggatgcattcttatctaattatatcctgaataggcatccaaaagcttaggatttcatatccagttgtagcatccacaagctgatcaattcttggaagtggaaaacaatcttttgtgcatgccttgttgaggtcagtgaaatcaatgcatacttgccatttcttgttcgttttgtgtactagtacggggttagctacttaggtcgggtagggagcttcaattatgtatctatttatttggagctttttgttgtgaaaattatattgataattgccacaagtgtacacattcacaaacaagtaatacaatgataagtaatcaa

SEQ ID NO: 111812 - DNA, 3116 bp, Cannabis sativa
aaagaaataaattaaaaaaaaaaaaaaaaaaaacagaacacagagtgttcgttacttcgtcatcttcttctttcttctttttcctagagagagaaacggactgactgaggaaaatactttagagagagatcaccatgggcaaaaggagcatgaagctccttaagatccttgtccttctctttgctttgaactctctctccctatgcctctacttcttatctcactcaaaacccttcttctccagtctccacacccataatccaaatcatcattctttgactcttaacggcctacccttgactgaaaatcaacagcttcttcaaaaccatccacggttctccaagccatggcctattcttccgtcttacctcccatggtcgcagaccccagacgtagcaactcgctcctgtgaggcatattttggaaatgggttcactcgccgcgtcgatctgctccggcaagaggccaccggttccggatggtttaggtgcttgttcagtgagactctcagaagctctgtttgcgaagggggggcgcttaggatggtgccggagaaggtgaagatggctacaggaggagagacgttggaggaggttattggacggtcggaggaggatgaattgccagaatttgaaattggggcttttgagctcgatgggggtcgaagatattccggcgagaaaaaggagcttgcgagtgttgaggttttggagaagtacgtgccagaaggagaggtcttgaggcacaccatgcgtaatttgattgagtctatcaggatcgttccggctaaggagtttgaatgcaatgaggttggttcaagttttctgatattttgtttctggcagttggattttttcacgtatatatgtatgtttatatacgtttactggatcctgggttgtagttaaatttgatattaaggtgagaaaactctccaaattcaaagctttaactgtgaaatcttgagtagaattgagtgatctggcttgagaagccggtaaattgagtgaagacctattaatgctggatggaaataagataattaagtattaatgtttctgattaatggggattacattttttggtaataatggaatcttagcatattttaagatataggacttttatatcatatattgaagtccttgaagaataataatgagcataaatgtatgctcttattgatttgattccttaattcttgtttatggatttaaggttctgatatggacggttctacttgcagtggattgaggagccaacacttctgcttacacgctttgagtatgctaatctttttcacactgtcaccgattggtatagtgcatatgtgtcctcaagggtaaccggcttgccaaatcgaccacatttagtgtttgttgatggacactgcacggtatgtgtgcaacattctaagttttctcagtgttatgaattggaatattggtgtatgacttttttttggttttgcattaatcttgatttgatcctgttctcgttcaccaatcattttctgctgagaagccagctaaattcataattgtaaattgactgcaatgatgtgaagacatggttagcaaaaatttaaaggagaagtagagtcgatgcttacgacagctgatattttggttgtttccatacaattatctcgcttcactattatatatctttcatcagtagtagtaatgcttggcttcatgtaattttcaaatcggagtttacttttatccttcaatcatgtttgtggacatatttcaggcacccttggaagaaacatggaccgcattgttctctagcctcagatatgccaaaaactttactggcgctgtttgtttccgtcatgctgttctttcacccttgggttacgaaactgctctattcaggggactgaatgaagaaatagattgccatggtacatcagcacaagatctgtggcaaaacccggataacagtaagactgctcgattatctgagtttggagaaatgatcagagctgctttccggtttccagtgaatagacatcgtgctgacggatcagcttcaggttataacatcctctttgttcgacgggaagattatttagctcatcctcgccatggtggtaaagttgagtcgaggctcagtaacgaagaagaagtgtttgcttctttaaggagctggatttccactcgtagggattgcagaataaaccttgtgaatgggttgtttgctcacatgtccatgaaggagcaagtccgggctattcaggatgctcatgttattattggtgctcatggtgctgggcttacacacatagtttctgcactaccaaaaacagtggttctggagattattagcagccaatttagacggccacattttcagttgattgcacaatggaaagggttgaaatatcacgccattaaccttgagggatcttatgctaatccacaggttgttatggagaagcttagcgacataatgagaaaccttggatgctgataagagttcgttgtgcacctatcattgagcatagttcttaaactcttgagatgtctcttaccacaaaatcggtcatttccaagacttggatttttgctcttgctcggatgtttgctcgatagtgatggaatttgttcttggaaacattagcaactcaaatagagaccaaagagaggcggcctagtttgttgattgtatgggcatttggcaattggcagagaactagacctagaatggtatgattcatgaactagagatgaattgttcagagatttgtgtgttctatctaattgtcaaatgcccacaaacgattgttcagttataaaagtataggttgatgacaatgacatgataggaatgatattctttgttctaaacacaatatttttgtggactagtagataatgaaacactgattaatcattaatgattttcttattttggatagagtgctaccattgttataagtctttccatgtttttgaaacacttaacttttaattgggaaatttgaattaatatgtttacattagggctgaacatttatacccgcaaatccgaaaacccgaccacccgccccgacccgctaccgaaaaaagctgaaaattttgaaacccgtgtggtcgggtcgggtc

SEQ ID NO: 111813 - DNA, 9033 bp, Cannabis sativa
aaaaaaaaaaaaaacttataattgggaggggatccgagtattgacccgattgttccgggctctgacttccgatccgaccctttccgttaaccgttttttctggctggttgaagatgcgggttcaacccttacccgcccgatgattgttctacgaaatcccctggatttgtatgtagattcgctcactccatttcttcttgatctcactcttcgtctctcccgatctcactcctcatgactgttaaattcccgattctctctttcattcaacaatcaacaactttggtcttactcagactcagtacctcacactctcgcccatgtatattcttaaatccttattctcgtttcttgctctacaatggctgcttacttacttactattttgttcaatttcttattgtgtgtgttcttgcattgatgggatttacctagatttttggattgtttcaattctcttttcagaataatatcaacttaatcatttcagcggcttgattggtatccaattctctctctctctctcgacgtttccctctccctcagctgcagccccaaccgccgccggctcccacccaagacccaagaacagggtagttaaggagagcctcaacaattggttagtttatttcttttgtttttttttcaacaatttgcttgatatgtttgaatataatagcattgattttttggtttttcatttattttccatttaattttttgtaaatacaaggatgaaaaatgtaattgttgctcactcttagattgaaactaggaaaaagtaacgttttttccactctttttttgttcagaaaaatgggttcttcttcatatctgtacctcgtgcttcactggttctgtatggccctaacaattgtcttttgagtgcttaagcatcgtttgaaaacaaaagcttgatttttttttatgagtttgtacaatttgcaatccagctcacaaagacttcttggggtagtgatggagtctttattgtggtcttttttcttcttcttcttcttctccttttctgctttcatgtcatctcgctctcactatgttctgatttttgtttttcttggctatgtagtgcttaactagcaagcatattgagctaacaagagtgaccttggtggatgttcgaggccaggtatcttttgattaaatctatatccttttcccccaactttttagttagaaagctttcttttgatgtgcactttaaaaggaaaatattttggtatatgttgccgttaaaccgctaaattttgtgtgctaagactattgtcaatgttaatgagttttattagttctgaatatgaaagctaattttgggtacaatttctaattttgtaatttattcagaacttttgtgaggatgagagtttcttccttaaattatgtacttaaaaactttcaggatcattagcaagattaacatttcttgtaaaaaatagtataaagacgaaggcgatgcagtggtactatgtagctgcgctactcactgttcttaccagttctcaggtcagtgaaatcctctacctcacaagactttttacatttttctatcaccaacttcaaaacccaccttcgtaaatctatcatttgtacatgttaagagtttacaattttactgatctcttccatttttggctccttgactctgatttaaagatttttgagactatttaatctctaaaatacgtggggaaatgtgtggtttaatgcaaacccaattcacattggttcactttttatacacatgatcatgtattttcaacaatgtaataatgacagattatgattgacaaaaaggctctattataattattagcaattcatgcttatgttttccatgtcatataatccataaatattcattctaattagtttaattgtttcttaaaatatatacatatgtcgtactgttatgacaagcttttctggtttgttgcaatgacattgtaaagattatagaaaaacggggtaactttgtaaaagagaatttgatactgctttatatgttttacaagagtttgaagatcaaggagcacatattgcaacatcatgttaaaattaaactgaatttattgtagatttgtacatgaaactatggaagtagtggtagtggctatatttaaatttaacaactggatcagaatgacaccaagaatttaccatcaaactgccatttgcactttatagattaatacataagtttgtttccttatctcatgtttcggtaaagtggactgaaaaatgggggatacatgatgaggttttggcggctattttgttgcttaagtgagattgacattattttattagaagcaagcattttttatttcgatttttgtagcatttaaatttgctatttctaagcactttatatatgttctatttctataaataattcagggaatactgactactctttcccaaagccatggcaagtatgtatatgactatgcaactattccatttcttgctgaagtgttcaaggtacttctcttaatttaacaattaaaaaaatcattttcacttttcctcttaattcatggctaaaaagtagttttggttttccagctatttagtaatattaatctttttctttccagcctgaaatcaaatttactgatttctcgtgatgattttgtcctttaaactgcagctattagtctctagtttactactatggaaagaatgccgagcatcaccttctacacgaatgactacagattggaaaagtgtgcgcttatatcctattccttcagtcatatatctaattcacaataatgtgcagtttgctactctggtttatgttgacacatcgacatatcagataatgggaaatttgaagattgtcactactggcatcttgttcaggtgcttgttttattaacattcaaggcgataaaaaaattggacggcctttatttatgttagtttttccacttcagcataattgtttttaattgtgttttttggttttgaattttatgcattaggctattcctaaagagaaagctctctaatctgcagtggatggccatcattctattagctgttggaacaaccacaagtcaggtgatttacttaactatccttttttaaatcaggggctgtttgccttgtttctgggctggactggactgccatgggttgcccatgagtcatgatgaatgactttaattgtagttatattgcatatagaagagcactagtatagggtgactaaatgagtttttccttttgttagataaaatagtcaatgtatacagttaaatttatttgactgcaatcttctagtaactatgaactactcaataaacctagagaagtgtttataccagaggccgacagtgttatcagggccagcagcgccatagagcaccacatttatgattacgagtttatttcttagtaatgcaatttgattttcatgcagctataagggttcaggaatcaatattcattttatattcttcccctacaatggtgcaggttaaaggttgtggagcagcttcatgtgattctatattctcagcaccaatccaaggatatatgttgggtgtcctatctgcttgtctttcagcattagctggtgtttacacagaatttttgatgaagaagaacaatgatagcttgtactggcagaatgtacaattgtatacgtaagtatatatctttcttttcacttcaggaagtgtaatactattgtaataatcacttgaactaaggatttttttggtcaatctttggccttttcgccgctcaccatcttcataatgtctcaaaataatgtttctttcctgttcactgcaatcacaatttgcatgcaattaattgtaacaatgagaagggatcattcttttttcttctatttatttattgatatattcctaaaaagcttagattttaaagggtatccactgaattggtgatatttgttatttcaacctttgcaggtttggtgcaattttcaacatggcacggcttctcgtggatgatttcaggggtggatttgagaatggaccttggtggcagcgcctcttcaatggatacaccattacaacttggttggtggtcttaaatcttggatcaacgggcttgttggtttcttggctgatgaaatacgccgataacattgttaaggtataagtttcttttctttgctccctttagcttttgcgatttttcagtaaaatatgcttctatttcataaaactcttggaaagcaacattttgacaagtagaatttcacaaataaacttcaaataattcttgcattattattatttgtgaatgcagatttacgattattttttacactatgtatttggatctaaaccttggttgtgattaacatgttcttcgtcatccaaacctttacctatatataattcatgtcaggtctattcaacatcaatggcaatgctgctgacaatggttttatccgtctaccttttcaacttcaaacccacattgcaggtacaatataatctctactctccatccacttcaaatcaaacaacagctagaatgttttctctacctcatgaggtactgaacacaaaataaatcactaatgatttttgtaaatctctttctttgatgatgttacagctattcttgggaattgttatttgtatgatgtcactgcacatgtattttgcaccctcaaatgtgctcgtagacatacccgtgacggttaaagctgctcccgagggtttgaaagatgtttcagttgaacgaagaattgaatcgtgatgcttttcctagttaaagaatctgactttaaagtagacccaaaaagaagttgcagctaaagatagctggctgcatttacagtgtatgcttcaagaaacatacccacccactcctggaatcagaagcttcttctttagaattggcagtgtcagaacattgaaaaaagaagaattcagcactgttggagcttccatgaatccatttttttttaatcttcattattttgtttattatatgatgaatatttctttgatatgtgctaatatatcatataaataccagggctagcttccaacaagttgaactaataccaaattatttgttcactcctttgtaatatactattcctattgaccaatatgctcactccatttttgcaatgctcactccttcgttctctatattgaattggttattggaatgagtagtgagtattggaatgaggagtgagttttggtcttgaagaatagttgaagataagatgacatgtatggtgcttcttgtgaaggtagttattaccaaacaggtccttccccctgtgtttgttttggtgcattctttcttggacacagtcccatattcattttatgagtatggaggcatttcaaccattggaggggttcatacgagaacagtcaagaacactgctaatggaactaactactgaggcttatctgatttaacaatgcacatggaaagcaatgattttttttttttatctcaatgtctcttcttattacaacgagaaactttgtaattggtactggttttgcacttaatatgttgcaaaactgcttttcacttgttgtcaatatgtggtatgtttgagcttggacaaagtgtcttaataagtgctttattttaaaggattcttcaaattttaaggaatcaaccctataaaactcatgtaaaatgaagatctagtttatagaagcaattttgcatctctaaatgtagagtgcagaaaaagcacaatgaatcttccctcactcactaggatactcgcaatttagtgcagtttaattggaaggatactctgccttctaatttggtatttcctggggtttacatgatcactgatacttcatgggacagtaatatggctggtctggccgttcttttgatcaacagaatcaatgctaagtgggaagtaaagtcgtttaagaaagaatcgctctcggctatggaggctgaaactcaggcaattttaatggctttgcctcctgattggaggttcaagggtgtgtccctttggattttagagttgtttaagtctttttccagttgtcgtttacatcagtaggaatgttaacgtctatgtcgatggtttagccaagatgctaaacactttcaaggggagggtgcaccccctgttgccccatgttttctttggtgttgaatgaactttctatctttcaaaaaaaaaaaaatgtagagtacactattcttcttcaaatgttttttttattaatttttggtacatatttctcaacttttacccaagactccatccaaattcctctcttctctataggtaaacataaactcgccttcacaatctctactacttactgatgttgttgataaaatcttcatcagcgtcatactttcttttctgcaaacatacaacataaaaatatttatctatactagtaaaagctaaacttatcagtaacaatatataaaataaattttaacatcttttccttaacatacaatgagcgtatttaatttttaataaaaaaaaatattctctaaaaaaacaatcatctttaccgtacaagaagaatgatagcaatgaagttatacgatttgggtaggtgacatcagcaggccaacttcaagatattgttcatgcatggggaaaccttgtgtcatggagaagcaaagaacagtgtaaaaaaaaatcaaataaaagaagagtactcaatgagctaccagatcaatttgtattcaaaagtttttcaataaattatagtcaaataaaaaaacataggtttgatacacttaccagtgcaaattttagagaacaatctattgcatcagccaactggaaagctctctactagagtgtttgatctgcaacgaactgttcaacgagcaatccatcgttttttatcagattttggtgcttttgagatcgtatgctgcttggacagtatttcagcaataagttggcgaccaaataagtgagagttcttcaggattaggtttcttgtacatgaatcaacagcataaccatgtggggacatccattgcagaagttgaataagtaaatccttcttttcaggcttcataatataacgtgatatggccattcgaaatatttcctgtggaacaaagcaacgttaatggccaatcagacttgaaattcaaaaataaaagcttattttcgtttcatccacagaaatctcacaataagaggagacagtttaactatttctattatgaaaaaaaaatctctggaaatgaaagacaaaacatttagaaattagtataggatgtgtttaactgatttgttttagagagatttgttacacaaaatctatgttgacttgcctagttttgtgggaggatattttcctcgtttatttgtacgcatttttctatttttgataaatcacaccaaacataacatttatccaattagcaaaacttggggttaagtttatttgtatgcatttactccttagaatcaaggatacattacctcatcaatcttgcagccgaaaccatggatcactttcaagacatcatttattgaatcgatgtttcctgacttcataaatatagttgcaaactttttcatagcaggtggtgaaatcaactctccattgtcctgatcatgaaaatattttacaaaaatcctcaactaaactaattacatagaataggaactaggaaacttggaatagcaaacctttactacaacatatgcatctttcaaaagccggccagcaattaaaacatggagaatcttttcatgaagagccttgcacattgtggttttgccatatctcaacatattgtagacagaaaaagcatctgcgtgcgccttcatcttaccgagatgaaatattaaggtagaacaaagttcctacacagcccaaaaaagaaaagaactaaaaactattggaatagttacccttcaaaaattagcttaataaacaaaagaacattcatatcggaatctttcagacttgcttttacttgaaactcactatatttgtaaaccaaatactaaacattcatcagctacttaatttctataatatctcatcacattttatccccccaactcataactcattatttcccgcatatttctgtcctaaaagttgtcaggcaacaaaggcaccacaagtatttttttcccttaaaaaacattttgtgggtgaatttctaaaccttgtctgaaagattatttgggaatttgcgtgtagaagatattatcactcttcataagctcatctcgtttttaattgacttcagtcatatcagaatccttctcattatgtgttatcttccaaaatattcttcattcgtgtacattttccatggattttgccattttttctattatttctcctacttctacaaaatttatttattgaaaaatatataacagtttaattttttttttactcaataggaaggtgattggtaagaacacatacctcatctaattgatggcctttgttgtgcatgtccactgtcattcggtaagcaagtaaatacaacttctccttacagaaatattttattaggatatgaaaggtagtataatcaggactgatagctaattcatccattttcttcaacatttccattacactctccatttcccctgatctgcagtaagcacagagcatagtgttcaacatcaccaagtcgtatgtgtcatatcttgcttcgaaatccttggccaactgctttgcttcttccaatagcccacctctgcagaatgctgaaatcatgatactgtaggaataaccatctgccggagaaaaacacatgattttcagcacaaaaatggtctgtatagttacactagatgaactatgcgaaagcaagcgaaatggcagctatgcccatcaatgctcatgttgagtaagctatctctcaaaattgagagtaaatttgcaacacgcggacttctttatgtagaaaatagtgattcgaattgtgtgtagatttcatagaataatacatatttatatacagagttaggagactaaatatctactaaatatctactaaatatct

SEQ ID NO: 111814 - DNA, 2972 bp, Cannabis sativa
ctattttagaaaatacaaggtccattttgtcatttaacaaaacataggatccaattgataatttttgcaaaacagagggtccaaaatagtatttacccaactttgagtggtaatggagttaagaatagaccgacaccatttcaatttcaacacaaatcaacacaaaacgacatcgttttagattgaacaacaattatcggattccagatccacagaggtacaaaaataaaacctattaataatagaagacaatgacatataatcagtcaattgatattacttttcaatttctttcttctgttttcttatattaatctatgatgtcatgtagttttggcgtgtaaaggtgtaaatgttgttttgtttttgtttcatttgatcttttttacatttgaaaattttcttcccaaaacaccaacctttcaattacaacttataaacccttttcttattgataaaaattcaatctttttgttcgttcctatctgggttttgttttttctggctgtgatttcttcgaaggtacgtgctttttttaaatttttaaatttgggttcactttaatttcatatttcattctctgtatttttctgtttggtttttggaaattgcggctgagatttctggcccttttcctttttattacacacacacacatatatatatatatatgtataaatatataatgtatggattttctatgcaatgcagaacagtgtggtgttaatgaaaatggcatctgagagagaatgttttgacctttctggaccactccatctaacttccattgattggtaagactttcctttctaccccaagaagaagattgtttttgaatcatatgttctaattttcaaaaactggtatctgggatttctgtcattcaatatttacttttgaactaattgaatatggtgatatatgaggattattagattgagtggtgagagatagttttccatgaggattgaggttgaattactcataaaagattctaccaattaaagattttaaggttaatctgaaggaccagactaataaacaaaatgtaaagcaaaaactttgtacatttgagctaataagattagccatattggtttagaaaatgtgcttggatatgattagccatatgatagatatttgcttgaattagaataaatagagggagatggttttttgtaaggggtgaagaaatttgttagggttgtaatccaaatggtattcaatacaaaatatttctctgttttcctatttttattttactgttcttgctgttcataggtaatattgattggaaattcctatcaccatattggttgagaaaatgtttagtttagattacttatctcttgttatcctttgaaagtgtatatgtgataataactgctgttatgagctttgtcttatgtttatgtcatttcaaatagccatctttagtcatacaaatctgctgctagtcttgattgaatgaagcagcttctgatagcatcattttatactattttgttatgtgtttgatattttgtaagatgatatgggaaacaattttacccaattggggtagctcaaatgatcagacatgtggtttggtcccacaagttttgaggttcgagttcctcttgggtacctacatagcaattgctataatttcctggtcttcaaaaatattgtatggttaagcggggatcttaatttcgaaaagaaaaatatggtaaacaactttatcttgctattgtttggactttgtagggagaatgaaaatcacagaaggtctgttgcagcgagtttagttcaaggtgtctacattctagaacgagatcgccaggagaaacggttaggtgaccaggccattgcgcctccatggtgggagttttttcactttcagctgtttcgtcaactagtggacgatgctgattcttccatcttcggtgcaatttatgaattcaaacctccaacagctcagtttaaccactcattagatggaagcccgagatatgtaatagcttttcgtggtaccttaacaaggccaggctcattttcaagggatattgagttgaacattcacttccttcagcacggacttcacagaacatctcgttttgagatagcaattcaagcagtacgaaacatggttgcattggtaggcgattcaaacgtttggttagctggccattccttaggatcagcaatggcaatgctagccgggaaaaacatggccaagacaggcattttccttaactctttcctttttaacccgccattcttttctgcccccgtcgagagaatcaaggataagaacatcaaacatggaattcggtttgctacaagtgtgataacagccggacttaccattgctatgaaggctactcagcaaaggggtccctctgaagatccatttacagctcttttgggatggactccttatctatttgtgaatcccgccgatcacataggctcagaatacattggatatttcgaacacaggaagaaaatggatgatataggagctggagctattgagaggttggcaacacaaaactcagttgggggtctgtttatgaaagcaataggcaaagaatcagagccaatgcatctcattccttcggcgaacttggttattaatacaacgccagcccgggatttgaaagaagctcatggaattcatcaatggtggagagacaatatgcaattggaatccaagctttatagctacagataagatcatttaatttgttttggtactgtgtgattgtttgataatgttgtcttgttacattgggtagtcaaacatcatatgcagatgttttttatgtttattccttttgttatggtatcatttgttcaatcattggtagttgttaatattatctctatattcaagtttataaagctaatgaatttgtatttttttacctactactattgattgaattaaagtctcatgcttgcatgtgtattattattattattat

SEQ ID NO: 111815 - DNA, 1155 bp, Cannabis sativa
tgtaaatatgttttcaaatatgtgtatttttaaaattgtatttttttgcacattttttgtaattatttaaaaaaatgtatacatttatgtaaaatgccatagactatattattatatagtatgatttgcttattgtgttacatgtgattattctcaagttagtgtggtataatcataattggatattttagctcgaacctagttcaagatttaatattgtgtaaattgtattacttaaatatttatatttaagcaactcttatctattcttttgatgtataacaaaaaagacgatttagtaattcaaaacataaataagttaaaataagtaaagttaaagaaaataattttgatttcatttctactaattttaataaataatataacacaaataataattttatttcttttttattttattctcacccattttacttttattttttacatcgatttcaattatttatattttattaaagtactattatagtataattagttgggggataatagagtaaaattaaatttatttttattctattcatttatttaattacaacaaaaattattgcaatttttacattggaataattttttattattttaataaaataattatacttaaaactttttatcaaaaactattcttataaagctactaattagaattctaacaattattaaaaataaaaactagttagaattttcacctctaaatttgttaggctgttaaaaattctcatagaattattgagattgttaaattaaaagaaatctgtctaatttcgttaaattttactaatgtgacaagtgtgtatgtgcaaaattatactccgagaactatatatatcgaatcaactttgatatgtaccaagtcgtgttccctaaattttcatccacatcgcacatctgttagtaaaatttgacaatttttttaatccaataatctctttttaaaggcctacaaaattaaggggaaaaaatttggtacatgttaaaattcttaattagcttaaaaaatattattttattagaaaattctataatgcacctccttaaaagagatgcactgatatatctctattgttttagtatctgaaataattttttagttaaattttttctcatgatcatgtatattatagttatttaaga

SEQ ID NO: 111816 - DNA, 5584 bp, Cannabis sativa
  modified_base (5207)..(5211): a, c, t, g, unknown or other
  modified_base (5518)..(5531): a, c, t, g, unknown or other
aggaatcagatcagtaagatcgaataccccctcttcatcctcagttaaattcataggctttttcatcttttgcatagcagaatctatgagtacaaggagataaatctatgaaatgcagatagaggaatgatcgatttagtgttgtgatgggaaggagagatagaaaactcaggaaaaaccataagaaaactgtcaagaaaccattaaaaaccacaaactgccacagagcactaaggagggcagacgctcaaagaatataaaaaaacattctttaaacttaaaaatttaatttttttataaaaaaataacgtcttatatgtaattatcttgccacaaatttcctaaaaccaaaaacaaaaagaagaaaatatattgttctcttaaggcatcacgtgcataatgcatgtatgtaaaattttattttttttttttgaatggcatatatgtaaaactaagtaatcttcttcttcttcttctcttttctcttctcttctgaactccatgattcctctgaaagttcaaccgcaccacctgtctttcttcctttcccaaaatatccctctcccttcctttatctattcagtctcccacagacccagcaggtgtcatttcaaacccaatcgtcactgcttttcacattcaccctctcctatcccaatccctcgctcctccaacctcaccttcaaccccccgagggtcctcaaaattgaaccattgtttttccaaaatgatgatgataaagacaaaccttcgcctcaggttgacgatttgtcttcaaggggagtggtgtatcagaaaactttggcattggtggagtgttccatgtttgctgctctcaccggcttagtctattttttgagtaattctttagcgattgaggttcgatagtatgaattcaaaagtgggttctttttatttcagctgatgaaaccaaaatcatagtttttttttttttttttctttcaaagtattctttttttttttggtaatagttggaataatagttaaacgaaaagtggaatatgtatcttaattactatctatgattcgaacaactatctttggttacttaaaacggttagttatgtctgcacttttgatactgttattagtgtataaagttttttatatggctttgtgtgcagaattattttggatgcttcttctcacttccaatagtgatttcatcaatgagatggggaattccagctggaagaaagactatggtctgtcaccattaatggcttacctaatgtgccatatatggagaattctcgtatatatagcttgcatatgattttaagtaagttttatttttaactctgatggcaataatctttcatcttggtaggtggcaacaactatgctattacttgtgttgtccggtcctgtaaaagcattaacctacctggtgagtcagttttcatttttattagcttattccctaacacctttatttgattgcttagataagtaggtttgagtatgaattctaaggttcttaaagaatttaacttatattgtctagtatatatttgtatatgacttggcagaagcacaagaaaattaattgctgtcacattccagaactatctttagttaatttctgatttgtttactggacttagcttaggatatagatgctgtgaaatatcagtttctattgtgtaaagttttaaaagttgcttcaacagaattaatatcctaaacaagtttatagatggatgatgactatgatgaaaacatttttgtttgctgacaaataagttgtgtggcatgttgaagtcctctgttgggtagaactgtaataaaaaagagaggctactttcacacaaatttagctgaattgtctctatcccaagttcaaaatgtaggtggtttattgtcagatctctcaaacagaatcaaatttatggaatttctgaatcaacaaggaaccaaacagacatggctagtgatttatagtaatcatatagctcggaaaatactcctaaacatctactggaagctttattttgacatgattggcataatgggtttttttagagtgagcttgaatgtaaaactctgatgcatatggtgcctgagagggattacatcatccatgtgtgttttttttttcttttgttagttacattatcattctttttcttcaatgatttgaagatttgggaatattttgagaggttagtattggactttagattgttcggtagctgaaatattggcggagtttactttttgaaagcaagtttgtaacactacatctaatttcaacactgtagaactagtggaatttcgcttcacatagtagcaagttgtttgctttcaagattattagataattctgaagaataactgaggccggtctttgaggagatcgattggttttgtatgcttagtggtgatttttttatcaagctgccttctaatgtctgttcttaggcttccagaggtgtcaactgatagaaaggcaattgggattgtatcatactacatgtacttagataattattatactattggagagaagatgattaaaaagacaattattattatactatttgagttctgggattgtattgtatatctccaaggatttggtaggaataatggtgtagcaggctttgtactgaaaaaatatatatttataggattaaaattgttacatgtgattggtggtttatcatgaatgctgagttttaggaatcagttcagcccgattatgatgaggaatgtaagcagaagggttaatacaaaatgaacttattgactgtggcttatcatttctccttaaaatcatcgtaggctttgaagctgaagttttcgctttttgctagacttggattttgatgacaaaattttaacatggattggctttttattttagtccattttgtattataaaatgcaattgcttacaatcaagagtttgtaatcagtatatttgaagagtaaatgaaaatgagcaacattgagatgatgttttctagtattgtattcatcagttgattaaccttacaactcataagctaatttcattctctgtggctacatcttgtgcagcttaagcatggtctagttggtttgacaatgggtgctttgtggaggtatgtgtgattcttctctacgcaaaataaaacattgggaaaactatgctttgatgtttgaaaagaaaagaaaaaattacaaccttttatatgattatttattgtcttgtcactttgtggttctaatattggttaccaagtctgtattatgcataaattttcagttcaagaatcaaaaaagagttagctttctgtatgttcctctagtgtggttacttttaaggatatataatataaggacagaattatgaaacatcttttttcaatttccttcataatgatagacccaagatagtagaataggatacaagagattaaataaaagggtatttgtgtctttgtattaagggtagtgttcgggtgggaatagaagagtatatataggatactaaggagaattggagggtatgcaatgtattgagtaaaactctttgcatcaaaggggcctaggggcacccatcttttgtaactagcttttctcatacattcaatatcaatcttctataaattcctactgtttggctattgttctattgctatttaaattaattgtgtttaggagtatacttatgacataattttattgtttttatttttccttgttgcatctttcaggtcaggatcagattggaagctctcaatttttctatgcacaattgtactgtcctctcctcgattgtcttaaatttgtttcaactcctttttttttataagaacaagcttataatgtctttatattaacaggtccgcgctcttggtgctgtcggatatgttttgattacttcgtttataatcagggaaaacatattggctttggtaattaatcatctatatctttagtttatttttgtgtgtttgtgtattttcttttcttgacattgtcaggaattaacaaagtttttggttcacttgcagatcacaataaatatacatgcttctcttacattcttgatcactgcagcaggagtttatacagttccgtcaatgaatacaatttacattatcttcggggttctggtattttcacatctcaacctcctcttatcttaagcccctccatgtttttcttattcagtgttaactttgtcgtgttcactcgaacaggtttttctaaatagtggatcatttgtgttcctgctgcacctgttgtattctgttttcctaaccaggcttggattaagggcctcattaagaatgccaaaatggctggagaaagcaatataatttagtaaagcatttgtaaagatgagttaattatttgttggggcggctaaattagtggtattcagttcattcatcacatttttactatcagctaccctttcaagaaaatatgattcctgtaattgttaaaagaagtgccaatatcatagctgttatgggactcataataatgtagtagtgatatttggaatgcggctgcattggtagtaaagggaggaaatagaattagaccagagtaatttatttaaaatataaaataataaggaatatttgaaatgaaaatacttaataaattattatatttgtaacattttttaaatatctaagttgtttttaagcggcgaggacattaaaattctgaagtttgtaacaatatctaaattattttttagcaacaaaacaactaaattattacaattgtaatgtttaaagttatattgttataattaaagtgttcgtttggtacgttgcgttgcgttgtgttgtgttgtgttgcgttgcgttgtcttgtcttgtgttgtcttgtcttgtcttgtgttgtcttgtcttgtgttgtcttgtcttgtcttgtcttgtcttagtattatttaatacaatacgatgtttggtattgacttgtattaattgattgtgtaaagttataatatatttttaatacactcgatcccaacaccaactatcggttcgggtctcgggtctgggtctgcatccgaggtccaggatccagatcttgggtcggggtccggggtctgggtctgggtccaggtatcgttctacccttcaatgtattttattctaaaaacacttagctacctataaatgatacttcattaaactaatataattacagaaatgaggcctcaatcatttatnnnnnttcagccaagctcgaaggagatcatcgtttcacctctaaatacctatagaagctatagatttcatatctatgattagtgctcccactcaattgtactatcatgttcccaagctgtatgtgtgacccgaaccaaatggtaggctttaactaacaactttaagaacacaaataacactcttgagatcaaacctaatcatgtcaggatttttgatctaggatcaactagtgatattaacttagaaagatacaacggtaagattataatatattaataaggtcaatatcggtctcagtccaatgtatactnnnnnnnnnnnnnnctagcatactttgccaatattctggaaagaacataacacttatccaatgtgta

SEQ ID NO: 111817 - DNA, 2138 bp, Cannabis sativa
gtaaaaacatatgtgcatatgagaaccatgttgaattatgtggcagactttggcttctacgaaggaaggctgaagtcgcactaaaattcaagcaatggtttcacattcaagactaaaggtgtgaaaccccattgggcgtgtgatagacttcaagcaatccttctcttccagaaggaaggttgaagatgcatcaaaccccgagtgatctttcatgcacagtaaaaacacacgtgcacatgagaaccattttgaattatgtggcaaactttcgcttccgtgaaggaaggatgaagttgcactcaattcaagcagtggtttcacattcaaggccaaaggtgtgaaatgccactgagcgtgtgatagacttcattctctcttggaaggagggttgaagacgtatcgaatcaccaatgatctttctcgcattgtagaaacacacgtgcccgagagcaccctgttgaattatgtggcagactttggcttccatgaaggaagactgaagtcgcactaaaatttaagcaatgttttcacattcaagaccaaaggtgtgaaaccccactaggcgtgtgatagacttcaagaaatccttctcactgagaaggaaggttgaagatatatcgaactccctgtgatctttcacgcacagtaaaaacacatgtgccgatgagaagacaaagaggtactgggatcctcggtcgaaaggttctctgtgatccagcctaaaactttgtgcaatggacctgacccactttgttggaaactcctactttttctggggatgtttaagcatttctgagatgaccttcacctcttatgaaccgacctttttggattcccaagtgatttgggaccaccactccatactaaatggatcaaccttgactttacatttaggtgatcaggttcccatctcgagagatcagtcaaatggtcgatgcaattccacataggttgccctttccacggggtccactaatgaaactctcgtctattactgctaagtagcattgagttttcaatctgacaacactttgcacagtttcatcttgagcaagaggattcgggcttactaaaagatgcattctagaagctcaagggtgatctaatcctcagggagactgcacggtaccatgttgtccaggaactggcatccttccaggtgcagcctccgatccgatgcacgagataagaatttggacttctatcactgtgactattactccagattcactttacaagatatctattccttgaacaatgttccatctcccatgatattttaatagttttctccgaggatcttgccactttgacatcttctgccccaagactttcttataccttttggaaactcatctcgaccattgcccatctctcattttccaagagtttctcaaactctgctccaggaaccatactttgaacagttccaggaagtactttccatcctttccttgtcgccccatacctaaagaaacaggttcgcgtaggcactgccactgatgtaggatattccttgatagtttgaatactcaagattttgggaacaattacttacaaagaaaacatgagattgtaggtggagcttgcctcttaaacccaagaggctccaatagacttccggcgcgtgatcttcggacagagctcttgcccctatcctacgtttagcagcaaggccgtttcggtagccttctacagattgctcgtcactggcacaacatttcctggccttgtcgccagacctaagcattctcacaccttatcctttctacatagttgtgcttctgtgagcagcatggtgcccaggcttgaaagtaccgatggcttgatgcgtccccagaggatcaactggccagactcaagcttttccaaataagctcaggaattgctggaattttaagactattattcttcacaacggtttcagtcgatgagtttcccaacacatcttcttctagctggatgagctctcctttttgtaagttgggattcgtaatgacaaacactgtgcatgtttaaatattacctcaactcttagtgaaagcaccaaaatgcttatcgagattttcagaaatcgattatgtaacaccctaactattttaggcgtattacgtgattttttaaacgtactgtgcagc

SEQ ID NO: 111818 - DNA, 2870 bp, Cannabis sativa
  modified_base (68)..(70): a, c, t, g, unknown or other
gatacacacaataggaaatcatattaaagcataccagccgaaatatacaataaataataaaatatttnnntcaattaaatatgccaaaaatgaaattaacaaaagcatgtaatacataacagatactgagatatattcttctattttagaataaaatttcaagaatttgaagatttatgctactgagctgattgtcaatatatatatatatatttatatagaattgagagtagaatagaattgaaagtgagagaatagtcacttaagaaatagaattgagagaaaggtcacagagaggtcacccgccagagtttagtataaatcaaaagaatgatgattgtttatgaataaaaaaaatgagcttttggtattacaaatactttacaatgcaaattaatggggtataatttcgactattacaagtaatttaatccctccaaataaaaatatttggagtaaaaatttataagcaaatgaataaaaatatataataagtttttccttcaaaaaaaaaaaatatatatatataataagttttaaaataagtaactaaatgaaaaaaatttaaaaatcaaagtttcatggcttttcgtatgttttgttttattttatataaagggaaaaaagcaagaaaatagatgattgggtatagaaacttactcaatatttacaaatttataatataaatagatgaaaaatattataggatgtcgtatcatatttttttgtactttcctttatataaatattagggaataaatcagcgcttcgcgcatttttaataatttttttaaaactatatattaaaaaattaatttattaattacgaataacatttcaaatcaagtatttttttaattttcttataaataatataaaattaggtaatgtatgtatattattaatatatataattattacaaatattaattataatacaatagaaataaaagggcatctcacataaagatgtacttgttaaaataattaaaaactattagatctataattttaaataagttgaatattaagaatagcacaagtttttacataataagacatgttctttggatacaaatttttacactattttcataccatcgaatcaaacacgatctaatgatccttataactattaataataaattatacttagaatcagaattatagttagtgcccttttctcatagtgtaaccataatctctagccattaatcgtcattacttcgttctcctattttacaaatctttaatcaaaactaaaattaaaatacactaaaaagctactccatatattttatttttctctatcttacactcttctcttcaaatatagaagcatttttaatagtaaaacttattttttatatttatttataaaaaatcttaattttttaatagtaaaatatacatctttttccttttataataattgattattatatacatttaaatatttttaattgtataagagacatatatattataaatattatttattaatttgaataaataaattatgatttgttattttttccattctcattattattcataatattaataatatgtaaactgttcttttaattatcaataagttaaattaataatattattttaattttaatttaatattctttttcttatatatcttagtgtttaccttgcttctagccaacaacagtgagtataaattaacgcgattaaataaaataaataatagaaagcaaatactgtaataaagaaaataccagaatttttagaagttcggttagtggtaatagtctattcccctttaagttgtattgacttgtgagacaaagaacaaagtattctctctctaaagctcttacaatggatctctgagtaattctctcttagatcaccctttctttttgttcttaatctggcttggtggcatatacaatctatttttcatctttccctccgtccaactcttacattcttatctcccatcttttgtagatgaaccctagtaatatttggggaggcaaacaccaaattgatcaggatttactccaactattatacgaaggccatcatcgactccgtgccagttcatcttcatccagtgacaatatctcaaattctagttttgaggattgggagaaaagtagtgaacacacgctatcgccggagcccgaggtgcaatatcactggtaccccaaccaaatatgtggataagggtagagatgcttcgtctgggagttaaagaaaggttggaggcattattttcttgcttattgagcgtacaaggttcaacctggtgttgatgacactttgcccgaagcccgtccaactccagtgctaagggaactgctattgttgagtttgttgtaatcgtttctcgacatacaactgaacttaaatctcatcccaagcatacaatgatggcacagacaaagcaaacaatgaggaaagctttagagagtgacccacactttgctagtctgttctctgcaattgttgtggaacaagccaggcctttgatcaaagaaggagagataactgaaagggactttgaagtccaagaatttgaggaccagggcgagctttgtcctgctacccctcctaaggctgagggagaagaggaagaggaggaggaggcagttcgggtgctgacttttggtggctacaacgaggagggagaacctatctctaagatctgagaagtcccggaagctggcttggactatgctgaggaggaatatactgaggctcgtcctataaacaataagggtcgaagaggtgcttggtggtgttgggattttatgccctaaataaaatccatttcaatacaatctgatttgttatcaatagaagattagaaatcatttatgtttacatgt

SEQ ID NO: 111819 - DNA, 2190 bp, Cannabis sativa
  modified_base (34)..(38): a, c, t, g, unknown or other
  modified_base (2153)..(2165): a, c, t, g, unknown or other
ttgtacaattttgaaaaatacagggtccattttnnnnnttaacaaaatagagggtccaatttgtaacttttacaaaacacatggtccaaaatagtatttaccctaaaaattttatatataaaaaaactttcgaaataaaaatagtaataataataataagaacattcacaaacctactatccactttttatggaaaggaggcttaagcctcattctgtagataggtttaagaggtccttaagttttgaatgtggttttgaagtctctagccagtattttggtggggggcttcttcgtttgtggagggttgatgtctatgttaatattttgaattattcctttaatcatataaactataatgttggttttaacatgaatgaaatgtggcattttacttgtttctatggctctcctgttagttctcaaaggcagtttacttgaaaattattacataatctttttcataatgctcctaattttccatggttaattatgggtgactttaatagttatctttttcatagtgataagtttggtgaaaatcttcctgctcaacataatatatctttttttacaagttttttgagtgagtttatgttgtccctcctatcttatgttagtaataaattcacttggaccaataaaacttttagtgaacgtttggattgggttgttgttttggattcttggagtgacctttatcctaatcatagtttacaccacttaggtttttatggttcagatcatcgtgtcttaaagcttgttttagcccctaatagtcctaaccctattaactttgtgaataagcattttaggtttgaaaacatttgtcttgaggaccctagtttctacgcgcttgttaatacaacctggaataagtgtcttatgttgaatcattctaataaccacttccatagtttcatctctaagaaaaattattgtatctcttctcttacaacttggaataaaaccaacaaccgtctctttaaaactagaattcaacatcttactcacgacattaataattttcaaatacggtgatccttcataatgctgataaacgtcgcatctcacaacttcaatccacgttagatgctatgctgtataaagagaaagtttattagaaacatcaggctcgaatcaaatggcttaaagctggagacaaaaacactaaatttttccacaaacatgcttcctttcgtaagaactctaatagtattaagtacctcaagtctgatgatggtactgtggttaatactttagatgccattgtaagtcaagttacctcttatttctctgatctcttttcttcctatgggagtgatattgaaggtgatgcttcaatatttgatttcttgggtcctggccttgaggaacatgatattagggtcttagattaggactttactactgatgaagttcgaaaagttgtctcttaactctcaagggacaaggttgtaggtttagatgggcttaatgcatatttttatcaaaataattaggctgtcttgggtatcgattttaccaatgtagttttggactgccttagcaagcgaattgatttcactgatgttaactccactcttattgttttaattccccaaaaaaaaaataacatgttaatatgcttaaggattttcagcctattagcctttgcattactttttacaaaattatttttaagatccttgccaataggctcaaattggttcttgacaaaattatctctccctttcagagtgcttttattttgggtcatgtaatctatgccaatattatcattgctaatgagcttgtctatgccatcaataatagaaaagtaggtaagagagggtgggctgctttaaagcttgatatggctaaagcttttgatcgggttgagtgagactatcttaaaaccctcatgtttcactttaaattccctgttcgttttgtttctctctatctaacttgcctctccacagcatctatctctttttgtataaatggttaggttagaggttttgtcaaacccactagaggtcttaggctgagagatcccctctcctatctgttcattctctgctctgaaggcttttctactgttcttaggaattactaggataggggtcttctctagcccttgattccttttgtagcagagcattatcaannnnnnnnnnnnnatctctttctctccttcgggtttgg

SEQ ID NO: 111820 - DNA, 4902 bp, Cannabis sativa
atatacttggaaagtggataaagaatattgcattttccctattctatctatgaaaaatgtgcttgtggaaaacgccatttgagatagtatagatatgtatgttccaactcttgaatcccctttttacatttggttaaatatgctactaaagccgaattatatgaagaagaaaactcaataattcaccactcatgttttgtgcttatgacctccacgtgaccacaatcttagtggagcattatttattattatttcccattatacaatttcttgttagctcaaatctcctattaatggattatattctgacatcgactaggatggactttattgcatgtgttgtttatttcaatttcttcagttttgtatgttatattatttgataataaataatatgttggttgaaatttgatattactgagtaatatatattaagtgtattataaataaattacataatatatgtatttaatttataattttgtaattttataatgtacatatattataacttaagagagaaattataatttgttatctattgtaactcttctttggttgatcatacaaatgagtaataaaaattcaaatgtttgtttatatggttgttaggaataatggttattacacaaagtgtaataagggagttattacacaaatgagttgtaggaatttaaatctgtatttatatggttgttaagaagttgattaatactcatttatatgagagaaataagttaggaaatattttgttttgatttggtcgaagtgggaattacaaaacacaaaaaaattgtgctgctaaagttacccctggagacatgtcgcctcaaaccagacatcatgcattacagatatgacattgtgcgcttcaggtttgacgttggcaaagttacataacttaggcaattaatttgtggtcgaatttttgcatcgagtataactgatgcaagatttgtgttaattttgaagatatttccattagttttcagtttacaaccgacacaatcttactcgttttagaaaaaccacagatttaaaggcccttttacacaataaaaaccctactatataaactcattacatgcttcaaccctaaacctaaatgatcagcccccctttctcttgtctcttttatttccagtttgcaccacacccgtcggcccccaaccattgcatgcccacataatgcgaagaccacgcccaacccatgccgacattctcacgcccaaccctgatggttccatgtgacgatggttctccctcatctctttcaaatgtataaggtctccttcattaattttcatagtatccgtcgacatgtgctttttcaacatatctcaaactcactctctttatttttgtatatatttgttgttgtttttttggactgcatctgttgttttcatatattttttagagtttgatctgtattttccatcaaaatattgatgagatctagatcttgtttcaaatttgaaatatatttttttatatactatttatagtttgcgttgctgtggaaatgagataaatattgtaactacttttatgtattttatgtcagtcctaaaatgatgcacattttttttaccaacaattggaaactgataaaaatacactatttgcgtctactgctaattctttaaatgtgacttataaactgacaaaaatatcacagtttatagtagtgatgtcgcttgaagtagtagtggacgaaaaatgtcttgaatgttttatttttggtcctggcttttgtttaatcccctaaccacctaatttaatctattttactcctaattaagaacttataacaaccatggatgcatggtatttgaattcaaagtatgatcaccctataaatagtggtgtaatatgctcatttgtgttaacttaattttctatcaaaaagagcactttggttgaaaactttaaagcttgataattcacaaagttatttttttgagagttcccttagtgcttagagataggagaaataagcttttggacaaaagtagtataccttgttgaagtcatggtgatccataataatccacactcaagtttatgagcgagtaattctattcttcttcttcatattatacatacatgtgtgtgttatattatatatggtgtatatatggtgtaatttatttttttaatcattcttatatatatataaatatatataatatttatagtgcatctgtaacatttatttaatttatctcttataattaaaagataattccttttcaatagaagagaggataaatcaagatttttaccatacaaggtaagagactctgtgtggaagccattcatgtgtaagcatattggtgtatatttgcattttactatttttaataatagtcatatgtattaacatattttcttttttgagatagaaaagtctcacatgttataatagagataaaaatatatatgtatatgtggatggtatcccaatttccaaaaagattgtaaacagaagtagtaagcgggtgccacgttagatcgtacagaaacgtccttgattccccttttgtttgggataggatcagggaaggcattagggtgaccaggagagcgcacctgttgtaaagaagaaatccatccttgaagttgtgacctaatgctttcagcatgcagaagcatatgtgaagcctaagtcttcaaggaacactcatgaattggatatttcaggaggtcctaggttacacttccagaaagcaccttatagcctaactcggagatatattcgacggttactctttgtttgacaccaagtaagacattgtcccttgcgtcagaccataattgtgcgcgtatgtgcctctgtagtgcttattatccaacgacttgtctgggatattactttaaaaggagagacatttgaatgacatgtgtccctatcaacgtgtgataagctgtaccaattaagcacaacacgatggaagatccacctaccaaattaatggtcagatggtcttatagtattgcacaacctcatttgcgtgctgagtaaagacacctagtggggtaagagggtatgccctcacctacctagagacctataaatacctcccatttttaagtgcaaagggagaacaatttttacttacagaagctctgctaaaattcttagagaactttattcttagacagaaactagagtaatgctaaaacttttattgtaaacaattgtaatacttagacactaaccaaataaggctaatacaattgactcgtggactaaggatcattaacacctgaaccatgtaaaaaatatgtttatcttgtatttaatattttgcgcatttccttaacctcatataatttgtttccgaaaatctcggtatatattttggtatattcattgagagctaaggaaagctagttagttattatctcacttcagctatggtgaacatgcaaaagaataccagtaagaaagtcacgctggacacagtaatggaggaggctgactcccatgtctctaacctctagacttgtggtgtcagagaagaaggtatgccccacgcccaggcctgagaggaggatactgagaacgtacccgatggccatggtgatgactagtacctcaaaggggaagatgaagacagcgaagacaacaactatatcagagatgggtattacaaagatgagtatcactatgaccatgcctctaattttttgcgagtgaccaaagatttagaggaaactcaagcggagttggctgaacaaaaaaacctcactacgaaactgaaaaagatgatggagcatctgcaaagtaattttagagaatcggtaaaattcgatggtgaactgttagtggatgtagtggttggggaacatatccaaaataaaacagaggctgaaacctcaaatcgtcttaaggataagggtaagagtaaagtgggtgagcactcgtaagggcaaagtgggcgagccctcgcaagcccgcacctaggcctcctcgaaaggatgataccatggttggtcagccctcaaaggcgtaaaaggccaccagtgctttcaagcccagacgcccttctaaccctagaggtaaagccacgccatagagacaaggtctgaagtacccacacacaaagggcaaagaaaccaccctagtgactcggttaacaacgatgatagaacaactgtaggtcactctagagatagctggtccacaatagaccttcgacaatgactagacaccaaatatggaagatacaaaagcgagaaagtaagatcacgtggagatgaccttaggaaccatttgagtaacaacatgagaggcacgacctccatgagaatgatacaaaaaagttggaagaacagattgttgctttgaccaagttggtcaagaaataaagtggaacattatcagattcaaaagatgatgatctagaaccctatgtgagaaggatcccagaagctctgcttcaagatattttcaaaatgccccacatcaagctgtacaagggaaaaactaatccgctagcacatttagctaaatagaacaagatgatgcaagttgcttgcatcagtgatgacactaaatgtttgtgtttctccctaaccttgactaagtccgtggaggacaagtggaagtgattagctcctagatcaattgatagatggaaagatatgtaacctaccttccgcagtcaattcattgctatgcgggacaaggatctggaagttggttcactcacaaatgctaaacagcaacacaatgaaagcctaaaggcttttattcaaataatgatggaggcagctgcaaaaacaaaattcagcaatgaaattaagttaatgttcggattttatgccctaaataaaacccatttcaatctaatctgatttgttatcaataaaagattagaagtcatttatgtt

SEQ ID NO: 111821 - DNA, 4426 bp, Cannabis sativa
aattatactattttaattattaattaaaataaaaaactaaaatattaaataaaattaatagtacgtggcttgacacgtaacgatcacctagtataatatatatatatatatataacagattgttagtctattgaatgaaaaaaattataacccaatcaaactattaaacaactactcctaactaaaacactaatatataccaatatactgtacatatatctaacaaatatatacatatacatacgatttaatataaatacctcaaatatagtgatacgtaatataagggtggttaacttcgtcaccaacgtcaaaaacactttcgatgatgcaaagtttttcattagtttggtttgacttccttccaactttaacagagaagaaaatactataaaagtgaaaagttttttcttttttttacttttgcaatttgtttttatttttttaaaacagtgaataactcttcatagagatgataacgatgatgagtaaagatatataattaaatagtgtgtacattaattggtaatagtaaaaaaaattaatttaaataaatagtaaatacatgcattttcttgaacaatgaaaaatcatctccttaatatgtaatcaataaaaaaattttagcgtgaagtaaattaataacaacatttattatttaaatttaagataatatatatgttagagtcatatcgggacagttttagggtgggtatcaataccccaaccccgacctcaatttgggtgtgaatacttaaactcgacgcaggtatttgaacccgcgagtataattaccatccctaactttattaatcacaagcaaagatacaaacaacttatacaactcgaagggctcaaacaatacccccacccaacaacactaattacttattagcttctcaacaaatcttctttcctgtatagaatgttttctattttttttacaatgtataatttttataaaatcactattttgatatctttaactaaacaatcttcacttctcatataaccatcaaacgaacaactattccagttcagccaaagaccatggacacaaactcccagcaaatcataagaaatggtggcaataaaccatgttctcctcatagtaaaccaaacaatccaacaattaaagtccaaagttttgaaccgcatccaatgaaacacataataaaccaccttcgagatatactcgaaaaaaaaagtgaccatgactttcattaatgagaccacaaataggacaaggagttgagtccatttggatacaaaacattgtcaaaaaaatttcttgtgagaagctgagagttaattgcttgccacaacataaacttgtgttttggaagactaaacttgctccaaactgttttatcataaagaatttgctgttgagcaatggtgctattataaataatagaagctttgaatttacctttagcaccagctgccacgatttgagcttgactaaacaccatccgaagacacaactttcttcaataccaactcgaataagtttttaaagtatgatcccaaaaggaacgaccctttaaatttgtggagtggacacctcttacccaaagcacatcatgcttctcagaaagagcccaaatgtatttaacaagaattgctttgttccatttaggcccctccctaaattcgagaccaccatacattttggggaggcaaactttttcccaagaggctatatgaattttacttctattctcatttactccccaaaaaaaccctgcaaagtttttcaacttccttaatcacactttgaggaagaacaaaaatactcatccaatagttacgaagaccaagtaacaacaaatgaataaattgagttctccccgcaaaggaaaggtgcctactagcccacaaatacaatctcaacttaataccaccgcaatcctcttttctccacttagtagggctcattggaacacctaggtacttgagggggaaagtcccttatgaaaagtgtaaaatctaagctatagtttttcctttatgtggcagcaaccctccagagtagatttgagatttatcaacatttgccaataaacccgaagtagcactaaagtcacccaaagcagcctttaacacgctcaccgaattacaagaccccttggagaataagataagatcatcaacaaaacacaagctagtgatcctcaaacttttgcacatagggtgaaatttaaaattagcatctaaagaagctaattttaatcttcggttatgtattccataactaaaataaataataaaagtgagagtggatcaccttgacgaatttttttgtcacctgtaaagctcccttgaattctaccattcaccatgagagagtaagtggtgtttttcacacaagtcataatccaaccaatgattctagtcagaaagcataaagcttgaagaagatcctcaagaaaactccaatcaatcgtgtcataagtcttgctaaggtttatctttatagcacatctcggagaaacaaccttccttccataattcttgataagatcttgaaacattaaaacgttatgagctatggacctttaataaatgcccttgattaacaatctgaggaagaacaatagctaatctagtacaaagaagcttcaaaattcctttataaatggtagggtagcaagcgatcggtttgtagtctatggctcgaactagggaatcaatttttaggactaaagagattgttgtatcatgaacgactgctgggcaatgacctgtattaaaattttttagaacagatctacataactcttctcatattttttggccacattgctttaaagaagcctgaaccataaccgccagggcctggggatttagaactcaggatgctaaaaaatactgctttaatctctttgacaaagaaaggcttcaaaagatcaacttgctgatcaaaagatatcttgtttccctagttaatacaatgcatatttaaggttgtagttgctgaactaggacttcccatgaacctcttaaaaatgattcaagaaatgggtagtaacttctaaaaacttatctaccacttttccttgatcatttgtaaaagaagctgttatattctccattcttctttttttttaatccaagcatggaaaaaagaattattctcatcttcatgtctcagccaagtaatttttcttctttgcactaggaaattgtgagacattctctcatgcatactgaaatccaaggcagcctctatttcaagatcctgataccaactatccccatggtgagcttgagcctgcaatattgagcctcctggcatctttccttagcctgctgattgttcttctcaatattgccaatcaaatcactatttaaaattcttcaagcattccttcaacctcaaagtctttttgaaaatatcttttaaatcagtacccgaaattagtttaagccaactttacataactaatctctcaaaatcctcatgcttcgttcaaaaattataaaatcaaaatggcttaataccaatacattctataacagatctggtgaccgaacaaaaatagtggtgtgaactagggtcctaacgaaacatgcaacaatatttgggaaagtatctaaccaatcttcactaacaaaaacatgatcaatcttagaataaattctagagtgaccatcttggttgttatttcaagtgtactttgaaccagtacttctaagctcatccctcaacttaagagagagccaatgattagaatctaccaattcagaggtagatagtgggtttccaccttgcctatcatctaagtgaaagactgaattgaaatctccaagcataatcaaaggcctaacagaacattttatcttagcaagacccttccacattcctttcaccaatcaagttcagaccataaacaaaagtaacactgacccaccattttaataaaacaatggacaaactgatttgtttcttccacaacaatcaccctcataaacactttcctctaaactattgtactagaatagaaatcccagttcaagaacttagtatccattactccaccactttattccttttcattttagtctctaacatagccacaacaccaattttatttatactacaaaaatctaaaatattatcttgtttattagtacctttcaagcctctaataatccaactaaaaagattgcaacaatccatgacaattaactaattgaggaatcaagatcttttttattaccttcaatttgaacctaggccgcaaaggaattcttcctactatgatcttgtcctatttccaacatatccgcaacaatcgaattctgccacaacttattgatctgaaatgtcctctttggagtaagccaatcctgacccctccctctccctgtgtaatgtccccgcttcaagcctccgttaggttcttacacccacggaatg

SEQ ID NO: 111822 - DNA, 1253 bp, Cannabis sativa
  modified_base (113)..(115): a, c, t, g, unknown or other
ctctatgtgactctcttatgtcaagttattttgagtacaatacatataaaaagaggtatgtttcaattaaatataaaattagaggtaagtttgattaattgattaataaaagnnntatttttcaacttaccccaaatagaatctgcaatacatagcaggcccatattaatctgtgttttggaggaatagcccattccaatctaaatgatggcgttatatcatactattttggccttttcttttcataattaaccaaaaatgataaaaatattacaaaaatactgatacacaatttcttaacaaaaatacacactgttgttttatgttatttttacaaaaaaatttatactatattgtttgtactttgttgttttatgctgctttcatagagtttcataaaaaatgtaattggaaagaaaaacataaaaaaattaatcatgtttgaaaatctgtatgtcaataaaatgttaaaaatgtatcattttagacagtttcttttaaaaaaattcccaactatttttgtctctctaattgtatactattttactaaacagtatcattccactatttaacagggtagaaatcgtagcttgcaacattgcgaatatcattgtttgtaaatagttattttctaaattatatgtacaattttagaaatgagttttatatagatggtactgaaataaaattcattggtgcaatatcttataatcaaatacatttatggtgcatttggaaatcaggtgtgattgaattttaatgtaatttgagataattattaaatttgactgtgtaattatgtaattatatattatatatgataactataaaaaaaattatgatcactgagtataagtatccgaggagcagtgatgaaactagaaaagattattttaaatgaggtgaatatttaatataaaataataagaaaataaataaactttaaagatttattcattttttttccatcctccgtaattttgattgtaaaccataaataattttatttattactattttcttttaaaagagattactaagatatttttatgaatatttataacattgtgtataattaaattaaatttagaaactttcaatcaaattatttaagcaagaatagacgccaaaaagaaactaagggaatattatttttaatgctaaactagtaaatatctcgcgctttgcggcggatatataaaatattttaaattatatataaaaaataaattgtatattttaattaataataa

SEQ ID NO: 111823 - DNA, 3171 bp, Cannabis sativa
  modified_base (3051)..(3061): a, c, t, g, unknown or other
tattttatgcaatatttttatgtaaagttattctttattggtactaaatttataatattttagtataaattaaaatttaacatagtattatataaaaatatgatatatgatctaatataatacaatacaatacaacttaatacattgtactaaataagttctaataaatttttagcttcctatccaactcaaacttatgttaaagctaaagagaagattgatacatctctctttaattcttttgattcatacatatacatatattatatctttttggtgatactctcacactaatgattatactaatgttgtataaactctcatgatgatattagcagattcagcaaaaattactgtaataacatcagtagctcatactctgcaataacatctcatatggtaaaattgaatgaagttgagaaagtctttgatgtttcttctcctttagttaaaaacttgatgaccagtgaatttgcaacaaggcgagagtgtacccacagttgtccaatacattgttgtgttccccaccattagagaaaacaagtgggtggctgtcagcttggagtttccaaatgaaaaaaaatgaaaggaatagttgacaatttattcacccatactcattattcttttaagtataaacacaaatgtaatctcataaagaagtgatatgcttatgcaatgttttttatttatttattttcttaaaaacacgtcaatactttgagaccctgatacaaacccaacctcgacataacccaaaccaacgacttcaacctagacctcggagctgaaccttgacactggccatggctcgacccagacatagactgggacccttacctcagttccgacctgcacccgatccatacccttgaccaggcctcgacctgaatcccttacctagacttagccctactccttgaacccgagccaaaacctggactaccaccccgactctagacccaaaccacagaactggactcgagcttagatttgaactcggggtaccccagaaccggaacccactcccgaactagacctcgagctaggaccacgacactgcacctcgaccttgaccttgacccaaaccgaaatccaaacctaaatcccaggactcgaccctgatccagacttgaacccagacatcgagcctaaattcgtgttggtttaatggtactaaattaggtacatagtgttaggctatttttagtctaagttctgggttgattttatagttgttttctctgtcaatgttatcttttggaatatttttacgcttgattttccttgtttcaaatccccgaggcattagagttcaaattctatcaattgttgaaaagacggggcaaactggagaaaaatctgttgaagctgacaaaagtgcttcagtagtcgcgaccaccacaatccatgatcgcgactacgaggtttggcagaaagcatgatgtttggtttttgcctatggtcgcgactaggctttatgtagtcgcgactatgggctaaacacgggaattttaggcagttttggactttcgccattcagagatggaaaccctaatttctatttaagcggctcgtgttttagaaggaaaatgatcagaaattcgacccaaaaagtgaaaaaaaaaagaggagaggaagcaattgtgacaattcggagcgcaatcagcaactagttctttcttaaactgttttagatttgattatggatgtttttatggattttatgaactaaactcctatttggggagatgataaatgttgattgactttatctttagttaatgataattgctatttctcctttattgattgtgaaatttatccatatttgtgtttaattacatgtttaagattgatcacattttgcatgctttatgatcccaattcaaaatttgaaaagtgagaattgaggatcctaaaattagatatactagattttgatgtgaaacgaaaatatttacatagcttttgtaacatttagattattgcttaatgctgattacatgctagtctaattcagagatgattagataacatgtgatttatggcctaaaagatctgaaaagagttaggttaattgttataatctatcattcacattaacaaagagagtagtaattagcattaacaattgggtaattaaatcaacaagattcttttctctaatttaccatctttgattaaatctttttattgctgaattttatttatttttttatttttttttcacgggggtgttcgttatgcttacaacatcatctctgtaaatttttgaaaattttcgaatagtttacagtgccgaaaatacgtttgaagttttttgaacacccgtggtaaactggaatatcaggaactctgttttcggtactgtaaactattcagaatttttcaaaaatttacaggaatgatactgtaactataacaaataccgctatgaaaaaagatttaaaaaaaatatttcggcatacaatttcggacgtaaaagttgactaagagattgtaattagcatttcccatatttaataaatacattatatttaaaatttataatgaaataatatatattagacttgcaagttttccaacactagatctgccagccgaccggcgccagctttagtggacatattggcttatttgactactaatttatcttacataaattatttaaaaattttaccatttaatttttttttttatggttgtctaatttatttaaatattttataaaattttaaaaaaattcaaaaaaattaacaaacagaaaataagcttcaaacaatctatttcacacgcatataaaataaaagactctcacgtgtaacagactatttaactttatttttagcgtgttaaatttgtttgaatctctcaaaattttgtaaaatatctttaataataactatgacataaacgattataaaaaaattaaattaaaaaattatttcagataccgaaacagatagtaggtacattagtaaaccccttgtaaaagtatccttatattatatcatattatatgcatatgtgcatatatatatatatatnnnnnnnnnnntctattctatataaaatgtgtctatgtaacaaaattcttagtttaacgatgcttttttgaatttctacgttaactttaacataatcttctttattaattttataatatta

SEQ ID NO: 111824 - DNA, 3852 bp, Cannabis sativa
aaaattgaattttaaaagcccaagattttcaatagcgttgcttaaaagttacaccgatatttatggctagattaaagagcgtccgtggaaatcaaggtcatagaaatgcagaaatcattaaatactggtacatcaacatgtgcagaatgtacaacatcaatgttaatcgaaagctgcatctcccaacaatttttttctttcttttatcgtacatgtatcgttgtacaaaaacgacaggaaagatgggcctcttctggctgagtggcctcttttctttttccaaaaggctacttgggctcccagaagattatatctccttgctccccacaaagccccagatccttgagcctcctctcttgataatattccaattcattaagctccaactctctctctttgaacatgccatcaatttgctgcagcacctttttctccccttgtcttattccaacagctatctcaagcctcgactccagtttttctccttttaacttctcgtcctgcataccaaacatcacgtcattggaaattaactaaaacatgaaacacaaacactgaggaaaagcctacttgtgaaaaatagttataaaattttgttttttaagattacctcttcaatggtggtgttataaccagagagagcagatttgcaggcttgtcgtaccactcggcatatgagctcttcattggcatggcttataggatactccagatgccccaaaatagagtttctgaagatggtttccaagagaaaagcatcggtacctccaagtgctaccaatctcaaatatggaagcattgcaggaggaagtggacggttcaaaaaaatgtcaaaataagcagtttcactccaaccatttgcctcggcaatgtctagcttgtcaccataaaaagggtccgactcggatatctctagtgtcagcgtatatgcattgcgttcttccaagggatcaatgaatccgtagtccagggccaactcagcattgctcttgttaatgtcatattgtataacaacctattattgcaagtcgtcaaaagagttcgataaacacccacataacaaaatcacattattgtatacaagtaaggacatttctttttcgtttaatggttaacttgcttgtaaaaaccattcatgagtatattccatactatatattggtaagaagaatgatattacttttctgaggcagcaagtagagaggtcatcgaccattgcaaaatttaacacaagaaacagcagaagaagaaatttgtacctgctcaccagccttgactggaattgggctacgtagagagaacaaataatcccatgaaaaaaggcctgctggtcctttgacctcccatgcatgctcctcagaggttactttgtggctgtggttgatctgattgattaagtcggaatcaaacaaaattagcttcttatcttagttgaagaaaattaacagatttcaaaaatgattaaaacatggatatgtgagactgactgacactcatttagtcaagttgtatgtattgaaaaaccaagatgtaattgttgatacaaaagatcttacaaagtctacaagagggatcaaaacaagattttgtgcacgcatgcgtgaaaatgcccttgatctgagaataccgaatgcccaaaagaaatcatctattgtgatgggagaaggaaaaagcttcttgttagggagaataacttcttcttctagtttcttaaactcgctcacaacatactcttttactcccaatgttgtgctcaaaagttgggtgcctgcaaacgcatgcaaaacttatatgaccattatcctccaaaataatggtgtgtgaaattcaaccactgatcaaaagtaagaaaattagaacctaattcaaaaaaaaaaaaaaaaaaatggaaataagaaccaaaatttgaaagaaaacaacaattatttacaaaataacctcaagggtccttgagggtggctctagcctctaggttgcttagtacaaaataagtgtacactttcatcctgttagtttagcaaattattttatcaaaaaagaaattaagtgagaaaatattaaaagaaagaaaaatactgtacatatgtatattctcatttttgagtaaggcttcagtacatctcctaaagagtggcatatagatgaattttttaatcaaataaatttttgtatgatcgatatagttatttaaaattatttgtaaattttcaaaaaattttaagtagtttacaatataaaaataaaatttacatatttattgcaactattttttcttattcacgccttgttgtaaatagcttcatatccatcatgaacaaaattgaactacagggagtctatcagagtgtactagagaaatttccctcatttttaatataaaagtttgcttaagtatatttagttttttaatacattatattatgttctaaatcttccatcgttgaagttggaaaaggaacagggaatttccaagaattagttagcgtaagtaaattttttgaccaattagtaatgagcaagaaaagaaaaattgaaggtaaaaatataagtagtataagatgatagtggctaaaaatcaaccttgaagttcagaaagctcctcttctgacctgctctggaaccatgaaaattagcacttatcaactcaaccattacgaagcacatactcaaatcaacaaataaatacaaattaacccataaaaaataatcggccaaacaaatttaaacccaccaaaatacagtcgaatttgtttgttttggaagaatgtcgaagtaaagtctccaaagcgagtcgtccctgaacttctctctgagcaaaaatagagcaacggcaatccaaggcttcaacccattacacacgttcccaatctcagaagccgaaacagtatctgggtttatccacaacctcttcggaatctccaaaacgacctcgtttcgagcaatgtctctctgggcaatcaatcctagtccttctggtacgacgccaggcctcgccggagtcttatttgagattacgccttcgtcccggagccacttccagaaggtgtggacttcgggtgaaagagatgggtccaattccgtagactggagagatttgattgaaagggctttcttaaggtgaagatttggacccctgggtaaggcatagaggtgcgtcagagttgttcttggagggaatagaaatgttgaagatgaggaagataagcctgagagacttgccatttttgattgtgtatgtgatttagtgagcttcgttttgagttaggccattgcagtttcagtgagagcaaaggtgtaaaattaaaagataaaagaacacttcttttcgtggataggatttatatttacaagccaaatttgagtatttatacttcttactccctaataacaaacacactccattctttttgagaacagaaaaaaaaaaaaaacacttaattagagggaatatatatttttttctaataattaattagtatatatttggtaggaaatttagctctgatacatagaaattaatatttgtaattctaatttcaaaatcacacttaaacaaataaaagttaaattaaaataaacgaatcaagaacaaaaaatcactaaacacattaaaccagaaaattataacatagatgaatctaaatggctatcagacccaataacacaagagatttatacttttcaaccctatgttcattgtgaacttggtcatactccagtttaaaagtattgccaccaatattagaatttgaaattaaggtgaatgggattccatctcaaaaccaattgtcaatgggaggagtagctcattcctcttatatattctattatctttccacacattggcaatgt

SEQ ID NO: 111825 - DNA, 4356 bp, Cannabis sativa
  modified_base (40)..(40): a, c, t, g, unknown or other
gaaatgataaaataattcgttttttttattattattattnttattattattattaatattattgttattattattattattaaactgaatgtttattgtatatatatagatttttataagttaatgaacatgaaaacaaagaagcaaaactctctcctcttttccttctctctcgagtaagccaagaaccaccagcaccataccattttctttgatattttttttgtccaaaattagctcttcaatccattggtggtagtagctaggggttcccaagcttgagggaagagtttagtcacttttatttcttggaaagcttaggttttgaaagatggatttttggttttgtagttgctgaggtttatgtaaactttagttttgtttttgtgctggattagaagtacattttgatgctcatttgtgctacttttttagggtgagattcaagtttgagctttaagctcaaagcttgagctctcatggtacttttcttgttagggcattattttgatttctgttacgtagagaatgttgtatggatgttgtataattgttttgtgaagtttagaattaattggttaggtttttgtggggttttgagaagtataaaattaagttattttgttcttgtgaaaaatgataggctatttttggagcagaataaaaaggtctgccattttcagtatttttgaggagatcgaaaattgtattttgatcataaattttcactcagatgtccatttcaggcattgtatataccattttgaaagttgcggaggagctctacaatatggtatattatttagagccaaaatataagttttatcttaggatgtatataccacaaagtttggtagaaaacccaagttgtctaatgtgaatattaaacagtgttttggaataaatacttattggtttaccgttgttgcgacatagggtcgagatcattggaaatatttctccacttaggttggctgatatgcatgaattcagattaaaggtaagaaaagtgcattgtactacatagtacgttatgttataatataattattattatttaggattgattgatattgagattaaaatacagttattaccgttatgtaatgaaaagattgtttgattaggaaatgatgaaaagattgtcttattaggcaatgttgtgaagattgtatgattaagcaatgataaaaaaattgtcttattaggaaatgatgtaaagattttttgattaggtaatgatgaaaatgttatctgattaggcaacgatattttgatactaaagagttaggtatcaaaagtcatgactataaacaggaactaatgttaggtttcgtacatgttgattgtctgattagacaatgacaaagatatatagatatcaagttagggcatcggggttgcctgattaggcaatgagacatgtggatgcagggtaagagcatcagggttgtctgattagccaaccacataaaatggttactttatgaggtaacaaacataattgatattattagaagtattggtatatcattaaatatatatattgatgttgattttgaatgaaagtctgtattgacttggcttgtgcatgcaagtaatgtacgaacattgattataaacactgtatcaggaaatgaagataacttatattattagcgtaatggttttgtattaccaaatatctttatactaacttttatttgcgactgatattagtagtgaattagatttcatcttatgagtaatgtgtaatcatttgatcctaattgtctgactataaacgataatatttgaataataaattatatgattgttgttattacttttcttgttgagtccttgtgactcacaggtgctatgtagtgcaggtaatacgtagagacgtttagatagccatgagttagcaatcttatctagcaaatgtacagattagcttatccagtaagtggtgctaagttgtcaagaactgtatttcaaatgttctacacttttaaatgtattttataataatactataatagcatatcttgtaatcttttaaatagtggatactcaatcataaaaagcgactatgccatgattttataatttcaattagttgggaaaatttttatcaaattatattttatttaaactgctagtttattagcataaactagtttataatggcatacatgtggtgtccctaagggttatggtgttatacacacacatactctctatctctatctctatctctgggtgtgtggaataagtgaagggagagtgagaatataactctatttataagatagtctcctttacttccaatccatttaggacttcatttaaattcaaaaaatgatcaaaaatctcccatacttcgaagcccactaggacttcatttaaattcaaaaaatgatcaaaaatcaatcattttcttgattctttgaaatttttcagaatctcatggagtaatggaaatcactcaagaaggccagaacaatttcttgaagtcaaaaattgatgcacaacttgtaatttcatatggaatgggcttaattcgcgtcatgaagtcatcctcacataagtggaaagctcacttggggggtaagtgtttaccaagagattggccctgaagacttggacatcctacatgtggccagaagaaaaatattcttggagtaaggtatccctagtcataatagtcaaacttaggaagggtccttacccttgcactgaggttgacgttgggggctccaaatgggtatttggatcctgcaaaatcatttctaaatcaccatcctttaatgttccaagctaacaagtcaagaagactctgagtcataagcatggaagctgaaagaagatgatttaacatgtggaaagccaactcgggtgcctaatgtttcatccagcgcccaagttgacacctggcccaagattttatttctggtcctgtattagtgcaaactactcaaaatttttacttagacatgaatcagacctgccacaagcatgttataggtattagaatcaacatcaaaacataacatgtttagagcacttaggcactcgatgcccaggtcgacctagtgttgtccctagcacccaggttgacatgaagtcgactagggcacctccaactttatttttggagatgttttatgagaaatttctccatctaatccaaaatgaagctacaagtgatttcgggaaacaaaaagagccttctgatgaccaaaaagcctacctaggcccaggttggcattaggactaggcatcagcgcccaggtaaacactttgttaacctaggccacttcaaaggaattttcccaggaattcttctgtattttctctgttttcaataacaataaaataaagtgttcttaggaaacaaacaaggccacttggcgaccgaaatacctgaccagcgcccatgttgacctaggcattggtcttagcacccaggttgacaatcaacctggtgcgcatggttctgttactcagatgaaaaatccattttgagaattcttcttatcttgatccaaaatgggggaggaggcctcattttcatattcaaatatcatggaagtaccaaaaggacattgaaaaggctcgagaatagggccccaacaccttggttaacatatggcctggtatgctagcttctgcttatccgatacaagtttcgttttgagcatctggctattttctcataataaatgagatctacaacatgtgtctcaaattcacactttgatgtttcacatttttggtaaagtaaaatattgaaaatttacttacaaatctggcagtaacgaatcacccaattctgggaaagagcaaaacctatgagaacttgtgaacgactttagcagagcaaagaaattaggtaagtgatgtaattatatcacttagacttcataaaatatgattttgacatttttttaaagtaactagcacctaggtgacatcagacaacttcttaatcgcatgattgtcaacctggctatagggtgttgaatagcctgtagtaaaataactcgcttaatattactttgattgacaaaattcctagtgcattggaaatttattttcaagctctttcaatgcctatcttacactcatatctcaattccaaagttttcaagtcaaaaaattgcccccaagacaaagtgaaattttttcgcaaataatctaaaaaacgatccaatgactacaatccaatctttgaaaattgacaatcataatctgaagtcatgattaagcatctatgctattgaatctcaatctatggtcaaaatcactctagatggaatattcctagaatattttatatttttctaatatttattggaaattattttacca

SEQ ID NO: 111826 - DNA, 4373 bp, Cannabis sativa
  modified_base (4316)..(4332): a, c, t, g, unknown or other
cagaacagatggttggaatataaatcatacatgctgcaatgattttgccagaccagtccctccaaataaatcctagccccacgccctcttttcctagattaagagcagcatcacagtgaacacaataaataccctcggggggccaaccagcgccccagatgagtagcaggtataggaatttgtctgtaatttttctccctgcttctagcagagattgggtagctattaagcacccattcaatcagtcgagcctcatccataataggtagcttattccactgcctattcctattctcccaaatggcccaaaggactttaattacctcctcaaactcctctttggacagctgttgtctaaactccactagtagatcaaacattgaacgacctttactatcccgaatttgtttataacaaggcattaatttccacactgttttaaccttgtcacaattccataacgcatgagggggagactcaacgtaccttccacactagttacaatgaggatcaatcatcatgcccctatgaatcaagtttattttagccgggagccaattgtgacaaagcttccaaccaaataatttgatctggggagggagttgaagttgccaccacatcttccaccaagcattgatttgatccatgtctgaacaacgagtggggcaaagattgctttcccgggccactctatacccactcttaaccaagtaatgcccattcgtagaaaacggccaaatcaaggtgtcttccaagtgagtatcaacagggttacccaaagtccaaggaatgtcctcttttttgaaataaagatggataatctcttcattccaatcgccttcgtcatgcaaaagcttgtgaacagtggtattaggagctaaccccgggtgacggtataggatggttccatttgtgcggggaatccacttatcttcccaaattcgaatgtctcttccatttccaactctccaacgggctccttctctaatgatttgtcggccccatataattcctttccatatacaagaagctcccggagggcaattggcctgaaggaaagaggagttaggatagtagctatgcttcaaaactcgagccaaaagagattggggtttatggatcagccgccacccttgcatggctaaaagagcttgattgaattctgtcagacttcgaaagcctaatcccccttcctctttcgacttacgaagcatggctcaagtaccccaatgaatctttttattatcttttgtatccccccaccaaaaattggcagccaaggagtgagggcttttgataagcttttttggaaggcaaaagcaactagagatggaaatttatacctcgaggaccacctgcccataatagagtggggattccccgacttggcggttaatgaggcagtggtggggaacaatttcaatacccgaagtggggatggggcgggggcggagataatactatctgcacaaaatccgaccccgatatatagtttcctttttatttttcacgtatatacagtatatatattactcataatcaaaattattaattacaattgatctttatatggttatgaatcttatgattgatctttctattctattgctatgatttaaatgctcttaaatagtatattgtcatattaatttttgttatatacggtttcctttttttttcaaagaacatataatgtatattacttctccctaataatacatatatgtattgatgaattttagtaagtataatcagaattgtgaaagcaaccatttaccaataccattattcttctagtgatttactctcgtcactcgtcactgccatctttttcaatctcctagtaagttctatataaatatatataaatatttatatatgcatgttttcagttatatatgtgtataactaatatatatatatagatctgcttataggaagattgtcatttgtcatacaaaaaaaatgtgtagtactattgtttatttatcttttctcttttttaaaagttaataatatttttgttctcaaatatataatggttaattttgattattatgtgaaagttccagtaattagtcatactataggtgcgagcttgttgtgacttatttgttgaacatatattatattaggttatataataaggtgttagtaattttaatatttatacattaaattagtaaaattattatttatttgtgtttatatggcattccaacaatgagtgagattgaaagttccccacagtcacaagttactacaattgatttttcccctacaactggagaaaataatgaatctacaccatccgcacttatagagctcaattcaaacaatgtttcaccatctgatactagtaccccagtcccaccaattatagactctgaggttgttggtgagaaaaaaaaaataaaaggctaacttctgttgtttggcttcactttaagaagcaaaagatcaatggggttgataaagctatctgcaattattatgataagaaattaggaggaggaagcagaaatggtactacacacttgcatgaacattttaggatatctccgcttataaagcatcgagacataaagcaatctatcttgaatcctataaagaaaaaagatggatccactatacttgactcgcacacatttgatcaacaattttcaaaggaagaacttgctaaaatgataattttgcatgagtactttcttaatatggtggaacatgttgggtttagaagttttgtgaatttaattcaaccattattcaagcatgtatctcgacctactattagaagtgatatcgtaaagatatatgaaagtgagaagacaaagataaagaatattttgagtaccaatcatggaagaattgcaatcacaactgatatgtggacagccagtaatcaaaaaagagggtacatggttgtaaatgcacactacattgatgactcgtggattttgcgaagccgaattataaggtaactagtaatttcttaaaagaaatagaattttcacttataaatttttatttttatactaattatatttttttattgtcattataggtttatatatgtgcctgcccctcatactgctaaaatattaacaaaagaattaatggagtgtctagttgcattgtccattgattgtaagttatctaccttgactttagatgactgtagtgttaatatttccatgatggataagatgaaagaaaagttgagaaattgtaatttattgttgaaaggggaattactttatatgaaatgttttgcacatatcttgaatttgattgttcaacaaggattaggtgcaattcaaggtggaatagaaactattcgtgataatgtagtttattggactgcaacacttaaaagagttgaaaaatttgaagaggctaaggatggattatcttttacaagtaagagaaagttgcttcttgattgtaaaactaggtggaattctacttatttgatgcttatgagtgccattgtgtataaggatgtctttaaccgtctaatacacatttagaaaaactacaaacaagcgcctagtgatcgagattggcttttagcaaaagtaatgtgtgaaaagttaaaattgttttacaatgttactgagatgtttttcagggacaaaatatcctactgctaatattttttttcctaaagtttgtgaaatctgattgttgcttaggaatgccttagatcttcatatgcagagattaagatcatggctataaacatgattgagaaatttgaccaatattggtcttccatacatagaattctagccatagccactattttggatccaagatttaagatgaagttaactgaatattacttcccacaaatttatggtgatgagtcaccaactcaaattgaaaattgagttatgattcggtcaaagaatacgaaccaagtaatggtaaagaaactcctcttaattcctcattgaataggtttgaagttggtaaggatgttgatgaattggctggctatgatgcattcgttagtagtacatcaaatgtggacacttataagtccgagctagatttttacttagaggaaactgttttgccaaggaatggagaatttgatattttaggatggtggaagataaatggtcctaggtatcctacattgcagcaagttgtcagagatattttggctataccagtgtctacagttacttctgagtctgcttttagtactggtggaagacatgtgactcctcatcgtaatagacttcatccttatacattagaagctttagtgtaacaccctaagtatcttaggcgtattacgtgatttnnnnnnnnnnnnnnnnnctcgttgctaatcaacgaggttagatcggaagagcggttca

SEQ ID NO: 111827 - DNA, 3949 bp, Cannabis sativa
  modified_base (1628)..(1630): a, c, t, g, unknown or other
  modified_base (3883)..(3893): a, c, t, g, unknown or other
accaataaaatttaatgtaagcccaaataaaagtctaacaaatataacatatataaaatttacattactatttttatttaatttttgtatatttttattatttaattaatatatttagttatatcattaaattattgaattttttttttattttttttcattataaaataagataataataataatttgactgcataattattttaacataatttagtttgacgtttgttttatatgaagatcaaaattcttatttcataatatgtattacccaattaagctgcacacctcattcaaattttaaaagaaagtctattatattaatagtgttataaattgtaattaatagtgttaaattatataattttaattctttttcaaaaaaatatataattttaattttgtttttttttttaatttctatttctagggaggccaatggggtggctcatgaccttgcccatttggttcaattgatggataataatgaacatgtttaatcgataataaatgaaaatttttcattttctttaaaaaaaaaatgaatagttttaaaaagaattaattaagattaatgataccacatatatattaaatctttttattttttaatttttaaaatagaaaacagaagtatgttttataatttttatttttaattttatataagtcgaattcagatccgggtctagagctggaagcatggtccgagtttgagactagagcctaaaaaaatgtttaagaaaactgtgaaagtaattttttttttatttttaaaatttttaaaattttgatttttaattaaaatattaaaaagtgaaaacagttttatagaatatatttttagaaattatttttactttttttaattaaaaaataaaacagattaatgtattttaatttaaaattttaaatgaatgaagtgtccaactttaatttgaattgatagacatataatatggaatagaaatttagaattattatataagaaatataaatttacattttatttacaaaaatacttttataaggtgtgaacaacatttatacattttatgtgattttaattaccaaaatatctcttacacaatcagacaattgttgcagggtggttgctgcgttgcatcagacaaaggcttcaatcaaacgatgattgcaggatgattgcagggtggttgctaggtggttggctgaatgttgcatcagacaaaggtttcaatcagacaaaataatttttagtaaaatgtttgtaactgtaatgcaatcgttatgaaacattaacaatctaaacagtattttcacgtacgtaactctatctacatgtctctttatgatttaatataaataaattcaccattaaagatttggagaataacgaaaaaatgcactaggataaaaaattttactatagtgttgatgtaattttttttggattatacttgagctggattatttaggaacttcagttcaactttttgagatctgtctttcattgatctgaaaattaaagtcaggacattagttttatgcaaattaaattagatttccagttgaattttagtttcatagtagtttttctacatttttttcatgaattcaaaacagctcatgttttgattgattctggnnntcttctcaggtgaagtcgctagaattaatggtggttctctttttggttaaattttcgttgtaggttgtgttggattgttgctaggttgcccgatagttatccaggaagtatgtatgtgtgtaatgtttgtataattttttttatttgggttgtatatctatttatttggcaactaaaaatatttttataatattattaattttttctttttgattaaaactgaataaagctttataaattttagacaggggtatcttcttcttcatcattcaattatgaggccatataacaagattaccacatataaatacagttgccatatttccatttttaattggctagtcttaccacagcccgcctttatattttccaccacctaccaacttaaaaaataaaacaaaaaagctgcccaagaaagttgaaaacagaaattatatattgatctaatatattttaattattacatataatatacactgtaatgttatccaatcctataagcaagttccaggaaattaaggaaaatacaaaataaaaatggaagacgtgaagtgggatgagagatacagatgtaacgatatatctaaatacatgtgaatatatatatttttaaaaagtaattataaagtgtatgagtgccagcaccaacgtacgtgtgcaatttttcttgaaatgttcaatcattatccattacgctttttaatttcttatttatttatttctaataataataataataaattttttaattgggtaataatcaattaacaacaccaaactcatcctttaaatagatttggattttcatattatagccatactcacaatatctccttctctattataaatcaatctctctctaagtctcaatattatattttttttaatggcagaggacaagagtggagaagagtttagttttggaaggagtactgtaaatatgggacgaaacgggctgcctaagatcgaaacggggaagaaaacgacgtcgtcttcttcttcagaagtgcaggaggtttgttacgatgacagctcagctcctgtaaaggcccagacattggaggagcttcattcacttcagaagaagaaatccgcaccttctactcccattagggcttctggttcaccaagattattccccatttctgaagaggatcttcataaacagaagctcgaatccatcaggtaataataataatcataattaatatattatatattaaccaaaatatacatagcaattaataaataaaatattatatctaatacatcgttgctatttaaggaatttaaaatattatattatttattaaattaaaatgtattacctgagattaacatacactaataataataatctattatttctcattttctttatctaatatttctaatcgtgctcaaaactttgctgtctatattcaaatttatatggaattaataattttgtaagcatataaaaaaatatttaaaacatatattttgttttgttattatcttatttttcaattattgtaattaatatagaacttctttatttgagaaaaatagaacttgtttttatagatttttgacatttagcggtttccattattaaattacgtgttgtctatattaatattaatatagggaaacgattttgtattcttagtttgtatttcgtgatgcattatatggattttagggtatattagatgtgtctcacgtacgttactatttttttaactctaattatccctagatcaaccccagccctcaaatcaaataactccctccatctaacggctgccgtatatcacggaatacattctgtgaaagtacattacgggacaaaatcgtctccctatatatattgttaaagtaatttataatataaatatttaaatttaacctcaaattataaatatatattaagatttattttttggggtaataatatttaattaagttataattttgaaattttttatagatatttaattgttaacgtaataattgctaattggtttaagttattaaatttttattttttaaaaaaaatgatttaaaagaaaataacgtgtaaataataacttaagagtaaagtacttatatagtagttaaacttaactatgcaataaatattttagggaataaattctataatgcacccccttaaaaaggatacaccgatacatctctatctattttagtatccgaaataatttttagacaaattttttctcttagttatgtaaattatagttatttaannnnnnnnnnnaaattttaagaaattcagaaaagtttaacatgccaaaaattgcgttcaagcagtgt

SEQ ID NO: 111828 - DNA, 1540 bp, Cannabis sativa
  modified_base (1402)..(1447): a, c, t, g, unknown or other
agcatcatcaacctcagatcttttttgcatggaaactaagttagctgctaactccaatttttgaactaaggctaggtaattttttgataatgtcttttaggtgctaagaaatggtttagggggtggtttgtttcttttttcggaatgatgccgtgaatatccatattttgtcttactctttgtatcatatcgattgtaatgtttccattaatagcaatataaactatcacttgtcttattactatggttctccttatattcatgataaaactacttcttggacccttttggatcatttgttcgatgttgaccctttaaacccttggatgattttggggtatttcaatgactatatgggctataatgatcgtaatagtaattgtttaccccctgcccatgctatcaataattttcagcactttgtttccaagtataatctttcaccgctgccttttactggtagctgattcacatggaaacatggcactcttcttgagtattttgattgggggatcactaataaggcttgagatgacctttttccccatgctactctgcaacatcttcccttttatggttccgatcatagggccatcaaacttattcacgatggtaatcctcctttcaagaaaagcacctcacgattccattttgagaatcattggctcactgagcctaatttttgtaacttggtctggaattcttgggtggatgataggaaccatatcaattccacctctccccttgacatttttttgaatagaaaaaattactgcattaacaacatgatctcttgggggaaagagaaaaacaatttcaagaacagtataaagactatacaattgagcattgataaaatttactcccaatcccccatatcttcaaatgatgtcattgctgccaacgaactccaagcttctctagataaactctcatttaaggaagaaattttttggaagcaaaggtcgcgtgctagctagcttcatgctggtgacaagaacaccaaatacttccacaattgggcctccgctcgaaaaagaaataatttcatacaggcactcactttgaatgacaactctactgtcactaacctcacagatattactaacacatttgtccaattctattctgatcttttcacatccaaaggcatagatcagaagtccattaacacggtccttaagggagtcactaagcatgctactagccaatagtatgattacctggcccataattttgattttgctgaagttaaacgggctctttttcaactcgcttaggataaagctcctagtcctgatgggcttaatcccttcttttatcaaaagaattgccacattgttggtagagacctttgcaatgttgttcttcactttcttaactgttggaattattttactannnnnnnnnnnnnnnnnnnnnnnnnnnnnnnnnnnnnnnnnnnnnngaacttctaaaacgattataaatgaacatatataaagtatgagaaaccttacattgggtgcagcggaattatatgtctccttccactcagatc

SEQ ID NO: 111829 - DNA, 6387 bp, Cannabis sativa
  modified_base (6281)..(6297): a, c, t, g, unknown or other
ttttcttttcttttctctattattattatatatcatgtataatttggctaatttgtatctcctgaatttttgtttactgttagacgtttattagtaaaattaaacataaatttttatatttaacaattttaatagtttaaaaaaaatttacaacttaaaatgttcaaaaaaaaaaaaaaaatacaatttagtatttttttttaaaaaaaatactaatcaaccatatatttttgcttatgataactagcaataaaactaatttaaagaaaagatgctaactttttattattattagttgtagtagtggactagttatcctgtgcaagttagttactttaatggtgcttcaagttttgtttttctaaacttgcctcaaattcaacttcaaaacaaaaacctccagctatatggttaaattttctaatgaatgaaatgttgacattttcttcactttgcatacttctttagcttttccaaaagtatcatgattaaaataatttcctgatattcaccctaataataataacacagaaggaaagatcaaacagtttacagttgcctttggcaatttttttttgtttttccttgagttaagttactgctctctaattgtttttcttatttgcttaattagatctatgctataaccacatgataacactcattatatacaagttgacaaccaaccaatttcaaaagaaagtactatacactcaataccctttgttcaccacaatgagaaattactacaattgagagttcttttaccacataatatgaatgatcaaagaacaagtactgcaaatctacaccgaattttagcgagcatcgattggactagtaatttggacaatatcttctccttctaatgtactattccaagaggcttctgcagagtgagaaaatgattcagtaagaacagagaggctaaacacaacatcagccatgcttggtctagcagaagccttctcttctgtgcaagcctttgccaacgatatcaagttcagtgcaccttctatagggtagaatttctccaacttaggatcgatccattctttcgccttatccactctcttctctgtatcttccaagatgacccttgcttctttccacaacatgatgatctcaccgcttgctcttgttgccatagattttctccccgagagcagctccaacaggacaacaccaaaggcgaaaacatcagattttgtcattgtttctgctgtagctgggctagccattgaaaaatttgctatctttgccttaaaccttgagtctaggagtatgttacttgttcttatgtccctgtgaactatgctcggctgagtgtgttcgtgcatgtactgaaggccatgggaaacgtctaatgctatgcttaatctctgactccatgtgagaaatcccgatgagctcgaaccactgcttaaacatttggggtttaaccatttatcaagtgaaccatttttagcatactcatatacaaagaagcattctccatctttgtccaaagagattcccatcagtttcaccaaatttccatggttgactttctgcaaaatgttgagttcttcagagacattttgcttggcttttttcacagccaacaagctcccatgaatcatggctctatatacagatcctccaatcctatactgctcatcgaaattcattgtagcctctataattgtttcgatttcatacatgattagcttgccaagatagcctgaaactccaggaagaagtttatccttcgtctgaagcttagaattatcacctttggtggttcggatcagatcactagactcaagagatgagtcctcacggttgagcttcttcttttttcggtagaaaccaatagtgtaaagtagaaaagtagctaaaaacagaacaagaagagtacctgctaagcttataacagttatgaggaaccacctgcctttaagttggtttcttggctgagactgagaaggataaggaggttgggagagagatggcaaccgagacaccgggatcaacaccgctgagccaacagcatctgtgaagttccggtagttattttcagttacaatgtcaacctctgtggcattaaacttggcaccaacaccaacaatgtcatcttctggttgccaaacgtaagatataagatatttgatatcattttccaaatgggattttaaagggcatccacaatacaatgggaaaacaactttggtgccaatctgcaagaggtttggattaagttcaggattcatatctctaaccaaaggccacttagtgagattttcaaatgaataggttgaaactaagtaatagctttcccccatggtgatgttatgggtgatattggcaaagtaatagcttccattacagctgcaggagagtggtattagcaaaagctggcctggaatcagtttgatctgctctggaagcagattactagcctctgaaatcgacaaagaactcaccccaaacagattggctatactattcagatcaatatagttcggagactgagcaaagtaagcagcataggtctgacatgaggatggcgagttagcagagcatgaaaagtttgtacctgaggtgggtggtgactgagctgaaacatgggttatgaagaaaagtaggagataaagcaatagcgccatagcggtgagcttcgatggttaagctttgaagtaactaattatgccatataaagcttgatgaacaaaacttattgtagattcttactataatttaaggaaaaagctgaaaaacattgtaagggcctttatatcctatattaaataaggcttattgtgaatatattatacagtgaccttttgtctctagctatgttctgagtgattattctatcctagttttcttcaccatcttatgtgaaaaaagaaaaaaagagtagtggattgtttttgttattatgcacaactaaatacgtcaatacctgattttttatatgattttttctgtgttatatattctcttttgatatgactctgtcaaagtagtggaatagttaaatcaaagtagggacggcaggagccaagaagatgtcacacacctatattttgtacatataaagtcaattgagctaacattaaaaaaccaaatagtttagtggttttcatgattgattgtctgagaatattcggtttgttcctatactaggaactaaattataatatccaacacttaacggtgtaaggacgctaaactaagtacttaaaaatgtttagtgcaggctctaaaaacgctcatagattggacttttgaatgaatccagtgtgaatggcactctttccaagtgtccggatctatgtagacaaacaaattactccaatacaaattttaaaagactctgaattgagattgactcttctgtccagataaaaatgagattcaatagcagtagtataaaggaaaaatttaacagtaataaaataaagaattctctcaactgtagtataactagcttttactgattgctacactttattagaatctcaaggttaaaggcagaaactcaagtgaatctaggttgggttcaagatacttcaacaaaattaaattttgaccaatagtgtataattcacaaccttatttccttaccaactaattcataatatttccctaaactgttttttacctatctttttcgtcaaatcttatgaaaaacctctttggtttcaatatttagcatttctatgttgactaaggctaaaggttctattttcaagtattatatacacaacatgatctgtatgtgatgtatgatttaataaataaattattggttaatgatgacataacagttctaagttttttataatgataggagagtagttagatgctgaagtgtaccaaaaaaaaatgatagaaaacttcacacacaacatgctacaaaagagtgacaccttagacatgtatcttccattatcaatcttttgcttcaatagataataacacataaaattataatatataaccttaaaatacgtttgttaccatgtcaatcattgtttatgcaaagcttttggagtaaatgtcaaaaactctagtgaaatcagcagagctcaccgtccaaatgtgaccacgcaatctaagtggaaggacaccacttatttcctcacaattctcttctacagcggcagcctctcttcgcttgccttctttccaaaggctctgtacaagcagctcctttgtgggaaagtctggggtcaaatttaagtttctcatgtcttcgaaaactctccaagcgagagcagctctttcacacttgcaataagcttggattagtactttgaacatataagcgtctggcttaattccactctgcttaaccatctgaaaaagtttctgtactgttttgatatcaccatgtactgcaaagtgatgcatcaacccagagaatgtctgaatatcgggacaaatctcttgcaagatcatctcctccagtacatccaacgcatcagaattcctcctacatttagtcaatgtccgcaagagagatgaatataaaagcaacatgttgaactttgatatggttccacataaatctctatgatcatgaaagaccttcaaagcagcatcagcattcttcgagatgccgtaaaagtcaatgattaatctgattgtacagaagggtagtctcataccttccttccttattttaaatatgagtttatcaaccaattcagcacatccatggcgagctaaaagggtcattgtcctttgtactgtgtaaatatcatgagtaaatcccggttgacaagcaacccaacagaagaatttccaagccgtctctggtgaattgatattcctaagaatcttgcaaaataatctacttgtccacacaaatttcgcttcctctaaagcctttacctcctcagggttccatttttgtaaggcactagccaaagctctgggatctatccaaggctttaactgaacctcaacactatcaccctcaacaacaagactagagtcctcacttccatcgtcctcatcctcatcactactctccccacaacactcgatattcttgatttgctcgttcggaagcatttccttaagaaatttctcagtctgctcgacaaaaccagcctctttcatgcgttctaacgacaaattcatagctcgaccaggtaatattccatcaacctgcatttcctcaagtaaagtctttaccttatcaaattgtttgacaccagtaaacccttctgccaaaagtgaatactggttcaaagtacgtttgatcctcatcaaaggcaacaccttgaaaacctccattgctgaacacaacatcccagaattcacaagatgctcaatcatgatagtgtatgttctacaattaggaatggccccttcatcaaccaacctatagaaaaccttcacagcttcagagtcatcacccatttgagcatagagccgcataacaatgttataggactctgtacacactttatcattagaaactctatacttatcccaaacctgaaggacagactccaaatctccaacagcagcataccattgcataagattcataaaacttatacgtacataaccaaagtttccatctttaatagagtttatcaaagacttgagttccacttttctgcgggacttggccaagactgtagccaatgaatgcaacgtattctggttatgtgaaaactgttgaagcctctcgagagagtcaatgaaggacagagcagagtcagccgaaggagcagacctgagggcgtgagtaacaacaaaagagtcaagaacacgatcacttaagagtggttcaagcgagttcttcgaagggttagaccggagagctagccggatagaatcaatgagtttggcacggtataggtagtgtgagaccttattcggaaatgggtctcgggcgtaatagcgagtctgctggttaaagtagttgatgttgctaaacaagcgagggagttgagcataacgcattgccatgaatactagcaggagtgtcacgcagtcaaaacatcaaacacttggtgtgcacccgaaagaaaatgagaacagtcagatcaaatacataagccagttatggcttcggatgctataattgcttttaccgccattggaggagcatcagttgttggatttgggcatatgaacataaatgagagtctgaatatggagtatatatatgagttgcgggcaatagctgtgcagtgcagctttctcagtgtccacgaataaggagctatgctttccacttatgctttgcaaatagattattattattattattnnnnnnnnnnnnnnnnntattattattattattattatggcatggttggtttattgtaatgggaattgtaatggaattattattaccattatattgtttgcttttat

SEQ ID NO: 111830 - DNA, 2541 bp, Cannabis sativa
ccggggcccggcgaaaatggcccagattgacattcctacccatctttaatccaattaaccttggatttttgttgtaggaatgataacagcaccttatgcttctctgcatatttctcacgagcctctttctcttgttgctgcaactcagtatttaacagatcttgagccaaactttgttgacaatctatcatccactgtttggccttcttttcatcaccatgaacattagagaatccctgtctgttaattgcggtcagtattggtttgaggcttctcaatttggtgacaatttgatacattttggttccttcgactgactaagaccagacatcagaaacttgctcattaaaatgggggtaactagaccacattttgaaatatttaaatggtttcctaccacttggaggtaaaggatacatagtcaatattgccggagtgtgatcaaagagactctctggtgagaaaattgcttcagcatatggatattcattcagccagctttgattcgccaatactctatctatctttgagtaaatcctatcatccacttgttgcttattactccatgtaaaatagcttcctccaaatttgacatcctctaattgacaagccattatgcaatctttgaaggcagtagggctatagtgagcacgcttgccaattctttctcccttctctaaaatatcattagtatccccaagcacaatccaaggttcatttgttttcagcccatctaactttttccaaagcagtctcctctcctcttccttgttaaaaccatagacaaaggtgacaagaaacttattcctattgtccaaggtagtaatagaaagatggattagttgacttgagcaccacagtatatccaccatgaaactcatcggattccaagccactactattataccccctttatgccaagcattattcgctgtaaaacaccaattggaaaacattcgaacgtaaaaggccccaagacttggagccttaactctcgtctcaaggagaccaagcaaaccaacattatttttagcaataaattgcttaacctcattttgtttatgttggttgttgattcccgaacgttccaactgagaatttgatccattgctttgaggaggctctccccctcctccagttatttcctattcaaccctgtcttcaagttcccaaacttcaaattcctgcaacttttgtgttgtatcattctatagcacaatgaactgattcgaggttgatggatcagctaaatcttttttaggtcgcacacccttcacaaccggcttgaacccttcttcatcagttaacttttttgtttctccattttcctgcctctgtttgcctttgacaacccactcttgtttctttgcttccttcttcctgcaatcatctgtggaatgtcccatacctttgcaatgtttgcagaggataggcttccattcatagttaacaatcacttatgtatctaccccatactcattctcaaagtaaatcagtccaggaaaaccctgttccattgaaacttctatgagtattcttggaaaaagaagcttatccctttctcttgtaacctcatcgaccatgattggttttcctagctgacctacaatcttaaacagcgatttttggccccagtatttgagttctaaatcctctaattggatccaaatgggtatggttcgtatatcgtcttttttaagattgaggttgggatcccaagccttcataatgacaggccttttgttaaagaagatatatcctcctgctagtatatcatccctatctttaatgcttgtaaatcgaatgaggaatatgccataagagatcatacctatcttgtctaccttgtccttccagatccttcttgcaaatccctcaagaattaataatggtggattagcaccaagaacatagcacacaatcgttgatttccagtacgacacttcttcctctatatcatccatagtaatcttcactttctcatccttcttcaaattagtaaatgaggattccaaattacgcattactggctctgctcgaagaattggaggtgttgttttgatgcccttcgagatagaattctggcattccttgttcgcagcaaggaaataaccaaaatcggcaactatctcatctttttctttcaacaatctcagtgacgaatctggagataaaggaggttgaagctcataacgaagcaacagatctggtctatcttcttcatcatctgagaattccactagttcaacaccaagaatttcctccatggatttagtcttgttaacatcaacagatgaattcggacctttctttttcgatttcttgttggacactttcgattttcccacaatcttggaccttgttttcgccatggcaccaactcagagagagttgcaaggagcgaggagagagagaaaatcgaagtttttgttatcaatcaacattgacaccatgggattgttcatagtcatgttggatacttcaattaacaataaatagaaatcaagtaaggtttaacacaaaatcttattcaaaaattat

SEQ ID NO: 111831 - DNA, 4442 bp, Cannabis sativa
ccattaatggcgaatatggcaaccactggtcctggatcaaacaccaatggtggaattccgatcaacgcttcaactcgaaatcaaaacagaggatcagatgaaaacactccggttcatttcaatcactcgatttccattaaactaaacgatcataactttcttctttggaaacagcaggtcctggcagctatacgaggaaatcgtctgatgaaattcatccaagattttgctcctcctccacagttcttgaacaacactgatcagaccaatggaaactataatcctgccttcgtcgactgggaggtgcaagatcagcttctggtatcgtggctcctctcgtctatgactgagagccttctaactcggatggttggatgcaactctgcacgtcagatatggaacgccttggagaaatacttcgctttgcgagtctcgtctaagatactggagtttcgaaccaagcttcaaaatcttcgcaaaggatcgatgtcgttgaatgagtatctgttaaaggttaaacaaacggtcgatcttcttgcaagtgttggcgaggaactcaatgatcgtgatcatatatctgcgatattcaaaggactaccgagtgaatacgacacgttcataatttcctccaacaccagaattgaaggatatacagtcgctgaaattgaagctttgcttctatcatctgagtcaagaattgagaaaacggaattggaacctgagatgagtgctaatcttgtcaagactgatgctgattactctcttgaacaagaatcgaatcttgaagcatattacactcagttcaatcgaaacatgaggccgtctgcaccaaatcgcaacttcacacagtcacatttcaactttcctagaagtggatacactgctggaactcctagaggaactggttttcactcatatcagcaaggttctagttctcgaggaggtacatctgcaggaagaggagtcagatttcctccaccaccttccaggatacaatgtcaactctgtcacagacttggtcatgttgctatagattgcttctatcgctttgacaaaagctttacaggtgtcaacatcaatgtctcacagcaacctcaagctaatttagctcaaaactcagctgcagcacctcaagatcccacctggtacccagattctggtgcaacaaaccattgcactcctgatgtgcaaaatctgatgcatagagctgactataatggccaagagaatctctttgttggagatggtacaggtttgtccatttctcatattggtaattcttcaattattacagaatctaatcattctcttgtccttaacaacttgcttcatgtgccaaaaatcacaaaaaatctgctaagtgtatcaaagtttgctagagataacaaagtattctttgaatttcaccctgatttttgtcttgttaaggaccaggtgactcgcaccactctcttgactggggttcacaggaatggcctgtattcttttgatcatattcagcttcagcccttccccaatccagtgtctataccagatgacagtgacaacaatctgcccaattcagttcaagccaatgtcattaattccatttcttctcaatgtaataagcctagcaattctctgtacactctatggcacaatagactaggtcatcctagtgacaaagtaattagaaatgttcttcaatcttgtaatatttctatcaataataaagaacacttttctaattgctctgcctgctgtctaggaaaaattcacaagcttcccttcccaaaattctctacaactgaatacaatcaaccattgcagcttgttgtcacagatttgtggggaccttcccacacaacatctctcaatggatataaatattatattcatttcctagatgcctatactaggttcacttggctttatttactcaaaaacaagtctgatgcactaaagacttttcaattgttcaaagctgaagctgaacttcagttaggcaccaaaattaaagttctacagagtgactggggaggtgaatacaggtcctttaccccataccttaaccaatgtggcataatacataggcacccttgtcccacaacccatgagcaaaatggtttggctgaacgaaaacacagacatattgttgagaacggccttaccttacttgctcaagcttctatgccattgaaattctgggatgaagcatttcgaactgctgtctacatccataataggttacctactccagttcttggaaacaaatccccaatagaagtgttgttcaatatcacacccgattatacaaccttcaaaacctttggatgtcaatgcttccctaacattagaccttacaacaaacacaaattacaatttagatcctcaccttgcacctttcttggctatagcataaatcataaaggatataagtgtttagattctaatggtcgtgtctacatctctagagatgttatctttgatgagttagtgttccctcatgctcacaaaatctctactgcttcagatgaaccaattagctacttaccatctgctctaattcccgtgccacctaactcatcaactactgctcatgatagaccattattcactcactctcatccttccagatctgctgcaggtgagtcatctgattctgtgtctcagtctccacaaatagagtctaatgaatcttccaatcccacactcatttcacatactgtcccagtctcacttaccaatcccatacctgatgtcactccatccaacacaaatgagtttgtctctgttgaaccagtttcagtcaccaatactcactcaatgaccacaagagccaaagctggcattcgtaaaccaaaagtttatctttctgaaaagataccaacaaatttcaaatcagccttacaatatgagaaatggagacaagctatgtctgatgaaatacttgctcttgtgagaaacaaaacatataccttggttcctttacctgctggccgtgagcctattggatgtaaatgggtgcttcgaatcaaggaaaatagtgatggctctcttgataggtacaaagctaggttggttgcaaaaggctttcaccaacaacctggttttgattacactgagacattcagcccagttgttaaacctgtcacaataagggttgttctcacattagcaatatcaaaaggatggccaataaggcaattggatgttaacaatgcctttttgaatggggatttgactgaagaggtatacatgacacaaccacctggctttgaagatccaacacaacctcatcttgtttgcaagttgcacaaagctctctatggtttaaaacaggcacctcgggcctggtttgataaactacaccactgcctcctatccttgggtttcatctcctcaaagtctgatcattcattgttcattcatcatactaccacctcggttacattggtcttagtatatgtggatgatattttaatcacaggcagtgattctcaagctatatcctccctcattcattctctgcatcaaaatttctctcttaaggatcttggtacactcaaatactttcttggaattgaggtgttgtctaccaccactggtttgttgctgtgtcaaaacaaatatgcaaaggacttgctcactcgagctcagatgcaagatgcaaagcctatcaatactcctatgattagtggtcaaaagctctcggcatatggcagtgaggcctttgacaatcctcaaatgtaccgatcgatagtaggtgctttacaataccttaccatcacgagacctgagctatcttatagcgtcaataaggtatgtcaattcatgcaaaagccccttcaatctcattggcttgctgtaaagaggattcttcgttatgttgctggaactacacattatggactccatctgcaacggtcttccagctttgaaatcaaagctttctgtgatgctgattgggccactgatattgacgattgacgatctacttcaggctttgcaatattctttggttcgagtctcattgcttggaaatcacaaaaacagcacaccatttctcgctcaagtacagaggctgaatatcgcagtctagccaatgttgttgctgagttaacttggctacagtccctattcttcgaattacatattgagctgcctcaaccacctgttgtttggtgtgacaatctaagtacagtcttgctcactgcgaatcctgttcttcatgctcgcaccaagcacattgagttggacttgtactttgtgcgggaaaaagttcagcaacataaggttgctgtcaaacacgttcctgctgttgatcagcttgcagatggttttaccaaggctatttctagtcagcactttcctcattttcgatccaaactcaccattgtcgatagctccaatactgagtttgaggggaggtgttaagggaatcggttatggttgttagagtt

SEQ ID NO: 111832 - DNA, 8197 bp, Cannabis sativa
caatctgcacaagtgcggatatcctcactttgtgaattggattgaatcgactattttatgaacacccctaaattgccacctataattttataaacgtttaccttaaaaaccatcaaaatataaattcccttgtaaatgaaaaaaaaaaaaaaaaaaacatatacaccaaaaatcacaaaatccccacccaaacaaagttattgggctgtttaacccgctggtccgctttccctgcgtcttagcccaagaaagggaccatacaatccatggtttctttggtaaaatccaagtctccccctacctatatatatggtcctcttatgctataacccaacttgatcttagagtgagatggacttgattgattttggacacttgaaacctacctcggtaagtttacaaggtcaaggcctataaagataaataaataaacaaatatatatatatttatatattatatagtgtggggcttcaacgtacgtttagaccttttcttttgaagaaagagtcttaagagacttaatggcatggcatgtctgtgttagcttgcttaactaattaaaaaggaataagcaaaagcacattgttttgggatgcatgtgggttcaacataccaattatttagccgtataactaatatttctaagaaataagtgagatcacagctccacacgtgttcacgccaatattttctcatttacgcctaaatttcttccaatactaccaaaactcgcacaataaaactagtattttaattttctaatcttaacaagagaagagaagagaagtgaagtgaagtcaatcataattaaacaaaagatctctttaaacttttacttttctttttgctgaataaaagtcaattttctaacaacgttcttctctttcttaagtagctttgaccttttaaacccactaaagcagggtctttgtacttgactttgaataattctgatatttttacagtcatgtgagttgttattaatgtgaaacctagaaaagattaccattctcgtgcctatttttatgcccttgctttgtttttattagctttttgcttgccggtggtatcgtataacatattcctttcatggccaaaactttgtctcatgtgcttctactgtatactaatttaaaaaaactttttacatatatctgagtatttaagacatagactaccaaaacttaagttagtattgttcgaacaaaaaaaacaacgtagtagaattaattaattaaatagttacacaagttggtgaaaggatttcgtctggtattataaccttagtttcttctttttgagcaaaagagtattttcttttatctttctaacaatattattaagggtttttttttattattttatttttatacttcaaaatagtttttttttttttttgcattattttataaaaatctatataaaaaaacctcatagcaactaacggaatctaattaaatcacaatcaaaatccacataacaactcaaatagaaattgtcggaaaaaccacccgagcaacccataaatttaaaaaataaaaaaaaaaatataatatatatgatcatttccctattattaatagttgttattattgaggaccgatcgaggttagtatttaaatattgaactcgggtaggtcctaaaccaacttcaatttagagtcgatacttgctaaggacgggcctagtaagatctaagagaggacccacccttctataattgcttttaaaaaatattattactatttgttttgattgaattgggcaacccaagatacatatatggtaccacgttcataagtgaccaaaggtgtgcacaggctgttgtttaattggggtcgaaggcccatgaaaggttgtcgagcaacaacctttctaggacttcgactactcatagggccacttggctcgggctacccaattctattgggacaaatgggacaaaagaattttttttttttaaaaaaagaatacatgaatgtttttagtatagaccttgaatgtttggatagttatgaatttggccccccttattttgttttatcattcgactcctgcaacgttttgctctggtttcttccctattttccaatgcaatgggacagatggagaatgacctctttgggggccttctcagggatggaccagtcaacttagaattatctttactaacaaagtgatgatcaaggtgtgatttttgtatgatgaatttgtaaatagtagatgtgaaaaattattatggaaggtgtttgccgatattttcaaaaatcgatattaagataagatttgagctaaagaaaagattaaaagaaaataaacaacaaattcttatggttggaggtattaatgagttttagttcacaaatcactatattggataatgttcataatagattttacactattttgaagagtttatgctctgtaaacttgaggttatgaacccctcacatgaaggttataaaatcctatttataatacaatatgtaatatgggtcaggctgacccaaacccattaaatgtttacacagtgttcaacccattgatggggtgattacattgtaacttgttgaatttgttttatgcctaaagcctaaggcccaaagtaggtgaggcctattgtaccctgcgatagtaactggtcacaccttaagtcatcaattgttccatggtgaatgctttatgtcagagtagtggccgtaccctaaattgatcacacctctttgccaaacccttaactaagaaaagacaaaggagactactatggcaaagaaccattgaatgtagtccttgagggattcgtcttctagttatttcacatctaccaaatcattgagttcgagtttgcactgttgagaaggagcaaattgattgtcaagggcatcaactaaatatttccatgaatatatagatccaggggaagcttgagataccatcattgagctaagcttgtcaacatggcagggaaaattctacaccaaacatcgtcccttactctttgttgatcggtctacacttcgatgtaatgaatgtgggacaataggtcttcttctcgatgtattgacgggaggaagtattcatgaacttaggagggatcgaccgagctttggtttggtctgagagtagtgaatgttgctctctatccagttcaaactctgacaactttagagttatgattcctttaactaaggctgctaggttgtcgaacctgttaacaccatgggtggtggtttgtgtcctagtcgaaacttttattgccagattaaggtcaccctagaagctcccacttccaccaaccgtcttctagtaagggtgtcacacaggtccctttgtcttccatgtcgatcaaggacatcagttgactggggtctagctgttgtctcttgaacacgtggtcgtgaaggcaatgccaaagacttttctggcacaaaggttagattatcttgggatgatgcactgtgagagagatcgttcggaatgttgtagtgactatttccttcgaaatagtcttcagtaggatcacaagtgcgaaaagagtatttattgatcaggtacaattcttccccatgcacttgagggaagtacatgtgttgttggttattgaagctgtgagaaaagtttgagcgtgaagctgctcgttaatccttaccatttgaattgcatgacctctagttttaaagtatagtctttgtcttcccccttcagtattagtcgcaggttactttccctttgcagggtcacgaggcctggtgtcatttgaatgatgaggagaactttgcagaggagatcgattggttctcttggtagtatgtagtcgctcaacatcaggtggaggatccattggttagcaatctcgagtttgagtctttttggattcttgctcaaaattttcctccctctaaggagcttgtgcacctgttgcacgctgagtgtttgcatgaataccgagcatggtataagtgtttcgtgcattgagggtttctccttgagtactagttctcacatggccagttggccgataaggtatctacccaactagcttggaagctctccttagggaagttattatgcgacaggaacgataagcttccttaatttgctaagacaggttagccatttgatgttcttgctccgcacactgattctcaacattcttccaattatccatgaaccagttttgaaaattttcatgttgtttgtcgagagaatctcgtagatattgctataggtcagccactacttggctaagctgttcaacaagaggatcgacttccttaagctcttctagttaaacaaatgattccccaagtggaatttattcactggtctcaataccagttgtagtttgtggccttgggagatgagttatggagctagttttgaggcctccacctcgcatctgagatgtaggtgtagtcccatctccagttccagtgattggaatggccccagtctattggccaacaactgtggttctttgcacacttgtggatcaagttacaaccatcttgtaagtgacttcttgagttgtggctgtcaatgaaagcaccaaaattttgatgcagatctctggccaactcactcgtatgtatagacgtgatggaagttagaagtaactaagtaaagtaaagagcacacacaagaatttatagttattcactccttgtgtcgtgagagtaatggagctccatctactttgagtttttattataatgagattgattataagaaaaatttctaattttacaagttttaatttctagagagagatgctctgaccttatgcgtactttttttattgtgaaaaatgagctagatgagctttccttttataaggaagaaagtcctattaaaataataattaaaaagtccaaaaaatataggaaaatacatttaggctatttttgaccattgatgattatctaatggtgaaattgaattcggaggttgatcgttgatttttgaagctgaagtcgcatccgtgggagggacgcgcttcgagtaagtaagttttgtaacttaaatttgtaactctcttgaggacaaaaattggcgttgatatctttagaatttcaattgaatttgaagatatgacttaatagagaattgaaatagcttcaaaattcaagttgaatcgtgtcaatcagataaatattgagtgagttatggtcattttactgaaggctactctgataccagtgcccatattgacagccagtgcccagattgacagatgacgtcaacctggatgttgggccaagggaaaaacgttttggagatgtaatttgtgatgcctaagtgatatttgaaatcactaagctagtttttgtattctggttaagcctttcactaattctcggagatgttgctgtttcgtagaatcgggagactcgaaataacccaatttgcgactgggtcacttcaccaaaaaagtgataatataaagttgtgaatttgacttgtataatttcatagctcttgtttatcatgaaaaactagatgaatgatgaagacataatcagaatcgaataaggagaacccagggcaccaagtcatatgtaaactttggcgttgggtgctctttctggagcttccatgatgttattttgatacttccaaggttcttgaaactgtggaagaggtctcctactctatttttgactattttggagagaattctcaaaccaaaatttgcatttagaggatcaaaaccagtgcactatatgggtgatcataaaatttacaattcgtggttccaaaccaaaacaaatctggaccaaaccatttgagaccaaaccaaatgaatccagtgtgaatgctttgatcaatccggaccattttaaattctctggtttggtcacagttttagaaattttggtggcgcttcaaactaaacaaatctgcataattattatgtatatacttaatatatatttttagacaaaatattgatatttgggaataactttaggtagaatattgatattgagtttatattgttacaataataattttttattgttatttatttattataaacttattaaaaggaaaaaaaatattgaaaaatgaacaattattgtaaaaaaaaaaaatagaacaactacgaaatacaaaccatggttcgaaccaaaccaattcatttttgagtggtttggtttgatcatttaattggtttggtttggttttgaatttttaaaaaactataatactggtttggtttgaaaaaaattaaaatctggaccaaactaatctgtgaacactacaccaggttgattttcaacctgagtgttgggcctaataccaagtcaacatgggtgttgggcttagttttctaccgatcaggattctcatttttctccttgattttacttgtatcttcaccatttttgatgatggaaaaaatgccagaacactttttttgaaaacttgattggaaaagccccaagttgacaaaatgtcaaccttggcactaagtccagtttcaggccactaaatggtttcgtttgatttccaaaaatacttgtatcttaaaatttgacaaaaactaagaaattcctggaagacttcttggaaaaaatatttggaatcggctcaggctgtcaaaatgtctacctgggcgctgggctccctttttggcctctaataagttggtctatttcttcccgaaaagcacttgttttctcatttttaatgaagacaaagaaaattctcaggatatttcttcagtttgatgcttggaagtgccccaagctgacaaaatatcaacctaggcactaggtgcctgggcacttggtgctctggatgctaaaaaatgaaagtgctcaaaatctaattttgatgccttaaatatgtttgtgacgtgtctaattcctgtcctagtataaattttgacccattttcactaagacagaccccaaaattgaaaccctagttgggttgtcaacgtaggcgctgggtgaaaccctaggtgtttgagttgattcctaaaggtttgtttcgtgtattttcacttatcgggccttggacttggaggtttcatgtctttatagtacataatactgaaagataatgagttggaaacaacttggtgggatccaaacacccattctagagttctcgaagtcaacttgagcacaaggctagggacccttcctaggtcagctactatgactccagactacaactccgggatgttttctttctcgccatgtgtaaaacattgatgtccacgtcactaggataagttttcgggttaacgaactaaatgttacaaattcaacaacaatagaaaaaaaacttaaaatataattaaattatatattttttattttttaaatatattttattatatatatatatataattttttaatatataaatttaattggaatatatcaacttttaattagattttgagatatcaagagagacagacagaaaggggtgctgcatttatatcagaaaggttacttgtagaaagttcttgagacttttggaatgacatattacaaagttgttataataccccttgcaaaatattttagattgaatgtagctcacatgccaaagaatgaaaatgaagttgttgaaatgtcaaatgttccatatgctagtgtaagaaggtcgttgatgtatgcaatggtatgtaccagaccagatattgtatatgcactacgcgttgtaagtagatttatggtaaatccaagaagggatcattgagaagctatgaaattgatgttgaggtatctcaaggggaccactgaaaaagattagtgtttagaaaatacaagaagtagactgatcaaggcattatagtggtaacgtggattctgactatgctagttgcaaagataataaaaattccttagactactattagttagaaagaaaacttgtaaaaagtggttgctttgtctgcaagagagtttgagtatatggctctcattgaagttataaaggaagctttttagatgattggttttattgaagaaattaggattgaacagaagcttttcattgtgttttgtgacaaccaaggtgttaatgaattgagaaaaaaccaggtgcaccatgaaaggaaaaagtataacgtccccgtttcaagcctccattgggcccttacacccacagaatgaatgactcttatacacgagtacgtcactctggctgcttcatggactgacgactgaccct

SEQ ID NO: 111833 - DNA, 2335 bp, Cannabis sativa
  modified_base (1495)..(1505): a, c, t, g, unknown or other
gtaaaatggtccgaaatctcaaccccgccaaaccgtaaaattctaaatgtctatctaaattgccccattattatctaaatactaaactataaaaaaggatgactctaacgaccaaacgtcgcgttccattattaccctaatatgaaaaacatgaaatttcatatataacataaataacacacttagaatttacatatatctccataaatttataaatcataagtagaaatcaaatttcgaaataaaacctaattatctactaactttcatactaaaattaagcggtcattataattatccctttaaaaggataggatttcgtcctcgacatctaacttgaacaactctggatattgagccctcatgtcatactctaattcctaagtggcctcctccaccttactgttcctccagagtaccttgaccaaagctatggtcttgttccaaaggactttatcttttgtgctcagtcacttaaaggccattcactctacaacttttgcaagaaggctatttttgtatgccacaacttctaaaccactttattttcatgccttcacagatgcggattgaggagcgtgtttagacacaagacgatcaatattaggatactacatcttccttagacaatcactcatctcctcgaaatccaaaaagcaggaataatataacgatcatcaactaaagtcgaatacctagccatgaccaatgcaacatgtgagttaacttggctccatccatcattcgaaattttagcatcaacatcagacttccctcgactctattttgtgacaacaatgctgtcctccacttatcagagaatccaacataccatgaacgcactaaacatctagaaatttattgtcacctaattcgagaaaaaatcaataaagacatcatcaaaaccaatcgtgttttatcaaaatccaacattgtagacatcctcaccaagccagtcttccttgcccagcttcatgaactcattatcaagatgagtgtcaaaaatctttacgcttcatctcatagggggctcgtagaccgttaatttggttgttctttctgctacactgctatatcaactcaccctctatataagcacgtatgtatttttcaattgagaataatggaaagaattttctttctctctctgtttttctactaatacttgcgattatttattttccaattgcatttgttatgtcacaagcacgtacgtgtatagatttaaataataataatatatatatactggaaaattttaaataaagtcattaaaagtaaaatattatccaaatcaatatagtttggaaattatttagtgttttagttttgaattttatttatttgtaaataataatttatgttttttcttttaaatctttattatatgattttgcttttgatttaaaattggtagatatttttttaaacgtagagaaatctatatttataaatgttttatatatacatatctttaataataataataataatnnnnnnnnnnntaataataataataatattcttatataatttactgtacacatgcatataaggattattattttatggttacatgaaaaataatgcaatatagtcattatattttttatgtaggttattattaaaaataatttatgaaaaagaaaattataatattatattttaataaaaaaactttttatgaagaaaaaaaatatcatacaattatatttttatttttggaatcttcttaatttgatcaaattaacaaacgcttatagaattgatggctcaaaatctgtccgaaatctgcctaaggaattggtggagcttccgtacctccaagagatgtaataattataagtgtgcataaatattaaatatttctttaaatttattatcaccattaacattattaatatgctcatcaaattaaatatatattaaagtactaaaacgtagcaatcatgtctgtttctgtttatttatttaattactctttttgttgataaattctgtttctctctatcattattacaaataatataatataccatgcattgcatgttattctctactaaatttgtatataatcatatcaattatttttatcatattcagtgtcctctcacacaattatcttaatagtacaatctatttggaatgggcagggtggtcttaaatattttggaggttccattttaattttaaaaattaagcccctacaaaaaaaatacaatttataaatattattatacggtatatattttacaaaacaccaaagaaactccaattaatttataaaaattgttattgattgcaatacaacaaaaaaaaaatgatagaaaaaaaa

SEQ ID NO: 111834 - DNA, 3902 bp, Cannabis sativa
tttttataataaagttctgagctcagtgggatagctcagtgggatgttaagtgggatgttacaaggatgttacaatttttttttttttaagaaaaatacactcaactactaattttgttttaatataaatgatcattcacctttttgcatatttattgtaaaacccactgtgtattttcaaacagctttgaatctttttaattaatgtatcaaaattagcactttataaaataaggcaaaatattaggacgttacatttattctagtggcatatttatatttaaatggagccagggccaccctcaactaccatatacatatctctgatatttagcgcgcttaaaaagttattccaaatcacgtggctcttaataatgtcttgtcttataaatgaacaacatatagttatctcaaatttggaatagaaatatatctacaagactttaaataagttgtactttttcaccctttttatttggtatgcttacaaatttgtacaacttagtgacgacaatatacaaaattaaagaggataagaggggaaaaagagggagacatgtaacaaatttaatgaagaaaaggaatgaaaagaaaaagagattggctttaaattaggaaatttggccttgaattttgtaaaattacttggagaagcaaacttattattatgcatctctatggatgagatcattaatttttaagagttatcaaatagactgcgtgacattcaatcttatataaatttatagtattatatatacatatagcaatgtatctatatatttaagcaagtcaaagaatatttccataaaaaaaaaaattaaagaatatagagagagttgtgaaaaaatctctattttccttaagagaactagggtatatattcttttgtaaaacatatacaaatatcatatataattatagaagaattattcatatcgattgatagctcaatatgtgggcaaagctgaagttttcaaagatcatcaaattaggtatatatgctatagttgttataataagttaactatatatataatccatataatttccaattaagccttatatatattgtagtactttatatataacattaattataataactttttaattctttaattaatgatatattccttttgataatatctatacgtatacaaaatattaatctgtatattatatatgaaaatgagcccagaaaatgaaagagaaaactatcaatatatataagttttacaggaaaaaaaaaggagagaaatacatttttaattaatttattttgatcataaagcaaaaaaaaaaagtatatgaaaagtacattattaattcgtctttatttgttgcttctaattagttgtgatcattaataattaaacttgagtttcaagacatgtacaaatatgatacctagagatatatttttatttcacttaattatttatttttagtattttcttgtttaatgcaaattatatagacgtgcgtaattgtataaattaacatgatgaatatacataaaaactgatcatgcatatatatgtatatattataattaaacaggtttagttgagaaggaatcgagacaagttgacaaaagcttaaacgtaattaatgaggagtatgttaatgcattaagaactaaatcctttggtgagcttttaaacaaggctaatcaccaatcttcttcttcttcatgccataacaaatgttttgaaactcttctagaaccaagccaagaattcatacctagtattcttgaatcatcatcaaccctaatactctccaaaaatatacctcaattgaaaacccttttactcaactacttcgacataaccgctgaggcttcgaaattttgtagccatctcctcaagggcatcaaccaaattcaatccacctaccttctcatcataacacaagtgttcgaccgaattatagattgcgatggtgatgatgtcaagttgatcatttcagaactaaattactcgatattttcaagtccaaacaagttcggtttcaagctgattcatgagaagtgttcctcgattttgcatcgcttgaaatcgatgagaaagaaagtaacaaagaagatcaaaattatcaagtgcttccaaaagggttttggaatttgcatacccctagcagctcatgctgctagttttgtttttgtagggccagtcttttttagcttccctattaagcgcacggcgggtaaactctcctctttgccatttttgagaagtggagctctcagaaaagttggagaccaacttgatttagcagctaaaggaacttatatcttggatagggaattcgacacgatgagcaggctcatggtgcgagttcaaaatgggcttgagcacaacaagacaatcctggagtctttcttggagaggagagagcatagattttgtttggaggtggttaaagaggttattaataagggtgatttagggtttagaagacatgtggaggagttgaaggagcatgtttatttgtgtcttgtgaatatcaatagggctagaactttggtgatgaaggaaattatgaattagctaagcaatatatataattagattcacatttcatatatatgcatgtatgaaggttaaaattgattataattatgaacatctagtcttatataagtagttagtagttattcattttatatattgtatacattaattaattgtactatttaaagtttaaatagataagagaattaaactctatgtattagctaaatatgttaaagattactatcttgattattggtggaaagttaatagtatttatttgatacatgaactattctatttcattatcaattatcagttaacttttaagatatttatgaaatttcatatatcttgccatacatctcatcatatttactttctcaattacacttctccattctaacaagctaaaacaattttcatccgttataaaagtgtcagcttcaaagagaaaaaaatgtgtaattagaaaattttcctatagtaaatattttggtatatataattcacctacgtttctattttctaacataaactaaatttatataaaataataatatttcataattatgaatattatcatatatattcatgagccatttatgtgcatgtttcagaatactaatgataatggagtatctattaaatatgacactgaagcattttcaaaaaaaaaaaaaaatgacactgaagatcatgcatggcaatacagacaagaatattaaatatgtatattctctgtagatctgagatcttgatgatatgctttactattctattacgtctcacaatacggtctcaactcaacccacattattattacttgtatgcatgcattaatcacactagaaatgttaaagagtgttaattaccaagataacattctaatttaataattattatataaaaaaaactgttaactattctcaacgaattaagactgtacataagtctaaagatggtatggattcgcaacttgcatgattttgtaaataccaagttcttgtctaacctatctttttcatatttagattgattttatctggatttaagcttgaatataaaaagaacaaaatcaaaaattcaacaccagaattttacaagcttcacctgccctagaaactcattctacgcggcaagcgcttgggttccccaaaccagggtaataactttcactatattcaaagatgtatcttacaaaaatcaacaatattgtaaacaatacactcttttacaaaatacagtgaatctatacacataccaaccaagacccttgattggagtgaatggtgagctctcttcaacacttcttcaatctgaactcccttcagatctggtgatgaagatgatactgaaatcccttcagtctgaactcaacat

SEQ ID NO: 111835 - DNA, 5401 bp, Cannabis sativa
  modified_base (5330)..(5358): a, c, t, g, unknown or other
gtttttatattttcttatatacaactgacatttgcaaaaatacggtttttcagaaacacgataaacaataaacattcaagttgttcacggtttcttgagaaagaaataagatttggataaataaaaaataattaattctttccttaaaaaatacaaagtattgtcccaatttttgcccacttgatgtggcatatccaagtacacaaaaatgagaccacgtggaatacaacatgttaataagttaacaaagtcaccttgcacgacatatcaattatcgagggcgctaaggcaatcaagtaaggttgactagggagaaaatggccagccaggggaccttggccagctaatgaagctccatgtgccggctaggccctaagagtagggatggccgaccaacacgtgcaaacaacatcaaagggagtttaaatgaatggttgggttcacaataaattttttgaacaacattcaagcttaatttcagttacggaacatatccgacaacccacaaagataagaatataccctcaagatattaatccaacattataagaatttaattatcctttttttaatttaaataaaagataggaagagttattttccctattttagagggatatttgcctctttgaattatgatcttttgtaagccatacattatataaagggaattaggcaagatcataggggacccaaactctaagtctcacatgccccatacccctctctctcactagacactagtctattttcttcataaaatctcacttgttctgaatctgtaacacttaattctcactactgcaatattgaagagagtcatagctagaaattacaaggttcaagcctgtaatatgcttggtattttctcaagaatcaatccaactaaaaagagagtaagtcattacccgctaatcaaggaggtcaaacctctataaatctatgtgttacttttatcatttgttattatttggtgattatcagtaacaaataacgcttcgctgtcagttgaccaaattttgagtcaacattttagtgctttcattgagagctttatttgattttcatccatctcattctgattaatcaccattgttctaaccagaagaaccactttctccacttccttgggtattcctcaagatcccatgacggtcgatctcgatgttcgtgttcctcccacaacggaaggtccaactaatctgactaatattgtgaatctggtcaatcctacaatccttgtgaaccttacaaattctgccaatacctttaatcttactaattctgctaacccagtgaatcctaatgatcaacccttgccgcctaggacaaatccaccagcagcgcctcgaatagaaaaccctatatggaacaacctccagagaacaaaactgggactgctccatggtactaagtaggagagacagggccaagaattggtgaaccatctattagtgagcctcacttggaccttggggattgtgttgagctggttaatatcagagaagttgtagggcaggtcactcagaaaatataagaagatctacgcgctactggttgtgatgcttttgcccagcaaaaacacaaattcctagggtggatggacgattaggaggccatcctccaggcccatcaagcaaagctgaactgctgtaatagggaggccagtgacctaatatgacagttcaatgagagaattgccagaagaggtcaggatctaaaaagagatcctttgcaagaaaaggtcattgacaggccagccatggtctacaggcaggtagacaatggacatatagtccaaccaggtcacttgaacacaaggacagaccttcctctacctgaagacggccaaatcttgccagataggtcatatgacaggaatagccagttcctagtagtaggaggtgttggaggataaaaaacaactccaaagaggggacataaccaactaaccaggcccttactggccagcatagtaattctctcctctgaaatatttgagaatatgttgctctaaggcctagggaccttatttttgataggctggatcctaatataagtgaaaacccataagacaataataactcaaggagcgggaactagagttattttgttccacctttgaacaataattttaggtaggtggacccgccaaacccaagctaatggtatgaccaaccgcatgtcaacccatagattggcctgaccggccaagggagtctggctaatttggttggccaaggaagggggctggccgaccaagggcatctgtccagctggcgggggctggccagccaagggcatctatctagccaaaaggaaattggcgtgatttactcccagaggtactctgatcacacaggaccactgagaagatggccaccagatagacaccctttgcattagcctatctataaatcaatgttgcccgttaaactggaaccaccatcccataggaggatatcctatgaccaagaagtaaaccacaccttactggaacaatcccttaacaaaatagaagaaagaagagaccaaaccgacctaaatctgcatgccttccagcaaaaggttgccaggtacttcaataaacaagtctaggaaaggaaatactttgtaggagacttagtgctccgataaaggttgcatggctagtgctccagcaggctggttgacaggtagctcaagagtatggtcagccagtacctcctcatcactctggtcagcccaatctatccgtggccaactctcatacagcttcctatcttgagcaagccaactttcacgaaggggcgattccatgtacttcaaattgacctccatggacaagtctaaatactcatccctaatcgtgtgtttcccatcaagggcctcttacttttcctggagagcttcctgcttttcctggagagctacctacttctcattgcaatccttctctagttccttttttcagcttggagttattagcagtcagatttgtcacctcttatttacggagaccaagtagttgacccacactctcatactgctcctggacctcccttagactagtcgatgtcaagtccagattagcctgcacctttgcaagatcaacttcctttgccttgagttcgacatcctttctctcatgtttcttcttgaaagctgtagtagagcccttagccctggcacgggcatggataagattcaacaagacctaaaaccaaaaagaaataaagttagaaaagttgtacaaaaaggcttgcatacacaaagttagacaagtaaaccacttacggaggtagcatctttgagagtgctcgctatcaggtagtctagggtgtcagcatccaaatcatggagttgatcatcaacacttggaaaaaaatttccaatataattgtgggcaacatctttttccttctcacccttagtcgagaaggttgcccgactgtgcttctgggctgccttgcctgatgtctctgaggaagaggaggaggagtgctccttgaaggaatatttataaccacaggttggttggcctgtggaggacctaaaggaggggaggcaagatagattgggtcacattacaagacctaaaggacttggccaccttggcccgaggctaactagaagaagagctgcctgaaggttccctcaccaagtttttcatcctagagcatatctacaaaaaggaaaataaaaaagttagaatacaagtaataagtactaaatgcaagtaaaagtaaaaaagttactaccatctagagggttgttcgagagcctatcatcctcaaaagaggaatcatcggagctttcctcaaaagcaatggccttgcctttgtctctagacgccaaatggtggctgggcaggcttggtagattcctatccttcaggcttgatcagcacaggaatgtcatcatccatgcctccccatgctaaatgttttcgaagggctcgttccctcttggctactattctggcaatcttggctagagggatgtcctccttagattcacccttttcctgtttaggcgcaggtcttttcttttgactaacctccttcaccgtgggagtatcatctggatcttcaagagggtttccaacacccttggtgtcctgtgtaggagggtagaggccatacttcctaaaattctcctcacgggccaacctacaaatgttgtgcctttccgtagagagagacaagatatcgttagctctttccctcaatctaagagtagggattgagcgaatgtatgttgggaccttttgaaagtgatgaaggacatatctaacatcccaagcgatgaagtagctcctagattacttcccaaatttagacatggctttatcattagtacctccaagccacttatagcctagctggctaaaatagaattatctagactttccctacttcagagtggtttttagttcaaatcagtaactcacctcgtaaggtgagggttgtgctagcctaactttgcatagagaataaagagcattgaaaggtacttaaggcctttcgtggtaatttgaatcgaacacaacctgaagaagttggctttttccctacaatagggatgcaaaggaaacattgccccttgctcagcatgaggacctaaccatgacatctagttggacaataaataatgcgcaaatcaagctctatcaggcctaacacattagactcttcccaaaagtcctttttccttgatttttttgagcttgatagctgacagggaagataaaggaaataatcagtgctactagttaccgtacttgaggacccatggcttgggagcctcttcctcaacatgctcaaccccttcctttgacggttgacccttggaatttaaaggtcgttgagcctcatcataagtacccaagggattacgctagatcactgtacaagtcttatactgcttcctagcagtacttgtcccaactgcagatttagctcgctcagcctcagaatcaccatcctgactagccgaaggttcctcaccttggccagccataggtttcctagccaaaggctcctcagcttacctagcctcgggctattcaagttgagactgttgagcctcctggacatgtcaaacccttcctcttgtcattaactcgacaatatgagggtccttaggaggtgccctacgacacgtttgcttcgtcctagccatggtaggatatggctaagagtgtttagcgatggtaatagtagcctcagctgggggagttctctaactgtaagagtttcccatctagtgggaaactgttaggtacaccttctcggacaatataattccacaacttggggaggaactacttgttggattttatgccctannnnnnnnnnnnnnnnnnnnnnnnnnnnntcaatttagaattttgaagtgaattatgattacatgtatgtta

SEQ ID NO: 111836 - DNA, 1954 bp, Cannabis sativa
  modified_base (39)..(40): a, c, t, g, unknown or other
aaccactttaaaaactcaaacagtaaatttgaaaaaaannagttaaaaaaataatatatggagtaattcctctaaaaattattgccaacacattcgcatatgttattattttattttatttttgtaaaacaactaaaaatctatcatacaaataatagaacgacgcaacaacaaaataacaattaattaatgtcattataatgtttttatatgaaattattccaaacgatttatgttttattgtaaattatttctattatttttaagttgcttacaaatgacatgaattcaacaaacaaacagttaacaaacaacaaaattttacttttcataccaattgcaattgtttgataaggaaaaaaaaaacaagaaactacagagaaatttgattaagttttttgtttagccaaattagcaaacaaaaaaacaaaatatcaacattaaacaaattgtaatcattcagataatcaaattgagtataagattgatatattaaaacaatttaatattttaaataggaagggaatgccttgaatgtcaatttggattatcttgggagctccaatcaacaatttatcaacaaaatgtttgataatctataacattaaaataattatttcaatttatgttttacttaatttttttgaatttatgttgttgcttgccttttttttttttgtgaatgctttctcagaaaatttgttattgtttgcttattttttttttggatcgatttttgtattgtttattttggtatatgaattataacttttttgtttttccttcgatttgttgttgatttgtcgttttttctgaaagcttcatgtgtatcaatggcagccccgccatgggaggaatgaatcgaagacgaatgagtgtgcttagaagggtaagtcgtatttttgtaataaaaaaattggttgtaattttgtttagatttctgcgttaacatataaacgttataattaactttttttttattgtctacttgaaaatttctcgcgtttttatattaggcacattaatttgcgttctttttttttttttctataactttaaaaattatttctagttaaaataattatttctaatttaaaaaaaatacgattatcatctacttttcaatgtgaaaattttaaaatgtgagaaatatatgttttgtccctatatctagattcaaaaaaatattaaattatttatgatactaattatatactaattagttacggttccaaatgtacgttttaaattttaataagtattcattttaaaatttaattaattatattctcaatactctatgatagttaactagtttctataataaactaaagttacttaaatatatcttaaataatattaacatatcataatataattttaaaataattaattagtaattaatttaaatttctgattttttttgctaattacttgatttatttactttattgtaacaaagtaaggtattaaagtattttaaacaacataaaataatttaaagataaacatataattttaaaaataactaattgaaaaattaaagatttcttatatgagatttttttattttaaagtgaatcgttttatgaaagataattaattagtattttatcataaccaattggtctaaaaaaatgtacattatttgtaacttttttttaatttagttaatcaaaatatctatataatttacatttaaaagtatattcgtagaaagaattgggttgggctatctgctctcttcatcaggtgtcagtttctacttcatggatctaggatctcattagccttaaaacaaaccaagaaaaaattcatttttataggttttgttgtaagtttacaaaaatatctttttttttttctaaaaaaaaaatgttattttataagaaaaaaagaatgaggaaaacaatacgcgataatcaattaccttatattgttttttttttttttt

SEQ ID NO: 111837 - DNA, 3183 bp, Cannabis sativa
  modified_base (887)..(894): a, c, t, g, unknown or other
acatttagtcacaaaaaaattatactgtgactaaaaaattatcactaaaaagtaacaattttttgtagtgcgataaataataatgctcataagtactggtcataaacatagcctagtatagttctacacttcttcttccaaagaagagatctcaaattcaaataataatactcataagtggtcataagtacatataatctaatagttttactctgaagaaatcccaaattcaatgcctgcccaaagtaaaaaaaaaataacaatgctcataataacaacaataataataatacagtggtagatgaaatgagatgatcatatatggagacatgaccacactcagccttttaattataatttttttttaatatatttacatttttgtgccataaatttgatttttttttttcaattttgtcatcacatattataattttgactttataaatttatatttttcatctttatcttcatatatttattctctatatctattttttttaataaaatttacattttcttttctaataaaataatacattttttttttatcaatgcatgatattaattgatggctggctcctccaataatatatttactaatttttgttttgcttgaaatatatactaatttctacaatctataaatatacccacaaccacacaacacttctctcattataatttctaatatatattattattattatatatatcaaatgatacatgcatactggttgattttctgcgcaggtttcctaatttgtttatataatattatatatatatatatatatatgcatgtctcgtactttgtttaattgtttacgtacgtagcgcttataattaatctctttctttgataaatatatatatatatagagagnnnnnnnnagagagagagaaagagagagctagcattaggaatattgaagttgtatacgtacgagctacagtacgtaaaattaataataataatatatataataatgatatattattgcttcatatatcattacatgaacaaatcacagtaatcctttttcattagtaatattacgtatatgtacacaaaattatgggttcccatcattctactacctctttcctcattagtgtcatattttccatagcattattagtaataatattattattgttcatcatcaaatttaaactactatttaataataataataagcaaatgcttcctccgggtcccaccccatggcctatcctcggaaacataccggaattcttgcaaaataggccgtcgtaccggtggctccaccatctcatgaaggagctaaacacagacattgcatgtattcgcctcggaaaagctactcatctcatcactgtcacctctccgaagatagccagagagtttttgaagaaacacgacgcagtgtttgcttcgagaccccacacaatggtcacaactctcctcagcaacaattacaaggccattgtagtgtcaccgtacgacaaacaatggaagaaaatgaggagagttgtgtgtgatgttctcagccactccaaactcacttggcttctcgagaagagaacccaagaagctgacaatctggttcgttttgtttataaccaagcgaaccagattgggggtggagtggtgaatgtgagagttgcggcacaacaatactcggtgggagtgttgaggagaatgattttgggtagaagatattttgggaggggaagagaggacggtgggcctggtaaagaagaggaagagcatgtggaggctttgcttagtatattgtcacatgcttatgcttattctgtatcggacattcttccatggctacgttggtttgacttagatggtcatcaaacaagtgttcgtaaagccatggaagtggtcaacaagtaccaaggctccttagtgaaggagaggattcaagaatggagagatagtaataataataagaaagcagaagacttgcttgatattcttatctcccttaaagactctgatggaaacccacttttgtctgaggatgaaatccaagcacaaatcacagtgagtactgtatacatgatctcatatatatgatctcatattagcatttctcgttatataaatatgcatgattgttgtctttgttatcttaatatataaataaatagttgatatatattaattgttcgcgcataacttttaaatatatatatggatggatgaaaatatttatatatataagcaggaattatttatagcagtggtggacaatccgtacagtatagtagaatgggcactctcagaaatgttgaaccagccagaaatgcttgaaaaagcaacacaagaaatagacagagtagtgatgagtagtagtaatggtacttctacagtagtacaactccttcaagagtgtcacattcctcaactcccttaccttgtggcctgtgcgagagaagctctccggctccacccagtgtcggccttcaacctcccacatctctctatggccgattgcaccgtggctagctacttcattcccaaaggcagccacatcctcctcagtcgcctcggcctcggccgtaaccctactgtttgggatgatcagcctttggtgttcaaccctgaccgccatcttcctgagaatcgacgtgacttggtggaaacagatctacggtttgttagcttcacaactgggaggagagggtgcatcggagcggagctggggaccaacatcaccatcatgctcttaggtagattgctgcaatgtttcaattggaagattccacaaggaatggacaacatagatttgagtactgaaaaggatcacaattctttgtttaaggcaaaaccattgtttgcccatgcaatacctcgctttaatcttccttcttaatttctatatctacctcattataattaattaattaaatttattcacaataaataaatctatcttaattataaattaatttagatttaataatgtcattgctttactttaatttagtaagaataaaagttagctattcatttgttttgttaaataataaataagttcttgtactttttaaaatactacaaaataataatttgaactgttgagaatcatggggttccaactcaaaaccaattggcaatgagtggagtagtccatgttcttatatatggctcaatattcttacatgtgggacaatattgtccaa

SEQ ID NO: 111838 - DNA, 2466 bp, Cannabis sativa
gcaccagtggtctagtggtagaatagtaccctgccacggtacagacccgggttcgattcccggctggtgcattcctatggagtaatgatgataacttgcgccatattgaaggcggggtccttcatcattatctgatctcagatataaaaatgcgcatctgaattccatttttaaattttcatacctttctaaaataaggatataatctcagtcaagtcttgtttttttctttattttttttaacatcagttaagtctttggaaacgaattgtttcttttaactaacatgtatacattagaaatagtagagagagagagattattgccaggataactgaatctcctacacaaaaggcaacccgatttatctataataagatatagaaaaaaggctctaacagtcagaaaccaagtacataacttgctatacattaaagtgactcctgtcactttcattgttgctgttgatgttcaaaatgttgaacttgcaaagagggcatgtagcatttatgtgtaaccatttgtctatgcaactgcaatggaaatggtgacggcatggaagctccctcacttcggcttcattgtcatacgcggaaaggcagatacaacattcctgcagtttataccaaatgaagggactcattcagatcataacttcaattttttctcaaacattatattgagcttcattgcctatcaaatcagttttgtgtctgactatgtgtctgaattccaatagaactaatatgatatgttatgagactgagataacttactgcatcctcctgagaaagttgacgttcagttggcgaatctgtgttacattcgatcattactccttgaatagattctttgttctccccattaaccatctctgaatcactcattatgcggaatgtgaactttggcaaattatcaatttcttcttctgttgctccctcctgtttcacacataataacagatcatatatagagtaacagtataccaaaagaaagatggttctctcatacttgcacaaaacataaaattaaacaactaataacttatatacagtaaagttcaggtccagattacatgcttgcaccgtttacctgatccgatacaacatataaaattgcaattatgcaggggagaaagcagcaaatagcaatacccacgagacaagcgatggcaacacatagaatgacaaagaccatatcaaaagctagaaaggtaatacaaagcctgcaaaacagagctgcacgtaagccataatacaaacaagacagttaaacagggcaattacactcttaagaagatggcttccaaggaattagaacaaaccaataaagttgaggtgaatcacgagtcaaacatccacccccagcagtcacccagtaaaatccaacagcccaccatacaaaggaaaacatagtatttgcagactccagatgctttagaatactgtcaagtaaacaatgaggttcaaccaacaaccaaattagttttcaatctaaatagaatccacaaaattggttttttcttatttattttaatcttgaaaggcgaaaaacagaccatttctgagcctaaaataagttttatagcaacaaattttcccagtttttttaacgtgactactgaattgaaacgtaattttataaaaaaatatgaacactctaacctggaattatcatcggcctcactctgttcaattgaatattcaacatcgctcccagaactcgaactccaatttccactactttcccaatcccgactgctccggaacgcttccgtctccggcacgtgctccgcgaagacgcaacccatgtgaaaaagacactgaatcatgtagccgaccacccatagtctcaacggcacggaaggcttttcgttcatgctcagccacagcacagcaataccgctaaccacaaacaccaagttccacaaaacatcaagcaatattatggctttcgagcgagcccacccactttgcctctgttcgagctcctccgccgcgttctctcggacctgaaccgacgactcccggagcatcattcggctcccgctggcgcgccgtagtatccgagccgctcgacgcagtgaaaacggcgtccggcgcacaactcgtcgactccgtatgaggttgttgtggcctatggagctacccagtaacggcgcggagtccatgacttcagccggagaattatatatactatggacgtgtttattcaaatcttgaagtagattttgtgaaatttttataagaaaaattcataataatttcgggttttaaagaatcggatcaagtgtaataaaggaagaaatactgttcttttctcttaatttgctcgtacacaaatttgaaaatttgaaaatatttgaagttgaaagaaaatttaaatgtcagaatggagctaaattacttaattctgtctctttttttttttttggaaggaagtggcgattttttttttttttttttt

SEQ ID NO: 111839 - DNA, 1759 bp, Cannabis sativa
  modified_base (35)..(59): a, c, t, g, unknown or other
cgctcttccgatcttttctgatctatattaataannnnnnnnnnnnnnnnnnnnnnnnnttttatttaaggcataaaatccaacaatagtcatatataaaaaatatatgtataaatataaatcatttatttattataaacggtctagtttagtttaaccgttaattatttattacgaaccgcaaccgaaccattatacggtaaacggtccaaattacccggaccacaaaaaataatttttttagttaccatctacaacgatttggattgtcacagtctggatttaaactgcgggtttttgatttgatgaacatccctattaaaatatttttagtaaacctactgggagaaatctcaagaggaaaagtgaagaaaccgcaagaggaaaaagagtgcttaaacaatgtcaataatcagtaagagagtcagcttgcaaagaggcatattaatacagctaagatagtcagaccacaaacaatgattattcaaagaaaaagctaattttgttaatgagtgagctacactattagtaacctaataaaaaaaaaaaacaaaaaaaaacaaaactagagaggtgttgagaatcatggggtttcatctcaaaaccaattggtgatgagtggagtagctcatgttcttatatattactcaatacttttacatttaatccatgttggacaatgttctctaatatccctcctcaagatggtgactatttctgctcactaatcttgaatcaccttatcataagtagtactatttgctcgcttattcttttttttgttttgcagctgggagttctatttgctcgcttattcttgttcgcagttgggagcaccattttgcttgcttgcggctggctaactctttgatagataaggatcgaaagcccgctaggaatatagctctgataccatgttaagaatcatggggttctatctcaaaactaattaatgatgagtggaatagcccatgttcttatactgtatatggctcaatatttttacatttaatccatgtgggacaatgttctccaataagaggttacaaaaagtcaaaatatctctaccaatgcaacctagctaataataatcaatcgaatgagttctgagagcgttgacaacattgagacaattcgattccaccgtaacatgagcgtagccaagaaaaacacaaagtccaggcccatttaaaatagccatagcttcagccacagcacaccatcaaaaggccaagtggtagtggctaaattaccaccagaagaatctcgcaacaccactcaaaaaccaactcaatctagcattaagaaaacgaaattagcatgacaatttattttaataattccatccgaaggcttcacccacctatgagcaataatctgcgtagagccattaataattctacgagaagacaatccattggccttataaaatcgttcaacgtacataaaactctactcaataataaacttatcatgaatcactttctttttatttacaagaatataacctataccagactctccagagacaaacaaaaaatttactacatttatttgtggacaattcaagattcaattatatctctaagaaaattatacttttaaaaaatcttaaaaatttcttattggagaaatatattttatttttttcaaaaagaaatgaatactcattaaaatacaaaagcctagagaagagcatcaaagctcaaacaacttgggagacctggccaccaacctatagtatcatcatgaaatactc

SEQ ID NO: 111840 - DNA, 1713 bp, Cannabis sativa
gagtttttatgtagaatttcgtaataatgcaaaaaaaaaaaaaaaaaaaaattgaagtgtaaaaataaaaaagctcctaaaattattgtgtgtttcattaatgtacaaagtagtgatgcaaaatcaaattattatatttttttcctattgtatgaagtagtgacgacaaatcaaattatcgtatacttttactaatgtgtaaagtagtgatgcaaaatcaaattattttatatttttctatcgtacaaagtactaacgataaatcaaattatcgtatgttttgctaatgtacaaagtattattgtatgttttaataatgtacaaagtagcaattattgtataaatattttaattaagctgcgtatggtttagtaaaatatgctttagaattagatgaaagtgtttgttgaatgggtgatatatccagttctttttttatttttttttttatttttttttgtaaacgattataatttataataacagtggaaatttcttaaaataaaaagtaacaataaagaatcaaataatcatatgcttaaatcactacaactaacaaagatactgatttaaataatgtgagatttttaggttgtttgaatttgaagtataattcaaaagatatatttgtccttcgatggaacaatacgaatatataactcctctcaaattgtttggagatataacaagattattagttacttgttaggtttcttgtaaacataccattatttgtctaaaaatattaagtactgtgtttcaataaagagtagtgatatgtatacttaatatatacacctcctaaatcttacagtgtcaattttataaaagttatattttatttattttgtgttctaatgttttaaaaactaatgtgatgtgattgtgtgtaatgtttacacaataaaagtgaaaactttctttccatttaaaaaaatttgctctctattttaagggtacactgaatcaatctatgagccacaatattaatattgcgacttccataaaaagaaatacttttgtaaaactaaataataaaattttaatatcataaaaaaaatcactaagaagcgtttctctcctaacatatctacacaagaaaaaaaaaatcatatcaagtaaatatagtaaaaatttgagaatgagagttgtaataaaacttatcttttttgaagttcttgtatctcaaaatgacctagtgagtgaaataaaacacacataaaataaatatataaaattaattaacataatttattttttgaaaaaaagtatgaaatttcattaaacgaaaattgccaataaccaaagaaacaacttaatatatccaaccggtagacctgaccaccctaccatagcattctcaagtgacaaagccaaatgagcaagcttgtgagcaatcgtattattcactctattacaatgcaaatagctaacaacattaaccttagaagaaatagcaaagatatcaaaaagaatagagccaaactcagagagcatgggcatgttgttggacaaagccaacatcacacgatgacaatcactttctacgtccacatttagaaatcccagacgagagtacaagagaagacgataaaggatagccaaaggttctgccatagaggttgtcaaaacaacttcaagagcaaccgcagtagacgcgagaatacaaacatcatgatcgtcaacaaccgccctgttgggttttatgcccta

SEQ ID NO: 111841 - DNA, 4004 bp, Cannabis sativa
tcagacccccatcaggtcaccatcgagccccatcgagcctttatccatgtcattcaacctcataatatatcggaccaccatcggatgggcatcggaccccatcaaaccaggcgaaaaaaaaaagcacaaatcaggaaaaatgcagaattcacagccagcaacattacaaaacacaaaacaataaaataaccgcaacaacccacagatcaagcaacgaaacaacattcttaactaaatataacaacaacaaacaagatttaaaaaaacaaaaaggaattatttacctattgatgcttcgtatataggagattgtagtgttctagtttgttgagtggtggcttgtagtgtggaagcttgtaacttgtagtgtataaatgagtgaagagaagaaaaaaaaaaagttttgtggtggtggagtatgggattcggatgggaagatgatgggaagagaagagttgatgtaattggagaaggtattttagagaaaacattaaaattacaatacattaaaaatattagtaagtaaaaaaatttaaggtaaaatatgcataaaaacttaaatttccctgatctaataaataaatgaaaatatgatataccgaccaccaaaccaattaacaattatcattatcctattggccggtgaggtgagccaatcccagtgatttggaaatccacaatcaacaagtcaacaagtcaacattacattacaactaaaatttagagattatatattatataaatacatcgttggccttcactcttctgtatatactgaaaaatatcagagtgaatagtaaaggaaagccatcagccatggagaaatctaagtctaccaaacccatagtcgtggacgagagaagcggctactgtaaatcaaactccatcttctacagcaaacgcaaccccatacacctccctcacaaccattccgtcgacgtcaccaccttcatctcctcccgccctcacaacggcaagattgccttcatcgacgccgccacaggtcaccacctcacttttcctcaactatggcgagccgttgattccgtcgctacttctctctctgtcatgggaatcaggaaaggtgacgtcatcctcctcctttccccaaactctatttacttcccggtggtctgtctcgccgtgatgtcactcggtgccatcatcaccactaccaatccactcaacacttcccgagaaatcgctaaacagatcgccgattccaaacctgtcctcgccttcaccattcctcagctcgtttccaaaatcgccggttctaatctcccaactgttttattaatcgacgatgagaaccgaaattcgcttgataaatccatgaatatagtgggatctttaggggaaatgatgagaaaggaaccgagcactaaccggatcgggtacagagtcaatcaggaagacacagctactttactctactcctctggtactaccggcgcgagtaaaggcgtggtttcttctcacaagaatctaatcgcaatggttcaaactattctcagcagattcggtacagaagatggagaacacaccttcatctgtaccgttcctatgttccacatctacggcttagcagccttcgcaatgggccttctctcctctggatcaaccatcgtgattctctccaagttcgagatccacgaaatgttatccgcgatcgacaagtacagagccacctacctccctctcgtgccgccgattctggtggcgctgttgaacaacgcgaatcacataagggccaagtacgatctgagctcactgcaatcagttctttcgggtggagctccgctgagtaaagaggtaatcgaagggttcgtggagaaatatccaacggtgagtattcttcagggttatggcttaaccgaatccacgggaatcggagcttcaacggactgtctagaagaaagtcggcggtacggaactgccggaatgctgtctccgagcatggaggccaagattgtgaaccctgaaaccggtgaagctttgtcggttaaccggaccggtgaacttttgctgaggggccctacaattatgaaaggtaacactattatataataatatttatagttgaaagctatacttcattataataatgtaattagttatagttttataataatgttttgttgtactctggccttatattgttttattttatattttattattatgttaatttttttttataatttcagtttatgaatagtttagaaaatgttgggtggggaaattagacaagaaacacaagttttaagcttaatatttaagttttgaccattgctattgggcactagctagaatcgtctaacactctttataaagttaatgatatttttaaaatttatttttttatatagaattcgacatttaaatatatcaataataatataatacgatatagatttacttttagcaattctcctaaattttaagtgaaaattaataatgatagttaagaacttaaactcaaaaggtattactttgttttgtgcactgtgccctatattccagcaaaatctattgtgaggtttgacgttaatgttttgactaaaaattaacttttagctagtcaagcatggtaaaaaacatcatttctttggtttccatttaacaaataaagtaataaaaatgagagccgttctgttagattgttgatggatcctttcaaaatatacttaattttattatacctttcaaacattactcaaataggttataaatagcggtataaatatttaaagatttaagtttttagcgatatatataatcaaatttataaattgtatttttttttctaatttccgtcagtataaattctgttttaaatttaataaaaaaaaattaaaaataattgatattacatgtttttcgtcaagatccaatgatctaaaatctgaactttacatgtaccacgtttaagacaatcataaatctacactaacgaaactagaggaaattaaattacaattgtataaatattgaatttttgctgtttacaaaatgaaaactttgagtaattattacaccgctattcatccacttaaatatattaataatttttagctggggtggtgtttgttaattatatttgctacaggctatttcagtaatgaagaagcaacttcatcaacaattgactcagaaggatggttgagaactggtgacctctgctacattgatgaagatggattcattttcgtggttgataggttgaaagagcttattaaatacaagggttatcaggtatataaatgcaatgcatgcattttcagaaatatatcatttcattattcatgcatgtatatatgataatttgtatcaatatatggcaggtggccccagcagaacttgaggccttgttacttactcatcctgaaatttctgacgctgctgttataccgtaagtcaacttaatttaatctcgatcgttttatataagacatagatacaagaaaaagagacttgtatttaatatgttgtatttataatataacatatatacatatatattttcagatatcctgataaggaggctggccaatttcccatggcatacgtggttagaaaagggggaagtaatttatctgaattttcagtcatggattttatagccaaactggttagttttagtgaaaaaaagccttcatcttaattagtcttatataaatggctctgaataaactcatctaattacttatatatatttatataggtggcgccatacaagagaattcgaaaagtggcatttgtagcatccatacccaagaatccttcaggcaagattttaaggaaggatctcataaaactcgctaccgctaaactctaagcctgtcacaagttttattgtatctataatctatctataatatatgtttatttattttcaaatatttataggatataaatatatatatatctattctatataaagtgtgactatataaccgaattcttggtttatgagaaatttataggtgaatttttattta

SEQ ID NO: 111842 - DNA, 1900 bp, Cannabis sativa
  modified_base (1839)..(1842): a, c, t, g, unknown or other
tctctctctctctctctcagatgatcatatacctaaatattgcttttggtttgtgcaatcttgatataatatattgtgtaattattagtattataaaaaatattacttttaatcataataaaatttgtatcgtaaattatcatttttatgttgtgattaaaaggtctgtgattaaaagtattagttacaaaaattacaatttattgtgactaaatgtgcttttagttacaatacttgttgtgactaaaagtaaattagtgacaacttgtatctaaaatctatgttttagtcgcaagtaattttttgttgtgactaaaaatcacatttaatcacaaaaaatttatgttatgactaaaaatttgtcacttaaagtaaccgttttttgtagtgtaagtagtgattacatctagtaattacattatattttaaaatataatgtatttaaatatagtaattatatatgaatttttaatatttttttagcaaataattagtaattaaatagtatttttttatagttaatattttaaatagaaaatttttagtaattttacagtgtagttacactcaaatctatatgagaattgaagaatgtaattaaaactctttaattacctcaaattacacaattgtagtggaattaaacatattaaattgtgtaattagcttaaattattacttcaatccaattagatcatgactttcaatttcactaattagtataaatgcaaacttaataaggatagcttttaaattgaacaacttcttctgcctagattgagatgacagctctagtctattgataagattgattgtaactaattaagcactgtataattattcatctttttttgattcaacaaactaattaaatatataaattaatcatatatatttatatccaccttaattaatcattaattatgatgatggaaaggactatataatatataattaagttctataggacataaggaatgttttctaaaaagaaaaaagaaaaaaccctaaaattagtgggaacgattataatattctaaatatgatgttgaatattatatatacaattaatgtcaatttagttggttctatttataaatttgaaactgatgctttatcttatagaaaatagaattattgttacttaatttttgcacaatttaattattggcatatatatatgtgtatttctcactttgtttgtggttattatgagtttgaggaaaattcattaatccaattactacactgctatttgagagaaataaaacccctcttttacttttatttttattttattattattgggccaatgccaaatgatgattagacttcatgaaataactagtatcaactctataaaattcccctataatatatagtaacaatattatgcttgaaataatcaaattaaacaaaatatatatcttctttgaaaatggcacaaatattacattcttagagttaaatggcaagtctctcgttatttgcagtacaaatatatatatatatatatagaaaaatgccaagcaacccacttaatggtgaagctgttgattagctattggaaaacgccataatataagcaacatatatatatctacattatattacataataataaacatataaaagaaaaatattaaaaagtatcacgagtgtttagtatagtaccacctaaatatagatatcgattttcatacattttaatttaataattatttattaataaaaaaattgttaaccatttgtaaactgccatcttatgatggttgacactaacaatgttttatataaaatcttagtgcatgtttcacatcataactaaaaaactgtttnnnntttttaaaaataaaaaattgtttttaaaaacaatttaacttgtttggccttgtttttt

SEQ ID NO: 111843 - DNA, 4267 bp, Cannabis sativa
taagaataaaagaggacaatataaaaaaggtatagagtgtaattttctcgaatatatatatatgggctatatttggcgtgcccaacatattttcttgtattacattgtgtaattggttagtggttatattatttattaaaattaaattgtgtaggattagatattaaaatgcattaataatagtatccacctctagtagcgcttgacattttaaagtgtctcttaatttttttttttatatgtacatatatgctagaatcgctcctaacacttataagtacacaattaatacttaaaaacaaattatgatatttttgcaactttttcatttatgcatccacaacttgaaaatgttaaaaaaaacaccacaagtacaaaaggcttggcccagctcaacaagcagaacaacaaaaccctaatttgttaaataactcatatcaactcgatacacaatctcgaaccttcttcgtctcctccaagagaaaaccctagggtttcgagcacaaacacgatctcacaaatcgtacacacacgaaaacagaaatcacaacacacacaatcacacacttggtaacacaaaaagattagattagggttaaagaaaacaaatagaaagagatttaaacacagaaattgatatcagagttcaccccagaacgatgggctacgtctctgtcaagctcgcctcagagtagattgattcttcactatgaacaacaggtattacaagtattttgttcagattttgaaccaaaaattccttggttgataatttgtgtttttctctctgtatttttctttttcagtctctttctaactctctttctttttctttctctgaatgtgattacaaatgagcttgaggagctgctctctctactctttcactctacagctcacgaagggaatgaaggccacatgtatcgatcttcttataaatctaggaatatatagtttgtaggagtagaaaaagcagttagaatttgctgagctataatctattaggattttttacttgttactatagagatgttgtaaccgaaattattttgagtcttgtattgagtgtcggaactgttataggccttcgaaaaaacttgtaattttaactattgtaattaaatttgagcttataaggagatttacataacaaattctacttaaatatctttatgagcgatgaaagtttaatgtactctgagggtcttagcttcattaaccactagggttagttttctttgtcaatccctaacaagctcattcaatgcttgaacatagctagggttaccactttagttccaatatcaacagggttatgtttagtgggaaccttttccactgcgacctctccttgagtcactttgtctctgataaatgtatttgatcttaacatgttcggttctatcatgaaagacaggattcttgtaaagatggatacaactctagctgtctgaatagattataggaacactcttaagtgggcttaattctttgggacacccttaatccaaacaacctctttgatggcttttgttgtagaattattcttcctcagtagttaaaagggaaatcattggttgcaactgaactttccaacttatacaatttcctccaattaggaaataataggtagaggtggacattcttgtgtccctatcaccaacatagtttgagtaataaaattcttctaccaaagttcggtatttaaatttttgaacaccaagctaatatttgtagttcctattaggtacctgaaatccatttcatagtaagctgatgtaattttttaaaggttttccatatacttgtttagcacacttatagcataggcaatctcaagtctactaattaccattaagtacattatggaccaaccgcattagaatagggtactttactcatctcttccatatctttctttgtcttagggcacttagctttagagatcttgtattgacttgtaaaatgctgactattcttcttaggactagtcatctgaaacttcttaattattttctgtatataatcttcatatggcacaactttaggatccctttgcctttgtctcttacaatagtgaaccctagcattttagtggcattacctaaatccttcatttcaaactcagacttaggcatttctttgaccaggttcaccttagatctttctctactaagtagatgacatccttcatattacttccatggaagtgcataaaagtgtgatagtagctcttagcaaaacccttcttaggcataaaagcatcaaatgtcttattccattgtctaggagattgtttaagtccatgcatggggaggtagaaagagaaaaaataaggggaaattatgggagagtgcatccgttagcacaatctcccatgtgctttaaaactgccatagtaagagaactgacatttaatagtcagttgaaaagactgaagtgtgactgttcacttctgcatggtacaatcatcagagtactaaccacgtggagctcacatgcatgccaacacatgtacaactatcaaaactccccatccagatagatatttgtacggagacttgggaacaaatactatcccaaagtttgcacatctaacttggcacttacacatggcataatccaaactagctctcaaacatgataaggatcatcttggcagaagtgttcctggaagatctcatatagagctaacatccataagctttagatgttccatgaagcatctagcttggtcatctacttgtcaacctgagaagataggattgcaagggcgattccataagtaaacctacaaagaagacaagtctcgagagaaatctggccgggtgaccaatatatcggctagattcaacattgtcgatagtatcagacaaggctacacgagtcttgatttcttctttaacaagctttcgcaaatatctcaaactaaatcctacaaactcagatccagcatatttatttgagaataaaggagcttcaacaaatcataactgcaataagaatataggaatatttatttctttattcactctttttaaggagcaaaatgtaacaaccttttctttaaaaatagtgaatgaattcacaaggggaagggacctagacctgaaatcgtactcacacatctaagcgcactttattgaaagatattctctgtaaatactttgagagttgtagatagactttactttgtctttcttataatgattttcctggtattatctcacaatcaatacaactaaaagaggagtgtgtcattactcatacaaaagggggttgaatctctataaatctttgtgttctttatatttatttattatattcctaactccttattggtgattaactagtgattatttgactccgagtcagttgattattttttcagtcaacatatatgaattttaaaaaatatatataaatgtattataattggtacacatattataaaataatttataattagctaatacaaatttatatacaaaaatttaaatattataatgtaaatctatatgcaatacttttacttaagatgatatttgtatatacatatagtgatatttaattaagcatatcaatatacatatagtgatatttatttttttaaaaaaaatctttgtataagcatatcaatatacatatatatatagaatgtgtatctatattttaattgtaaatcagttatttttgagatatatagagggggaaaatgtttgtgtatgtatacaaaaatatatatagtattataatatttccaaattaacaaaataatggaaaagattaatagttctatacttaaaagtatcagtatttaagtattgttattagtattaagtatccaatctcacatgatttaataaaatagtttttgtagaatatccttaaccatttgcgtcacatgcaccactaaaattaaatacaacttattaaaaatatgtataaaaaaagtaaattattgatgactatttcaaaagagagagagagagacagagaaaataaagacaaaaagataaaattataagtaaacttattcacaatatatatagagtagatatattacattagtatatagtgatacgatcacattttatatatttaacataacatcaaattatagttacacattatcattactttaatttcttcaccagttgaaactaatggactcaaagtgtagattatctgccaaaccagaggcacaaattttggcaacctcatgtctcatctttcttggcccacaaacaagaactccaacatcaga

SEQ ID NO: 111844 - DNA, 4299 bp, Cannabis sativa
  modified_base (4269)..(4272): a, c, t, g, unknown or other
aggcattaagaaacagtgtcttcacatgtaccaaaaagtagaataacaggattgagatgataagcgataaaattaataacggaaaatattagcaaggcaagttaccaatggtgtttctccctccccttcatcagagattacatggccggtgattaataacaatgagtatatttcttccagagtttcagtttgatcatcaattcccctaccctacaaataaagtaaaatagtttgaggaataagcaactgcaatatggaaaaaaactctagcttatgccgttcaaagataagagcaaaataaaagacaccaaaagaataagatagcctccaagaaacacatttgtggtttctaagtacaagcagtaaactccttgtgcattaatgacaaagcaaggagccagtgaaagtgattaataacaataagtatgtttcttccaaagtttcagtgtgatcacaatactaattacttctcccaatccagtctaaaatagaaaaaggaaaaagctctcactttcacaccaaacaagcacaaaataagcctaatgcatgagatcttattatatcatgtgaaataaatacaattgctgcatagacttaagaggaacagagtagaaaaaaaactcaaaaccaatagatggtactgaacttcagatatcaaaagtaaagaacaccttagtaagccgtgcaaagcgctcagagaagagcgtagtgagcaaagggattgtgacatcaattgctgctcttgcaatcagagcataggagcccaatctttcatccatggctgcaatcgttaaaaaataaaaatcaaagacaacaagatggatcaagaatatgatgtcgtaataagtaatgcactagttattatcatctcaacttatttttaatatgccaactgataaaaaatttatcaatgccataatttgagttttccatagcattttcccgtaccagaaatggaagcctgaaggtaactggaatctacatcatcattgaatgctgatgcggcagcaactatatggtgaaaaagggaccagctgtcattagtgatgatacaagaagatgaaaaatggaggttgtttaaatatagcctaacaaagtgacatgccaaaatcacctgttagctcacactccacaatcaaggcaaagagtttggctgcagcaattctcccttcaggtggaagcaatgtaattccgccatccttattcaatggctgaaggagatgacaaaaacattttaccccagttggctaatgattagaaaggttagggaagaaaatgcagaccattcaatcaaactctaataaaaggaattcaaaataagaagattgctaataatatacaacaaggtcctaagcacaccaagcagaaaatatcctagcactacgattaaataaactttatcatctcacacttatggaatctgataaagcctagaacgaaggtttaaacaatccaagcagataacattcttagggaactttacaaatgacaagacacaatacaaaaagctgcattatcccaccttgacgagtctggaaatataaacaccgggaaattattaggggcaatgcatagagtaaagagaacttaatggagcttggaatgaagattaaaaaaatggattgaactaatgagattattgtaatattacatagataattcatgtaaaaggttttctcctcgaacattataatataaatggacagttaaagtttatgtcaagttctcaatcatacactgtagttttataataataatattaataataaataaaaagtgcatcagaaacaaataccacaagaagggcagtccaagtatctaataaaatgtcacgcgcttcccagctccaggtttcctcttcagagttattagtcgtgaggttcttaacaacttcactcatcaaggtggatagcagggtcagagtaccaaagggcctgaatacagaagcaagattatgaactaacttctaaacaagatgtttttaagaaggaattcagaaattaaagttgcatagagacactcttatgcacattatttgccttaaatagatagtattatgagttaataatcactctgccactaaccttactgatttcaatagctggtcaaacacagagggatttgtaatagttgcaatagacaataatccacgacaaccatcaagcatctcactgaacagtgaaaaataaaataagtgtgagagaatttgaaatgtagatgcgaaatgcgaataataaatataatcattaaagatggtcgtgagggacataacctttcactctttccattttctattgcttttgaaacaacatcaggaggatcgatccactgtattatcccagaaagcaattgaagcagatggtgctcatgcatttgcacattatctaaaccatttacaatttactaagttaacggttactcttttttgatatctcaaaataataagatggacatagaaactttactaagagtacacgataattaaagatttcaaaaatgtttattatttttttttatggcttaacaacaaagttgaaattcctttcaaaacttaaaagttaaccttgagttttcagcaacaggaaaacacatcatgctgacttcttggcacaaattgacatccgtgatgacatcgacagtttgttaacaacattcattaaccaaaccaaacaaaagagaatttcaaatgaaaatatttagtgttcgcagatgtgatcaaatgattgcatctaataatttcctgtacatgattcctcctgggtatctacagtcactattatagtttgttggtccccaactattgtaggtctaggcgtgggggagcctagtttcaaaaaaaaaaaaaaatctcatacaaagaaagtatgtaaacatcttttctttaaagtccttgcaaaaaacaaattcacaaaactgttgatcaagtaggcaaggaaaaattgtaccagattgaaatattgttcctgtcaaggagcagaattggacaattaactttcgggcagagacagcgagaggacagtctagccagtagccttcacacgaaaacttctgtctcaatgctgcatataagctcaagagccatccaatatgactgctagtaactaaaacctcacgccatgcaggaccaggctaaacaacatagaagagaacaagaagaaaaagttaatcctaagcataatgattgaaaggtctaataatgccacataatatcaatgatgtatacatgaatattaggttgtctcagttaaaacctaatgtaatttatcaggaaagctcagtaacttgcccatcatactcacatgcgatttaaatatttaatatctcataaatcagtatgctgcattagcaattgtttacaaaatgaaatttatactatagacaaggaattccatagaaaaattgatacctgcaccaagttacactcagatctcttagatgaatcactatcttccctaactccaaccgagaatgcactaactgctgcacgacggctgttggtcgagaaatcccagttcaggatttgaagcataagccgaatcgcaccagaacaaactttaacctccggtactgcagagtctgactcgattattctatttgtgacacttaaagcagcatcccgtacccagcagtagaaagtctattttataagtagaatagaagacaattaaaaaaggcaaagactgatgaaacttcagagtataaacactcaaaacttattgcaaacatatcaaggaaaagtggagaaacctttaagtggtccttctccaatgattttcggcatagctcatgaaactccctaggaaggcccattgcactagatgttgaaggagaaaattcagatacctattacaattaatacttagtccacaaactaccaatgttgaaccaatataagtaagaaaaaaaatctaagaagaaattcaaaactttgcaaagaccagttcataactaggatatattaaaggcttccaaagaaagacatataccagagattccaggaaattgattccataaaattgcacatctacaccgtgaattccagaaacagcctggtttacctgcatcttttaaatcgttagaaatggaaagcagagacactgaaggtaaggctacaagaaaattggacagaatttcaagatcgagtattcgctgttatggttaataatgcatttaagaatgggacaggccaagatgcaatcattaattcccccaagcaaatataaatatttagggctcgtttggagcgtcatattaggtcgtattgtattnnnntatattgaattggattatatatcatat

SEQ ID NO: 111845 - DNA, 4585 bp, Cannabis sativa
ccttctccggtcttcttctccggcgtcgagtatcgtgcgtctatccgatactctgttttcttttctctgcacttcgctgttttcttgctcctttcgttttcgtcatggctatggacgatcaaacctcaacacattccgaagcggataatcaatccactggaattcttgaaacgcctcaagcttcaagtcaacaaggaaatcaaattctccagatgaacaacttaaggaatcccatggaagatccagccaatccttattttttacatcacggggacaatccaggtaatatccttgtctctcaacttcttactggacaggataattacgtttcatggagtagagctatgcaattatcaatttctgtcaaaaacaaacttggttttcttgatggatctataccaaaaccccctgttactgatcaaatgttatacaacgcctggattcgtaacaacaatattgttatatcttggattttgaactctgtttcaaaggagatatcctccagcattctttatgatgaatccgcagccactatatgggctgatctgaaagttcgattccaccagaggaacggacctcacatatacaatcttaagaaaggtttaatgaaccttaagcaagacaatcaatctgtaggaatgtatttcaccaaattgaaatccatttgggaagaaatatctaactacaaacccacatgcacttgcaatggttgcacatgtggaggaatgaaaaagcttcaagaattccatcacatggaatatataatatccttcttaatgggattaactgattcctatactcaagttcgtagtagcatcctattaatggagcctcttcctgagattaatcgggtttttcacttggtatctcaagaggaaaactagaaagggaatcttgctgctaccaatgatcccaattctggtatggcatttgcctttcaaaaggataaaaatgttcaaaataaaagtgacaatcaaggaagcaagacttatcctcccaagaaaggaaggccgttctgtactcattgcaatattcacggccacaccattgaaaggtgctacaagatccatggttatccaccaggattcaacaagcaaaataagcaaaaagaagccacggccaatcaggtccagacctcccatgaaggcagcaacaatactgaagaaaatcacactcttctccctcaattgaatgcagctcaatatcaacaactcctcaatctattggctaaccagcagcaaaatgttaccacttctgaagcaagcacttccacaggtaacacaggtatggcccttacttacaattctaacgatatcatgagtgattcctggatagttgattcgggtgcaactagacatatatgtaataatgctaaattgtttcaattcatatgtaccactcatgctactaaacttattttgcctaataatgattctttagtggtgcagcaaagtggcaatattgaactttccaaagatatcatacttaagaatgttctatttgttcccaactttaaattcaatattatatcagtaagttgtatttctactgacaaccttgttgatataaaatttagcactaatgacttttatattcaggaaactctcaacaagagagtgattggaagaggtaaagaacacaatggactgtacattctggaaaggacaactactccagcccactgctgtgttgtctctgctgatctttggcacaccagaatgggtcatccatcgagtaaaagacttgctcttctgtgtaataaaatccaatgtaatatgaaaaatgttcataaagatgaaccctgttacgtttgtcctaaagctaaacaaaagaagcttccttttgttaaaaataacaactttgctgaaaataaattcgatgtgattcactgtgatgtttgggggccctatcatattccctcctattctggttatagatatttccttactcttgtggatgataaaactagatttacttggctttacttaatgaagcaaaaatctgatgtctcttttatcattcctcaatttctatcgtatattcagactcaatttaattgcatctttaagtgtttcaggtcggataacgctcctgagttggtttttaaggatttgtttgccaaacttggcatcttacatgatttcacatgtgtcgaaactcctgaacaaaacgctgtcgccgaaagaaaacaccaacatcttttgaatgttgcccgagcattattgtttcaagctaatttacccattaaattttggagtgaatgtgtcacgactagtgcttatcttataaatcgaacaccaacacctaatctaaataattgttctccttatgaactattgtttgacaaaactcctaaatatgaacatctcaggaactttgggtgtctagtttttgcttcaacacttactgctcaaagaactaagtttgaaccaagaactcgaacatgtgtcttcatgggatacccgcaaggaataaaaggatacaggttatatgatataaataacaaacagttttttatatcaacaaatgttgttttccatgagaatatttttccatttcgaaaactaaataatagtaagccatattctgatcctttttctaactttgtttttccatctaatgatgttactaacaccaatgttgaagactttcctttctcagataacaataatgcagaacaccatgatacaaaccaaaatgaccctccagaagcaactgaaacgatacaacatgaccctcctggagacactgaccttactgcagaaactactacagacttcaatacagaaaactcacattctgctctacaacaagatgcaccagtcactgaattaaggcgcaccgaaagaattacacggcctcctccatatctcaaagattatgaatgccactccctcattcaggacaaaagctctacaccacattccttagataaacatttatcctatgaacatttatctcctgcttacaaaacttttattcttgctttgacagcccatttcgagcctaataactacaaacaggccacgcaatatcgagtttggaatcaggctatgcagcgagaactgttcgcccttctcaagaacaaaacatggacctatgttcaacttcctcgaaacaaaagagccataggctgtcgatgggtctataagattaaatataatagtgacggatctgtggaacgatgcaaagcgcgtttggtcgctcaaggatacacacagcaagaaggtttggatttttttgacactttctcaccagtggcaaaaatggtgacttttaagctcttgctcgccatcgctactataagacagtggaacattttgcaaatagatgtcgacaatgcttttctcaatggggatctcaatgaggaagtttatatagaaattccaaatggcctcactttacccgattctatagacaaaggatcacatctcgtctgcaaactcaacaaatccatatacgggttgaagcaatcttcacgacaatggtatcgcaaactttcagatgctctttttcaagaaggttttgttcaatccaaagcagattatactttgttcactagaggtgaaaatgactccttcattgtgatcttagtctatgtagacgacatcatcttagctggaccaaacctctcccttctacaccagctacaagaaagtctccacagcagattttctttgaagactctaggacctctaaaatatttccttggctttgaaattgcccgtgccaaggaaggactggttttatctcaaaggaaatacaccatcacattacttgaagaaaatggattcataggcagcaagccaaccaagacgcctatggatcccaagattaaacttgataacgaacaaggaaatcttctcgacaacccctctcaatatcgtcaattggttggaaaattgttatatctaaccctttcacggcccgatataacatatgctgttaacaccctaagtcaattcatgaccactccaagaacatcacatctacaagccgctcatcatttacttagatacctcaaaggtagccccggccaaggacttctctactccactcaatcctctattcatcttcgagctttttctgattcagattgggctgcctgccccactacccgaagatccaccacaggtttttgtgtctttcttggagactgtctaatttcctggcgcacaaagaagcaacctaccatctctcgcagctcagctgaagctgaataccgtgcacttgcagctaccagcagcgaactaacttggcttcaatatctcctccacgacttccacatacctcaaacaagccctgccttcatctactgtgacaaccagtccgctatccacatcgcaaataaccccacatttcacgaacgaacaaaacacatcgagctggattgtcatttcgtccgtgacaaaatccgtgattccaagatacgtctggttcatgtcaacagcaacaatcaactggctgatgctcttactaaacccctctcttcgaacattttagcttctcatattggcaaaatggctgtatacgatatatacagtccatcttgaagggggggtattaagatctttagttgttagtt

SEQ ID NO: 111846 - DNA, 4584 bp, Cannabis sativa
  modified_base (4415)..(4432): a, c, t, g, unknown or other
ttagcaaaataattctctcccctactaccctccttactcactcatatatatagcatcaatccctcccattacaattacccaattaccctctttatttataccctaaggcctaacaaagtgttactcaaatgatagtgagcaagttaataggaagcaatcgaaagggtacactttggaaaacagctgtcttcgcaacattttgggctatttggctggagagaaataccagaatttttgaagattcggagaacttagcagaagtagtttgggataaaatcaagttctggacagcaacattggtcttcagaaccaagcattttgaagatctatctttcttagatctgagtagagattggagtgttctgttgtaatttaggctcgggattgttacttcttttattttcagaatcttgcgctgctgttattgtttttactttctttttctctgtgtatgacggttttcctccacctaaagtgagggtgttaatcttttcttcagggtggtcaaaactttggcctctcctctttttttataatcactaagaaaactagcctctcatgatgtggttcataatctgaaaatattgctcaatatctaagaaagcaaaaaaataaaaataaaaaataattaagaatgttgagaaactcttgaatcttttttttttcttttgatgagaagaaaacaacttcactaatctactaaccaactgaatacacaagctgcccatggcagccaaagacctactaacaaattcctaattttatcaagcatatcaatctcacttctagagagtttcctatacatcaggtttcgaattcttaatttagcgtctctcctaattatcatatctgatgagaaaatgaaaaagaccaactattatagatacaattgttcctatttatccgtattctgcacactgttgctgcaaaactcaaatctttctctctaactgtattcgatgtgtttctttgccttcaaattatgtgacgtcaaaatatcacttttcaaatttaaatttaaaactcattaaaaatatcaaatagtcctaaaactgtcttatggcgacattttgcttgtcttctagggggcatgttgcacgattatgttaaagttaacctttgtaggggactggcaacaagttgctgcacaagctctgacatgtcacgtggagaatgaaatcgcgagcttcgaattcttcatgtggcgccaaacatgtcgctatttaataggcaacatgtcacctgaagcttttatttttttagtttttgatttttagcgccatgtcaccagctaagctgcggcacttccctttaactttaatgctccaaagtcaccctaaaatcaacaagtgagctcattcatgcacatctaacataaaaacatcaaatccatataaaaatttgaagtaggcacaccaactcaaagtaaaagagtcacgaattagtgcctaaaataagcactcatcatacctccaaacttgaatggttgctttttctcaagcaagaaaaacttaaataccaaacacaatgatgtaaaaaccctttaaaaagaaaatcctcaatcaataattttaatgaagctttgtaaaactttcactaaggtacatttcaaatataaagatactttatgaacctgtactgttaagtgttagaaagtgggactatatttaaacaagtgcaggaatgttataatttgttaaatataaaataggacaatacaaaagtaggtgtaatgttcttgagaaaattactgaactttgcattttagtgcttggcataaaaaattgacaaaattgagtttgcatgaatacactggggtatataaacacattttaacatagtgagagcaatttggcaatttttgggatgattttggcaatataactgggtcaaaattctggtggacctgcagtacgtcacttgtctccatggaatgcgtagcgggtcgaaagggcgacgctgttgtatgggtggtggtgcgtagccacttagtaggtgacacgttgcataggacgcgcaaatgtggcgatgttgttgacatgttgcaaacttgatttttttggctccaaaagtagcatattttaaatagcaaaggggctatgacagttttgcactctctctaatgtgcaaatatcaaccattttcttcaagaaatagattgcttgaagaattcaaaggcttgttatatctcaaaattcgcatgctcaagcagtcattctagtgggttggaatagaaaatttggacattctcaacttattcaggactcttttggtgtttattgttcactgtgttatttgttgttaacactctctctaatattaactttaactctcatcacctaataaatggcacaagcccgttcttgctgaactcagtgaagttccgctgaatctgaccatttggttttcctctcaacagtatcccaactttgtgaccatgtgagaaagctacaggagaagaaaactctaaaagtctgctgatttcttatgataatttactaaaatataaagaaagacctagaatatatagataaactcggggcagtatcacaacaaacaaacttggaaactgtaggaatttcatataaatctggtagatatttttaatttattaggatctatttttctgaatttttttaattttatgttattaggtcgtatactattttataggattattgttagttttctaggtttcaaggtcagcggcttttgccgtctattttattgtatcttcctcacgttttcattattcaataaaagagaatagttatatctctcctaaccaacagaaacaaatcaacaataaatcaggaaataaaatcaactagaaaaataataatagaagctttgattttattactaataacaaggattgactaaagcaattcatgattgcctcttagtctctcgaaagtctcccaagagaggctggttttcaacatatagaagttttaaatttaataaacatatgtctcacaaactatcaaataatgtgacaatgttccctgagcaaataagagtagtccttaacgtaatgataagtgtttatattattacaactcagaagtagctttagttaatcttaggcataattcttggagcgaacattatttaatgaaagagtaaagagttgatttttataagctcctcattgtggtggttgaggttttcaaaaaaaaatttagaaactgcccaccaaaatgaaaaatttgacaaaatatacaatttgaataactcaacaaaaattgaaaccgttcaattaatatattggataggctgaatattattccaacccactcaatggaactcaaataaaccaaataaattaatttacaatttttgttttttgttttttgagttacataaattatgtttaatagttaaattatttttatttaaattttggactttatggtatttaatttagaatttggacttcatagctattaattattcattatatatggatattgaagttgaacattagaatttgtactattaatattttctttctattttgggataatacaaaaaagtcctttggtttagctaaattccaatttggaccctctgttttaagaaattatgaaaaggaccatctatataataaaatggtaaaaaaatggtttcgtgaacatatttttggtgaatttatttattttatttttacagaaagactaacagtgttgtttatttttaacaattaatttttcaaatcacctaaaatttaatttaagttcaattaaaaaagaaattatttagtttgttattgttatcataattatgagcattaaacaaacacttaccaagattcatattttatttagagcattcaacacatacctcccatttgtgcatccatttgaaccatccaaactcaaccaagaaaatctgaatgtggaataaaatagagacatttgtggaccaacccttgttcccttttgtcataccattaactaaccttaacacttaatatatatagacacccttctaaccctaaggggttattttgcttatagggctaatcaagtgtaattaatgacgtactataacttaatgggccaattatagttatatatgggtgctctcatgtgcctctaacataatagataattattaaccatcccattttggttgttgacaaatattgggcacatagttaatgattgtgtttatggtattaagcttatgattatattagtccacaataataattctaacattcttccactcagacaaaataatcaaccaccataacattgtctaccacacataaggtaacaaatcaaaacgtatataatatcatatcgacaggatacataattatgtatgaattgacctcgaagacatataatccaataacaatcattaacaatcaaaccaaatatgcatgaggtacaacaaattgagannnnnnnnnnnnnnnnnncttttgtacctgtcactttagtaagcaacacatatatacataaatatgacaacaacaataagaagtgactacaatatcattatgcatgtttgagggcatatcaataatattggattccaaacaaaccatcacaagacaattacctttcttct

SEQ ID NO: 111847 - DNA, 7795 bp, Cannabis sativa
aaagaatcaagcgtaaaatagccctaaaactagaaacaaagagtgaaaactaactaaaaatatgactaacttagactagttttagcctaacaatatacatatacattgtaagtacaataacataatatatgttcaatacatataattcatttttcatataagaagtgttgggtgtgtgctatattggtagctgaggcataccacgattacttgcacttcattaatgcacccgtaacaaattatccagtcattctaaaatcaataaagaaagcatatgacacatacttaataagaaagagcgtggagatccaaaaaaatttaagtattaaggagctcgtagtaagtatttgtaaatttcaataataatttaaggttttaataaattattaatctaattatttaaataataaattattgtagtgtcctcatcaaccaagtaatgcagagtgtggctactatgttgtgaacaatcttttaatcaacgtgactttattaagaaagagatacataaatatttgtaaactacttatcaatataaaattttgttttatttatatttattatttatttaatttatttttcttttatattttgtagctaatagataaaaactcatatccaaaagttatgattgacgagatgagaaaagagtgggcgactgatatgcttccatacttgcgaacttatcacattgtgggtcattaataagttattgttttttttcaaaaatattatttttgataaatatttagctaacaatactagttaaatatatattcttttcctctaatacaatatttgttaattttgttatgtatgtatatgtttaacaaatattgtaaactgtaaatatctatgatagtttaaaatttgtaagtttcaagtccaacttagttggactagaaaggagttccaagcatgaaatcgcttttcaagtccaggattgttagactaaaatgtttttttagtccaacattaagtttcaagttgtgggactaccttttaagttcaacaatattggactagaaatatttttttagtccaataatgttggattagaaaaatttatttttttttatgttccagcctatcatgttcaatataaaatggactcgaaaaatttatctagtccaattttgatggacttaaaagagagtttttgtagtaatgagtttcacgtattatattgaaataatattttagaacatgtaaggatgaataatatgtcacgtaaatttcaaattaagaatatttgaaatagtaatttgatttttatgttttgaaaataatgtttattttaactaatcttattctaattaagattttaaagttgtattctaaatacataggaaatacatgtataaatagggtggcttaatagtgatatagagagagactaagaatataatttgtattagttttttgttcttgttatactgcaaaagttatcacatttaaaagaaaaatatatgtttttagagatatcaagcgagaaggagaaaccataatcatgtccattgctgactcaattaatacagaaatatctaagcgccatattgaagagattaggtctcaaaagttcttggttggtaaaaataagtcaaacccattaacccaagatctctatcatgcacttacaagtttaccagttgatctttacattaaagatgttcactttcttgtaaaattaatcatgctgatcttatccaaaaaagtaatcaaatgacaatattcaacttttgttatattagatttctgtttttctacttaaagcttaagcttttttcatcattttatttcatatatcttgttgtttttctcattatctcatcatcataattagagaagatgtacaacatgtgatgctatgtgaatttattggaagtcaaggatatgctttttgatttgaggtacgctttctttgacatacttttatgagaatttttttcttcatatatttagataactcttaaatacttagactaattttagaataatattaatgtaatacatttacttagagtaatgtaaatgcgtatgtatttaactgttcaatttaatttttatttatggttactatatataatttatacatacattaataataaaataatgtatataaattagattttaaaaaaataaaaataaactatgttatcacacaaaattctaaagctcaagaaaaaaacataggaagttccaatggaatcggttattatgaaataaccatagccataaagttctcatgtagtcggtccctctgaagtcataataaccgactccataacgaccctatggctacggttatttcataataaacgactccataggtctcttactgagttaggtattcatatcccctttagcgtcatctgaaatagagtgatcataaattttaccaaaactgacgctatatgcccaattacttgaaaagcctttatttttgtagtagtgaagagactaagataagaaaaatgagatcgaaataattaaatttttatttaaatgggaatccccaacggtttaaaactgtttggtatacaattcccagctgcttaaaaccattgggaatagtattcttgactattttaaaccgttgtggattccctttacacctgatttttcaattttggtctcgtgaccattttaactgttgggaatggtaaacgattgtgaaaaattgtcaagaatactccactatagctgactttttcaaacaatcgagaattctattagcgacagtccaataaaatcgattaggggatcgatgggaataatgcttttgtagtaatgaatatatatatatatgtgacactctttccactactacaaatatgtctatttttgttagtttttaactgacatttaaacttttttcatcaattttataaaccgatgtatatgccgcagacgcaaataaatattattttgtgacatttttcatttgtcagtattaaaaaattgcctcattttggaaccgatgtaaatagagtaaaaattaaaattttaactatattcccgtcagttttgtacacataccaaataataataaaaaaatagttctagctccattcaaatcccttcacacatcagaaacactgaagatcaaaattatatatagtgtttacaaaataataaatcgaaaaccaacaaaaaattgtgcaaacaccacgacatcgagccttgcaaaagaaatagggaaacatttacgagagagagatctcgaaagaacgagagagatcccaagatagagaaagagagtaagagagagggaacattacctctttgagtttgatgtggcttgtatacgctacacgatggttttagtttgagtggccaccatcgtgtaggccttgtgcgagagagcggtatagtggcccttggacggtaggagcccacagttggacagtgtgggacatggatgggcatgcgagagatcctgagagaagagaaagaagagagagagacatgagaaagaatggggtgcggttttgattgggtgcaattttgatggggtggtgctgaatagaaatttaggttaggtattatatatagtaggattttatgtattattggcctgggcttttttttttttgtttttgttaatttttcgggtcggtttggaaatgacgctgcatggcgtctttttaaaaccaacacaaaaacccaatatgccatttttttaaccggcgtaaagctgtgttacttccaaaatgacaaaaaatctcaatgtaatctttttgcatcagttttcggcgttgaccgacgtattgaccgatgcaaaaagaccattttgtagtagtgttctctcttagctcaagttttatcccaattggttttcttaagaattattttaatgagacaactttaaatcatgctaacacacttgcacttcatgaagcaagtagataattgtgactgaaatcattgacataacatagtttagaaacatatggatttcattcaataaagtagtatcaacattagtgattctcgatgaagataacgtgaaatgcattgctcaactaaagcaataacaaacgagatagaacaaaatatacattttcaccaagttcttcttaacaaatgatcttcaagaaaattgttatattggtgtccaataaattcaatcaagtgtcaatcttgtatacttatttataaaattattatcaatatcgacatcaatatatggtatacaagatcataatgcatcaattaaaaaatctccgagaatgtcaaaatgagaaggaataaatatatagttattactttttgctctcgttctctcttccgtccatggcaaagaagaggaaggtgggtcaaaagtcggtcatcagggatacgacggcgactccgatcaagcaggcggaggtggcgattgatactggacatggtgcggctgaagatttattgtttacagctgaggagattgatctatgccctaacctggttgcagaggaggaagccagagctgatacggactctctcaagtcggctagaagcaggagctgggctgaggaagtggaggagaaccatgggtcggctgctcataataactggaagaagtttacagcaagtaaaagctttaactctgatgctaaactgatgtatactgaaccattaatcaagggtggtaggaaaattgcccaaattgatttggaggaggtgaaattggaagaggctagttggaaatcagctgtcatttgtatggtaatgggagctaatgttccagcaacagtttttgaagggtttattcgaagggtttgggggcatttgggcattctgcaggttgctagaatggcaaaagggctaactatggttaagtttaatgatgaagcaactcgcgatgaggttttagaaaatagagtgattcaatttgataggaaacctgtcattgtgcgaccttggacttcggatttgaatgctgtcaaaatggtgaaatctgtcgttctttggattaggcttcataatttaggacttcaatattgggggaagaatactctaagtgcgcttattagcacaatagggaagcctattatggtagataaacatacaaaggagcgcacaagggtacaatttgcccgtgtgcttgttgaaatggacatcattgataaccccgagaaaacattgtggtttgttaatgagtttggccaattggtggaccaaagcattgagtatgagtggctgccggttgaatgtaaacattgtggaggttttgggcatataatggctgattgtaaaaggggtgagaaacctaaagaagccgtagtagtgcagaagcaagaagtagaaaaaagaaggaagtccttctaatctgaaacctgtagaggataaagcagtgggcagtgagaccaaggctaaggatcaacaattgggtcctgaagcggttactacaacaagcaatctgagtaatgcttcaactgaatggcaagctcctaaaccaagatctaaaggagctgggtgtttgaaaaaagtgactgaacctcatgaacaagttcttcgaaactagtttgagattttaaatagcaagcaaggagaggaagtcggtgatgatagccttttactttcctttgattaatggatttttgcaacttgagtagctggaatgtgagggggttgaataaaaggaaaaagcaggagtcggtggccgaagtctggaaagtcaataaggttggagttggtgctcttttagagaccaaggtgaagggagaaaaggttcaaaaaatgatggataaaagctttattagttgggagtattatagtagtccaactgttgaagggcgtattgtggttctttggaaaaaaaaactttgttcaggtagaagttttggaggattccaagtagcatgttcattgtcatattaaaatgatagggcagaaaaaagattattatgctacttttatctatggagctaacaccatagatagtagatgtgatctttggaatgccttatctatgatcaatgttaacaaggcttgggtcattcttggagacttcaatgctgtgtttcaccatgatgatagacaaggggggaatccgattagctctactaagcttattgattctaataattgggttgctccagcttctgtagatccaatgagacgaacaggttctttgtttacttggtctaacaagcaagatgctcgaatcttttctcgtattgatcatgtttttcaaaatgagacgtgggttgataattttccaaatacttcaactcatttctcgtgggaaacctgttctgatcattgtctctgcattgtccgctcaactgtcaccgagaacattggttttaggccatttcggttctttaattttggctgatcacatggcgtttaaacagattgttcttgatagttggagcagacctttgaattgttctgggttgaaaggaatctgtctcaagaccatgaggcttaagcataagcttaaggcttttaatagtgacgctattggaaacataggtgaagcctatgagagagctaaagacagttacaaagaagctcaactccttagccaagctcacccacttgatcaagtttacataattagagagcagcagtcggctgtcttattccataatcaggatttaatgtatttcaatttccttagtcaaagaagcaaaattacttggattcaaaagggggacagcaacacatcttatttccatgccatgttgaaaaagaggaatgagcagaacaagattgtctcgtttgttaccgatcatggcacgttgaatgaccactttcctgatgttgttcaacactttcttggtcattttcgtagcattatgggcagagccagagccacttctgtggaaatacaacagagttgcatcgctatggggcctaaactcaatcttgaccaacatgtatcacttttaaaacctttctcctttaaagaagttaggactgcgatgtttagtattcctagcactaaatctccaggacctgatggatttggctcggggttttttaaatctatgtggtctgaggtggggaaagacatacatacaacgattactcatttctttgacactaattatttcctgctgagcttcataatacaactttgtcattaataccaaaaacagattgtccatcaagagctgtagactatcggcccatagcttgttgctctactatttacaagtgtgtttctaagcttttatgttccagattggctaaagttcttccgaacattgtgaatcagaatcaaggagcttttgttaaaggtcgctctattgcttataatatccttatccttcaagacatattgaagaattatcgaaggaagaactgttcaccaaggtgcactattaaaattgatatcagtaaggcttacgatacggtcaattgggatttccttgagaagttattggtggctttttgttttcctgcaaagttagttagttggattatgaactttgtgagaaatacctcgtactccttactgttgaatggcaagtttcagggatcctttaaaggtgagcagggattaagacaaggggaccctatttctccccttctgtttgtgctggtcatggaatatttatctcgacgaattcagattgctgcaaaagataaaaggttcaaatatcacccttcttggaaaaagttgaaacttactaatatctgctttgcagacgatttggtaatcttttgcaaagggactgaggattctgtgcttgctattaaataagccttagacgactttagcaaaacctcgggcttagctatcaactttgagaaatctcagatttactttggcggtgttgttggaaatattttacca

SEQ ID NO: 111848 - DNA, 2518 bp, Cannabis sativa
  modified_base (57)..(60): a, c, t, g, unknown or other
  modified_base (248)..(260): a, c, t, g, unknown or other
aatgttatttctgatctatattaataagtaagtctgattatattgaaatgagttttnnnnagggcataaaacccaacacctacaccctcgtggtacaagtcatccgttctaccatagacataatgacattctcaagggtatacgggaacatccacattacatcataactattgacaacggatggggggtcacccaacgatagcggttatcatccccctcaacgagggtcccgggggtgttgcccccannnnnnnnnnnnntccccaaaggtggttgacgaccatgtcacctccataagggactctcgtcgtcagtagctccttcaaatgttcaaatcccacgaaaggctcaaagacagttgtcaacccacaaaaatagcgagatattatcataaaaatcagacttcaactacctctgaaaatcaaggagacgattgaggtagctccgcgttggtcgcgtctcctaaagcgggaagcaccgaccccctcccctatataaggggtctaacatgacctgggaggggggatccacaatcttgaacacttagaaaaataaacacttatcattctttgcaattaagagcctgttcttgacttttgtaacctagatcaataaaacacaaagggagtaggctattatcgacatccggtatcgaatctctttaaattctggtatcttttatttacatttattgtaagtttcggtgtcattaaccacatttattacagtaattttagtgtaagtctcatttattacgacttcgtgcggttggctaaaaatgtagtcaacaaagatcaatataaaatacgtataaaatacgtaaataatgaaatttattatgttattgtacatataaaatacacatatataattaaatctaaagagcacactaatgtagccgcaatagttaaaaaaaaattctcactgatcaaaatctcaaattttacttcaaaaattaaaaaataaaaatatattacctaattaaaaaattgaacatacatatattccacttaacattacttaaactcaataaaaagaaaactaattatacgtgtattgcacgaaacatcaatctagttgttatatgtgaggatatataaggggtgtgatttaaagtgaataattttaaagtgatttaatttataattataagataaataattgtgtgttaagaacacataaaaattaagaataattaattaaatttcataatcaaataattcaatctcaataacaatgacaattaaaaagaaacaattttgagaaatcaaaattaaattttaatagccatgtccatcaagtaaaataagaataatttttagctaaaaaaataaagtcttattaactattttagtaaaaatatactactcactaagtagaattgaattaaaaaataataataatgataaattaaaaaataaattgttcttaataagatttatgggacaatattgtcccacatggatcaaatgtaaaaatattgagctatatataagaacatgagttactccactcatcaccaactggtttgagatggaaccccatgattttcaacatggttttagagtcatatccctaggatttttgatccacacctatcagatagttagcgagccgcaagcgagcaaaatggtactcccagccgcgagcaaatggaactcccaaccgcaaacaaaaataagtgagcaaatgacactacttgtgataaggtgattcaaaattggtgagcaaaaatagccaccatcttgagggagaatattggagtctcacatagatcaaatgtaaaaatattatataagaacataaactactccactcatcactaattgattttgagatggaaccctataattttctacaagattcacaacctgcaaaccaatagcaaaattagcataatgtaaacactaatgtggcgtttggttggaggtaataaaatggaatggaaatgataattttcattccattcctttgtttggttgcattttaaagtatttgaatgacattttaatagaatgcgctttctaccattttagtagaatgactactctattttaaaaaagaaggaaagaccattccaatataataagagaaaaatatgcattttaaattttattctattttattcatattctaattctcatttccattcttattcttaaatttttattcctctcaactaaacatcacttaagtgatctaaattgaatgaataaaaaaaaaacacaaacagattacttgattcatatcggagtcaatgtgacagtcctactccaataccaatgccttagttaaattcacaatgatgaattgtgttacaaaactaactcgtctccacttgtagcatagagacctaattggtccaaagcaataggagccaaatatgtcacacatacataaagggaaatttacaaaaatattagaattttgattaatttttacaaaaatactgtcacacggattttttttcttcaaaaatactgtgtttttatagaacactagtaaaacacaaaacagt

SEQ ID NO: 111849 - DNA, 2493 bp, Cannabis sativa
atattgattgaaaaataaatataaatagatgaaagacaagatatataatagctagaagataataaattatgagtggtcttttctatgtttgaaatcttcatagcaatggtgtttgggaaaaaaataatatactgatttttttatgatctccctattggattaatattattattattattcttatatggtcccctaacttaaattattgactttctaataataaacttgcctccttacaattatatacttttttttccctcgtttctttcacttgtctatttattaatttctatataaatatattgatcattgaaattaaatattgttagttagttgatctctatgtataatgtttacttatgtggaaacatagataacgattgtctcacaatgataataattaaacccataaaaacataacattttggtgaaaatgactaaaattatttgagattattgtgtcattatccatttatggacttccactaataatatttctaattaataagctaacattttttatatttttatagaaagatatgttggtcatccaaatataaaattaattaggataaatacagcaatctgggttgtctctgagttttattgagttttagaaaaaataattttttttccccttatcaaaagactaggtagtatttttaaagatcactaaaaaaatatatatatttttttttaaaaaaaaaaatcttttttgacccttagactaagtgagccctaaacacaaacttaatccgccttgatccaagatcgtcccttgcgacaataatgatatagatcacaagtagaggttttggtattgttttcaaaaaaataatttttaaaaataaagttacaagaaactgaaattttgagagaacaataaaaaattgtattatgaagtttttattacttttaaataattaataaatattaaaaattttcttatttgtattcaatagatagttaacaaattatgaaatgtataatatatctttaaataattctttatttgagtggggccttaattataagccttccaaggcattattactctaccttgatgataacattttataagtgattaaatttaatgactttaactatatatatatatattcaattatcatcctttttatatttaactaataatcataggaatatcgagttaaaacccaagacatgatcatataggtcatgaacatttccttaattatgatatttttaaatgtaatagtgtattaaaattgagactaattattttgatatgtaaaaaaaaaaaaaaaaagagtttttaaaaacaattactaaaaatacataagtgaaaataaatgacaggcataattataaatatagagtttattttctgttaataaatttacaaaataattaaggataatttttttgtaaaattgaattctacaaatttgtataactataaactattcgtatttgttataattaattatatttatagtaatgaaaaatggaacttttttagaaaaaataataaataataaagaataataaactagcttagtgtgctcatttggactaaattaacaaattgaaaccaacaattacatcacatgaaagctccttcttaacctgtgtaatcatttgttaaagcccaagctagtcttattgggccacatacggcccattttattgactatagaaaaataagacaaaaacaatataaaattgttttttgtcggcatagaaaatacccaaaattcgtataagaaccctcgaatgctcaaaagagaaaagtagtttttgacttatagctcagaaatttatataatgaataatcaaaacaaaataaaataaaataacaaaggtgatgaaaataagaaaaatccaaaaactaacgaagacaaaatggcttttcttgcaataaacatatgggcctaaaatttgagacagctgacatatagtgggcccacttaaagcccaacaagatcataatacttagatatcttgatttatcgtgtcggccaaccacgtagggccacgttgaattgaattcggaaccataattggccgtcagatcattacagtcactgtcgtgtagtgttagcagtactaaccagctttttgtgatgctgacatgtccgattcttagtcgtttacgaagcggtcgtacagtttgtggtgcccacttaattaagaagaataaataaaaaaatatattttacaaaaggagagtttggttccagtggggtcggtactttacggcataagtacgctgggttctgattggccgttggttaggttattcaacaacaacttcacgtgatgtcaccctgcgaagtgtgagtcgtagaaaaaggctagccaagaaattaagggtaataattgtagagactagagttagcttccaaggatattatggcacgtttactatacagtaatcagaatcggaataaattaatggagaaatgtaacggaataaatgaaaaataatcggaatcaatatttgtaatatgt

SEQ ID NO: 111850 - DNA, 5332 bp, Cannabis sativa
  modified_base (2486)..(2488): a, c, t, g, unknown or other
aaaagtagtcatatattgcctatgctataacatttaggtttagggatataattttaggattttttaagaatagaaaatcaaatttccctaatgtatatttaaccgtgttaaatgtatgatgtatccataactagattgatagatatattaacccaacttatatggattttataaatgagttatattggtgattgtgttgtgttaggtcgtggattttgagttccagctttcgattaattaaacaaataaactgatgtgcttaacattttgttgtaatacgtgagccaaactcaacatgcacccctacgtacgaagaccttgagtaaaaaacaaaggtgaattctctttagtgaggtttttttttccttaaaaaaaatgaagaatacttggaaaaattaaaagaaattgtccattcgaaatataggcagcagattaaattaataaaaagaatacgatatatgcattttgactctgagtgattttatgttttatcttcttaaaactaaagtatatatattggaatagccacagaaattctgatatatagaatttacttttaccatatttgtttcttgggcttaattataagtatatagtctaaagaggtaaaaggcatattaagtaattaggtccaaattacaaacaaagtatgcttataataaattaacttttgcaacaatatatggttgctatccatgatcacagttcacaaccataaaaaagtctttattcccaaatgaaatttgagctataacttttttttatatatatatatatatgtaagtcatgcatacagacatatatattattacaagttacaaattttttattgaactttcttatcaaatatatagctgattaataatattaactcttccctggcctcagtactaataattatatctcaaataatatttgttcgtactaaaattaataataataataataatataactgatgatgatctcgaacataagcatggattttccagctggctcaccagaaacccgcatcgatgtgggattcgactcggtttcgggagcggaagcacctctactcccccctccgacaacgcaaagttgcgttagatcatcagtaccatcatcatcatcatcgtcgtcatctaaagtacccgacgagtttcgaaatttccgcttatgtttgaaatggtgcgccttagaccactccacattcgccggcaaatttatatcctacattttcttcgtgctcttcaccttcatcgtccccgccctcacggccgtctccgtcaggcagaggcagtcgacggaggaaggcagtgaagacgattccatggtcatctccttcaacacactcgtccagatacccgaatcaggcctcacaatcatcgcattcctcactctctcacggttcttcaataggtacggactccgtcaactcctcttcctcgattgcctcggcgaagactccatagacattcgtaggagatacgtcggtgaactcgaccgcgccttccggtgcctagccggaatccttctgccgtcgttcttagtggagcttgcacataagatcgttctattctcgtcggtggagatttcagctccgttcggttcatcttcgggtggaggagtgggtccgttgaactcggtggcgttcgttgcggttctggcttcgtgggtttacagaagcggggctttcttggttgtgtgtgtgatgtttaggctgacttgcgaactccaaatacttcggttcgaagggttccagaatcttctagaaggatgtgagtcgaatagtggtttgatattccgggagcacgttcgtatcagaaaacagttgtgggttaccagccatagataccgtttcttcataatcggctgccttgttaccattaccgttagccaattgggtgccttgttgctcgttttagcttccaaaactcacaagactttcctcaactccggtgatcttgtggtacgtaattaattatatatatatatataaatattatttggtacgtaattgaattaaaattaataataataatttatatttttatgtaggtgtgttcggctatggagataagtggattcttcttgtgcttagttggggcagcgagaataacgcacagagctcaaaggatagtgtcgatagcaactagatggcacgtgcttgtcacatgcgcatcagcagctggtgggccggacccatccaaagcccattttctagaagccaattgcaaggatgatcagcagaggtgtggggagagcgactctgactcatccgatgacactacttttgttaccgtttcttctcacgactcttcctccttccaaactagacaggctttaggtaggttggttcctactttattttaaggctaattaggatttttggctgaactttgacatataccaaatcatgcctctaaacttttaaaatcgttaaaaatgtcccctgaactattgagattattggatttaaagaattttttccaattttagtaaaannntctaacatagatgaaagtttagagggaaaaatttagtatatgtcaaagttcgaggggcatgatttggtagatatcaaagtttgggagcataatttaatacataaacaatatttgaaatagtaaaattgaatgaaatttgacaaaagtccttaaatccaacaatttcaatagtttagggacatttttaacgatcttaaaagttcaggggcataatttagtacatgtcaaagttcagtagataaaaatcctaattagccttattttaatttgaattatattattattattattattttcatttttcatttttcatttactttatttaattatatttatatatatatttatatatatatatgcagtggcttatttgcaacacaacaatggaggaattactctgtttggatttgctctagatcgagggatgctccacacactcttcgcattcgagttctctctggtcttatggattctcagtaaagtggtcgttttgtctcaataaaataaattaatctatccttatttttaatcagttatattattaatttatgctgtccctcagatgatcgatcttaattatgtacttattattataagccagattaaacacattattattctttctttttggatgtagttactaaacacattattaattaattactataggataccaatttattgatatatactcttacttacatctagttttcaaacaaagttttggactttatagcactaaatttttgagggaatctgaaaaaaaaaatcacttttatggggaaaaatgtgtttatttaataatatagtttgtatttgtgtaataaatatatttattatttaattttaattagttatgtttaattgtatagcatacattttgtatttagccatgttaatccaacatacgagaacaaaaaagatttattagcgatgaattcgttttttgttgctaattaatttatcaacgctaacgctagaaaggtcaccaaaatttcaacattttaattttaaattaatattcactgcaacaaattttttgtatagctgcgaatttattagcggacacaatattttcgacattaataattggataattaatatacatatatatatttgaatgaacaataggataatataattaattgataaaaatatattaattatttgtagtgtccattcagtcgctaatagtaaaaaaaatattatgaaaattttttcgattatttttttttgaaatgctactattaacggtgagattatttgcgcaaatacttcttattgctaatacttcataaatgtttcataatgtttattaacgacataatactttattattaggtgcaatacatttagcctctaataattttatatactccaaatttggagtcgacttaattgtttctttcatttgggacacgactgaaaaaaatctcaacactccatttttgtccctctaatttcgtccttcttcagtctctcttcgagtcgtccttgtctctctatcattgattccatctctctttattttttttcgtcgggtgcgcatgagtttcctctctttttgtttaaaattaatatttataattatttttttagtaactgagtaatatttattaagaagtattttgtatatattttatgttataattagttattaatattttttttttttgtgaaaatagagatcgtggtggtggtccaatgatgaatgcggtggtaattcaatgatgatggcgagcgacataggtatttatttttcattattttttaaagtatgtgtaaattatttatgtgtttacattagcatgtgtctttttccaaattttattatttttttatatgtacagttagtaaataataatgtaaataatatgtttatatgattatatgattacatgtgtaggtattgtttgtgcatatcaatttatctatatgtatattatattgttaatgttaaataaaacgagctgcctttaaagtatccaaattttaataaaataattatagtacaaaaaattattagtttataccaaaatacaaatactaataattaaaaaaaactcttgattgagagagagagaaacagagtgaatctgaagtgtattctcattattgaattaaatagcaataactcaatatatacaagatcttaataatataaggttaataagttattgaacaattgataaaaatacagttatgtagattgttatacagttaacataattctaactaacaccctccctgcccgcgcgcaaactgagcttggacatattaccggaggaagtccaccgctaataactattaccagcgaatcctattattaccagcggaccttcgcccttaatagttatatatatatatatatatcagtatccttatttatctatctccctcttcatccccaaaatttttgaccacaaacatccatctctccttcttcatcctcaatatcaaaacccttattcacctcccttgttcatcatcgactagcccaccgttttgaccacaacaacgacattcccactgcctccaccgttgtcgacattcccaccgcctttggcggactcatcttcatcattgttcaggtatatatgtatagttaagattagttaaactttctctttcttttcttttatctcacaatttttcttaattatttgcagctcataagattgaaaattactccaatattaaatctgtagaaggtatatgaatctttgtatatttttatatatttatacatatttatatatatgtaattcttttttatatttgcttttaaattttatcaaaaaaaaaaaaaaagaggaacaccaactgtttgataaaaaattattt

SEQ ID NO: 111851 - DNA, 5296 bp, Cannabis sativa
  modified_base (41)..(42): a, c, t, g, unknown or other
tataatcctactctaatacccacttaatcacatatttaatnnaatatgtccaattaaaatatcaatatatttttcgggatattacaaacaggctcctaacacatgtgctcaacaatattagcccttacgaatgtctgttttgcaaacagcctgatcttactttactgaaaccatttggctgcaactgtttccctcatcttagagcttacaatgctcataaactggaactaaggcctaaaaaatgcttgttcttggggtattcaacacaacgcaagggatatatatatatatatgtgaacatccaaatagaaaaatattcatctctagacatgttgtcttcaatgagatgcactttcctacacatcatgctgcagcaccaactcctcaggtacatgtttcttccccttttcaaacttttagtaacaatacttctactaacacaccaattgtacatgttaatgtcataaacagggtcgtacaacctgaggctactgatgtttcaaacaggaatacatctacccaaccccaacctaaaccacaaatccacaaccatacacatgaaccccctatttcccaacaccctagacctgatccctgtccctgtcataactccacctccccctctccatgaacagcaacaaacatatttaccttaaccaatctctacagttccaacccccaacataccctattcactctcccaaaccaaattatcacacctcaacatgtcccaaatgtgtcaccctcaacacaaactcagattgaacaaccacctactaccacattccaaccaccccctaaacttactcatgacccaatcattacaagcacaaacataatcaacaggactcatcccatgagaactaggtctcttaatggcattgtgaagccaaaatcatatttgaccacaaagtatccattgtcaatagctctcatttcccctgaacttaaatccactgcaactgctctcaaacatcctcaatggcttaaatccatgcagcatgagcttactgcccttaaaaaggcaggtacttggacattagtgccttacttaccagggatggttgttaggaaaaaaatggattcacaaagtcaagcttaatgttgatggggcattagaaagattgaaatctagacttggcgctaagaggtatctacaaacacctggtattgaccatgaggagactttatcaccagatgttaaacctgcaacagtaagaatcatactcactattgttgtctcttccaactggatggtaaagcaattagatgtaagcaatactttcctcaatgggacattagaagagactatttttatggcacaacctcaaggatttgtggatgaatcaaggcctaatcatgtctggcagttacacaaagctctttatggcctcaagaaaactccaagaacttggaatcaaaaattaaaaggcactttgttacagaagggattcattgcctccaagtttgacaattctttgtttatttatggcacaagacaaaatctgatcatattgctggtgtatgttgatgattttcttattatatgccctaatacaacactcattagcaaactcattcaagatttaaattagactttctatgttaaagaccttggttcagtacattactttctaggtgtggaaatatttcaaaattcctctgggatgtaattatctcaaataaagtacatcacagacttacttgtcaaacttaatatggaaagaactaaaccaactcctaacccctcaagtgctagcatcaaactgtcactcaagaaaggtgaaccatttcaaatgtaacactacacagaagtactttgggatctctctaatacttaactttgaccaggcctgatgtagcatattcataatcattcatgctcctactacttctcactgggaggcttgcaaaaaattgatgagataaaccaaaggcacaatatcacatggtctgcatatcacaccaactaagtctctaactctataaagctactctgatgctaattgggaatcttgtatagatgacagaaagagcactggaggctatgccatgttctttggtgggaacttggtatcttggtttgcaaagaaatagaatgtggtggctaggtccatcactgaaagtgagttcagatcacttgttaatgttgctacaaaattcaagtggttaaggtctctactttcagaactttaaatttcaacctcttcttgtcttatactttgggtagacaataaagtgttcctaccattgtagcaaatccaatgtttcatgctcgatccaaacacatcaagatagacctacactttgttagagaacacattatgtccaaacaattatcagtttgatatgtaccagcagtagaccaaattgcagatgtccttaccaagtctctatccacggaggagtctatgtaccttaggtccaaactcaagatgtctaaaacacattttagtttgaggggggatgttaaacacattcttgattctgttacttaactgtgacagttagtagttataacagttagtggtttattttctattttcattttttgttatgctttggacttgtaattactctgtgtgtataaataaagctcaaggtactttgcttgagtaatgctcttcattcttttctcttgttcattttctatttttctagttttggctcttgccttttcttctttgaaggtcatcaccttctacaaatagcaatacattatttgtctcaacaatagaatattcatatgtttgacttctctcaatgcacatcttaataataaaatatcatatttgattttgaatacaataataataagacaatttgtttttttcatatttaaattaatgtaaatctaaataataagatatcatatcagaattttaattatatattattaacaaatttattgtataatattttatttttaacaaaaaagtattcaaatattcaaatacaaaacataattaactttaagaatttaaagtattaattatttcttcttctttgcattagctttagtgtaagttcattcctcaaattattcatgaattgtgcatcttctactctccaactgggttcatttgtttcctccaatatttattcttcaagtcctttctcgaagattacttgaggctgatcatttttaaataattcattattgatacgctctttcttcataaaattattaattgcaaaacatgcaataacgacatctctttagacatgaaactcatatggggtcatcttatatctagtattagaaatcttactttcaaaactccaaatgaacgttcgataacatttataagttgaacatgagcaaggttaaccctctcctcttttgttacagcacacctacgatgataatctcctaaccaatatcaaacattttgataaggaggtaaaaattcatgggcgcgtggatatgctgcatcacataggtaatacttatctgaaatttatatgcactaaaatattaaattagttaaaatagttaattaagttatcatattaataaataatatttcagtaatcacttacttagagaaggaaatggaaaataattattttgattggctactatctcgtttacaactcgcaaatcatgtgatactccttcccatcatgcataaatgtaagtaaagattatgttgaagtcacatattgctagaatattttggtagcagttacccttttctcttcctctataagtgattgtttatcacgtgggattagcatccactagtgttccatcaagtgcaccaattgtccctgcaataatttaataatttcaaatatttataataaatattatataatacaattataatttagaaatacaataccttaaaaaattctaatatttttttgagcagttggaatatcggaataaagatcaattgtggttactatcatctcttttgcaaagtgtaacatttattctagaacctcataaaattatttgtgaacagtttgtgaagaatgttgaaatcttcgtttcatgacaataaatcgctcattatatgctatgatagtttaaaacattactatcttttatacacgtttactttttagttttatggtactaaattaggtgcacaccaaaagagttaattctgattattattattataccatatgcctaagattaacatatgtattaaactgaaagtaaatagatgaaaagaatatttacctcttgatccctatcaaagtatccttaattcctttcgcaaattgtatccttagaacagtagaaaaactcacaccttgattttttagactttccaccacacacaaggactagtgtgggctagtagaataatagtgtatatgaagttattgattaaatcccatcacatgagaaaaaactgtttcttttgtgatagagaaaaaaaaaaagaatttctgataaaaacaattttaggcttttagaaaagttacttgaaaaaacttatccagaatttagtttatttagtatatttaaataaactcaataagattttatttaattaattatttaaatttgaatctatttattaaataatatttaattatttaaataaattgatatttacatcttctaactgattgagagaatctttcaattacttaagagaatatctcaactaattaattttcaaattcaaatatttatctattgaattaacaatataattgatcaattaacctaaaaatgacaaaaccaaccgagacaccctactatagtggggtgcatgcactgtgtttgaacacagtgtatgtggcacctctctctgtttaaattaagacaagagatgtgtcttttgtcttgataacttttgtcttgacaacttttgtgtctttttctaatttagttaatttgaaaaataaattatttattacaaaaataaataattattattttgataatgcaaaatatattttatttcaccccttgacagtatttcaaggaggtgatctggggaacatagacctataatcctaagatccgataaactaaatttatttattgaatctcatcattcaaataatcgtatttattaattctatgattactccactataaatatggaatttaactcttagtaattatgaaattatatttattgagttttactgaagtatctattgatataactgattcttatgtttagcctcctagtattggttcgtagttagttttggttaaaatgtcattttacccttctaattacttttttttcatttagtactgttaattcactagtaaaagtataatttagatctaatctaaggtgccgtttggtaacac

SEQ ID NO: 111852 - DNA, 2219 bp, Cannabis sativa
cttcttctctgtgctctctttttcccactcggatcaccacagtcagggtcgtcttcttaggccctttgaccctaattgcttcacctccaacgctctctctctctctctctctctctccttccaacttcgataaagttcattgctcctctctctctttcggcctatttcttctcctcccggcttggcgttctctgctgccctcaattatcacaggtaatgagtttagcttttgaaattttggtttaattggaatttttattcaatcttgtgtttgatttagctaacttggaggacagaatggatgcgaatatgaagaaattacaagaaagtttagttgcgcttgagactgaagcagagcgtctctttttagcccgaaaccaggttggttttcattaatgtcagtcagtaatcgtttctccttggatttccaaaaaaaaaaccatggagtttcaaactcaagcatcaaatgaaaacgttgtactttaggtacgggtttagggtttattaagtaaatgatcaagtgagaatggcagacatttttttttatgcttttgaattagaaagtggataggcatattcaaaggatcaaatcacaagaagggtttcacaatatggaattctatgcagttgtagttgtggaaatctattttggtttttgattgaggaaactttcttgaagagcaatttgttttgcttgaacattgttagtagactctgtgaatttgttggggttaatatgcagctggttgagactgataagctaagaaatggaaatagagaagcacttacagctttgaggaagagagctcgaacgacaaagaccagtgttccatccccctttgagtcagtaatgaaggagattggcgtatctggatcaagacctttggtaaaggaagtatgcaccacctgtggcagccacgactccactgaacgcacatggatgatgttccctggaactgatgtctttgcaaggattccgtttcatgctgctcattcaatcatagagacaggtatcttttaatttatcaatactctcattgtcacatctaaaatctgatgatgtaattgaactttctgcttgatttttgttttagttttttgaactgttattgtggaattccattgctttatacttaccctgttataaattaatcaaggaggctatgtcgggttacatagtagtcgaagctgttaccttgttaaatctgcgctgtaagtgacaacttatgtatgatgtcttgagtcttgaaattggtttttgattccaatttgtaagtagtgttttgttgtcaaggactccgaaacaattgagattagcagtttgcagtgctctttgtctaaaatgctgaagttgattctgacagtaactattgttataatttgatagtatgtggattacaaaatttagtaattgttacagacattgttattatatgtgctttgagtagtatggtatatgttgtttatgttatttcataattttattgctgttttgacataaaaaaaaaatcatgcaaaaatgcttctaacttggagaacaacacacacacacacacactctaaattctacccttttaatagtgtaataatctctttaaacatacaaaaagagtttcatttttctaaattgagtttaatcaacccttatatagagatgaatctagttcaaaatgaagataacaataataaatatgttaaaactacctcgtgtaacagaaaaatctggctagtgttctgagagctcagctgcttggaccaatcacaacaatcatcagctatattttcttatcaattattaacaattggatcttgttttgtttgactgcagatcaagaacatcttgactttgaaaccaagaaactccacagctatgtgaaggataaaactctgttgatatcagaaaaaggtgcacttgcggacaagatcagtccagcggtgctcaagtctcttgtaacccttacaggaaatagtagaaagtaagttacgatcttgttcttgtaatatgagtttcatttccaagcaaggaaaaagcgattaacatgtaaagtcttctccttttttcttgttttgatgtagtaacatgcaaaatcttcttactttcttaagtttgtgtttttattcaaatgcatggccaattactttacatgtttggcactccctataagtaggagtgtgcagaaagtcatccaattcaattccaaccgaccgatccaatctca

SEQ ID NO: 111853 - DNA, 3750 bp, Cannabis sativa
  modified_base (27)..(28): a, c, t, g, unknown or other
  modified_base (3659)..(3662): a, c, t, g, unknown or other
actaatcagattgtaaagagttttatnnagggcataaaacccaacagctattacatcctaatttctcttgaccgtatttatggcattttctcttatggacgggggtagattttgtcccactctaatggttctcgtgcagacttcctcactaatgcttacttcctctacctcctccatcggttccagatttctttcaatcccaactttggagtctagttcatctagaaactgttcctaaacagtctcagtgtccatcaattcttctattctaggagcaacaagtgtctcttctcagactgtgaacacggtcctcgtcaaaacattgtaacaatttcttgcacttttctgatcgccttttatcatgccaatgcatccatagtcacatgggaatttcatgcacaaatgacagataaaatcaccaccctaaaatccactagtattgatcatcctaatatggaattatatgcaattgggcagtctaccacaacaaaggttagtgcttaaaagcactcgcctcatttcccccttgagaatgacaggcaacttgatcttacccattggcactaaggcatcactattgaaaccctgtagttgaataaggccaggggttaaatctacttcagcaaacccaaccgcttggaatgcaaatttaaataggatgttaatagagcttttgttgtccacatggaccctagagacttgttcgttagtgatatgtgcatcgattatgagtgggatttgcgagggaaacacacattcctaatatcatccctggtgaaggtgatggacagattcaatatcatgaggcactgagtaggagacttcacaagagcacatacttccccatcttctatttccctcaaatatcatttttgtgcattgcgggtagtgtcagtgagatggggtccaccaaagattgtcaccacatgcccgtccacaggcagcgaagccagtttgggaggatatggggtttttgatcccgggcaagtaatgctacaccagccggagctagtagagaaggaagggcgggcaatgtgctcttggagcttgagagcgtcctacctttgtagaggatttatagtgctctgctgtcttagaactatcatatgcccctgtgcaaccccctgttcaggatagatgattggggtacagacccagtgtcctaaattctctgcttcgaccaacattttaatcttatccttcaaataatcacactcttttgtggtgtgacccttctctccatggtactcgcactctttaatttggtcacgcctattccttcctccatgtgacatatgcagagtttttctgtagtggaccatattgtaggccactttatagatgttctcccgtgtatttattaagcttgtgtattcagtgtatttcgagtcatattccttccttggtttcttcaaagaatcgttgcagttatggctctttccccctctttttttctaggaatggcttgtattagactctgggacctcaatctttgcctatctttgtgctacattacgtccagtatgtgttgccccgtacccaaaaaagtgggtctacataggggcgagaccaaaagtggtaggtccataaaagttgggataaactgagctctgggtattggtaaagtttgagttggagcctaaggtgtgtaactcaaagtggtgttggaaggaattggagctggaggaacctcgaaagcttgtatataggcctcttcaaggttgatgatgcctagtgccattgccatgaactcactcagagttttagctcttttcctctacatttctccccatagtagggacactacaaccaatttggatgggagggccatcaacttcatatcatcgttgacttttgttttggcagctgcctccatcattctttgaataaaagcctttaggcttacattgtgctgctatataacaatggtaaatgaaccaacttccatatctttgtcctgcgcaatgatgaattatttacaaaaaggttgattgtagtaggtctttccagctgtcaatcgatcttggagctaaccgttttcatagtcctttgtagacttggtcagagttaaagagaagcacaagcattttgcatcgtcgctaactcgaacaacttgcatcatcttattgtattttaccagatgtgctcatggatctgttctcccttcgtacaactcgatgcatcttgaagtttgtcaagagtggagtttccataatccttcttacgcagggttccagatcctcatgtttcgaattcgataacattccactttgtttcttgacaaacttggttagagcagaaacttgttcctctaaccttttcatgttgctcttagggaggtcacaccctctcatcttattgctcagatggttcctaaggtcacctccatgtgcccttactttctcacttttgtatttctcatatttggcatctaaccaccggcaaagttctgtcgtggaccagttgtccttagaatgccccacggcaattctaccatcttggttaactgagtcgttggggtgattccttcaccttttatgtgtgggtacctttgcaccttgtcctcgtggtgcagctttgcctctagggttagaagggcacccaggctcaaaagcactagtggccttctgcgcccttgagggatgaagactgtagttgtatccctttaaggaggtttgggtgtcggtttttgtgagggctcgcccaccttacccttgccattatcattacgaggatttgagatctcaacctctatttgctttcgggctcattcctcaaccaccaccttcattgagggttcatcatcggattctgccagatccctaaacttactctacaaatgctccatcatcttcttcatttttacagtgagccttctctgttcagccaactccacctgagttgcctctaagtatttggtcactcataaacagttcgggtcatggtcatagtaataaccatctttgtaatactcatctcagacatagtcgtgaccatcaccttcttcatctcctccttcaaggttttggccatcattaaggccgtctaacatgttctcaatatcctcccttcagttttcagcgtgggtcataccttcttctctgacgcctctcgtctagaggttagaggcatgggagttagcctcctccatgactatgtccaatggagttttcttgctggtgtttttttgcgtattcaccatagttaaagttagtcaacaactaataaaccttcctcagctcttaatgaaagcaccaaaatatttaccgagatttttaaaaattgattaataaaagcttaaggaaatttaaaatattatgtaacaaacaaatacagtttttacgtagttccggcattaatgatccctagtccacgagtcagtagtattagcctcctttggcaaatttttgagtattacaagtgtttacaatgataatctatgttttccttttatctctttttaagagaaaagctctctaggaattttagcacagtttttgtaagtaaaattgttcaccctctatacaaaaataggggtatttataggcacatgtgcaggtaacgacataccctttaccccactagggtttcttactcagcatgcaagaaaggccaaaaaacacaataagaccatctaaacggaaggagtcatattattnnnntgcaaccaatgtaaggtttactaaactttatatgtgtttatttcatcgttgtagaaagttcatctttagggtattaatcaacatactt

SEQ ID NO: 111854 - DNA, 3495 bp, Cannabis sativa
  modified_base (3428)..(3428): a, c, t, g, unknown or other
ctctctcttgtctcacacgcccatgccattcaaggtgtgtgtgagatcaaaatcctaatctcattacagtgtcttatgagttgagtacacagtgtgatacctaaatctgttcatctaataagatctaatagcccactctattcctgagtgttgaggctggcttggaagatcaagttgttgattcttcaacatagttcttggattgaatgtttaattgttatacaaaaagaaacaaagataccttgatatgcatcaagaggtaattgaatttgtttcagtatattagattcaatctatatattttatgttgagatcactgggtttatggttcatattaaataaaactatttttatcaaacttctacttccgcttttataacactgatatggactataaaaaccaataataacttggcaaaaaaaaaaaaaagaataccatgataggcttcaagttgtaaatgtttctattcatctatttattttaaatttaatgtatatacatatggagacactgagtgtggcacaatgataatcattcaaaatgcttagtaccacaaaactaataattaatttattactggtgatcttattcgagtacattaattggtagctttattggattttttaagttacaaaaatttgttcttaatattttataaatcttagtgatgtttgaatatcttaaatatttatctgaagtgaagcaggttatgcgattaactatactattgtcagatgggtagagtacgtatgagagttgaattttaatatcttaaatatttatctatagtaaaataggttttgtgaatatatgtactaattcaatgatgctactaattcatcttttctttctttagttttgcaggttaggttcgacacgccatacaccgataatgatattaatgttctatgtgattagtgggctaattacatgaaagatgtgtttatgtggcaatgaaaattatgaatatataatcattcatgtatatttttggttagcttagatgctttgtttggattaagtaaggacatgtttactttggtgtaatcaaaattggagtgaaatggagattacaattataatgtttggaattgggccttttaatttttgtaatccttttacattgtaatgagtattacaccacttgcaatttgcatgaattatcattacatgagtatgactcatgaatgaggattacaattaccaatacattacaaaaagacttttctgcccttctctctcttaccactttatcaaatgtagttgacaataaataaaatgagaacattttggtcaatatattaattattcaattttttttatacaaaaccaaattaaaaaaaaaattgattacaatgttcattacaaaataaaccaaacatgtactattaccattacattttattactattcctattaccattacaattacatttcagtcaaccaaacaccacctaagtagtttcataaatacattggcatgattataaagttagtttcttaatatctggaatttttttatattaactcaaccacattgctagataaattgttgtagttgtatatatgaaattgtaaaaaatcaaattaatgtaggagaataaatagcagaaaaaatttatattttcaatccaacaacacatcattgaactagaatcgatgctattcaaagaaataggcatcgattccaaatagtctcttactgataggcgaccgttcagaaccgacgggaaaggttttcccatctatgtataactgacgactataatctacccttttgttgttggttttgaagggttggtattgctctttaccgactatttctaactagcacctattccactcagttttgcgtcagttgtataggcgtagattttacgacccatcgataaaaatttaccttactatttaaaatggttggaaaatatttatttttagtattgaaactttgtattaaataagctaatcccaagacgagagaacttcatagtgtcgttgatacttttgtgaggttccacgtccatgacaaaataacacttggcgcaatgaatacatgcaacaaatttgtgtaagttttaattgttacttattaatttattcatacctttatgtatttgacttctattacattttgacaaatttttttttgttctgtgtaggccagatggttgaaaggttcgaatctaaacctacgtcgagtaatcagcctagtgttggtgatgtagatcccacccactgtctccaagacttctctgttatgacataagtacttgatgagcagttagaccacttaagaggccttgtccatttgcttagactaagagcagttagggggaaaagggtgtctacaaggccaggttccacctccgggcaacctactatcagcatcgaggagtataagacattgaagcgagaggtacaacagtagcgagaatacaacgatatgcatacacagtacatgtagtcaaagaatcagtacctcacaataatccaggatcagtttaggtatttgtcaccctttttcctagctctcaatggctcaagtgaccccacctccaccgctccatgttcttgactctggatcttcgtctcaagctgccctaccgacctaaggcaatgatgatgatgacatttatctttagtaattgttgtatggtgtatatataattgtattgagccattatgacttaggattatgttgaattttattatgtgacgagggtactgaattttattatgtgataaaggtattgaattttaattaggatttattgaattttaatttctggctttaagttacttttaaattataattatattcaatttcaaaattttaattaaaattgaaatgtattaaaaaaaattcaaaaacacatttatcggcgtaatgatctacattgaagaaaatgcaaaattaaagaaagatattaataatgactttacatgcacgggtaaaaatttctttcataattattatgtttgcaggaaaattttgttcgtgcatttttacgtaggcaaaagtttccaaccaagccatgtctcacgagcacacatcggtgcatagtttttcctagtgcactaacgcgtcaatgaaaaccacctttgccgacgaaacattaaacactaaaagagtctttgttgactacactttgccagaaacttgtgctgccgaagtttttcatcgtcaaaattttcgtgtgcttatagtgcacctttgctggtgtaaatttgcgcgaagaaaagtgagttttcttgtaatggctattaatttcataacagggtttaatattgtttatggagaagtgttaagatcgtttctcctattggatcatttgtgtgctcttgaatggctcaaggcgctttggtgtgggtggtgacatggttatccttctccatgtttatattttgagcattgctattgggcacnagtggtgcctagcacattctaaatgtgtcgacttgcaattggctagcgatactctataaaaattatt

SEQ ID NO: 111855 - DNA, 3846 bp, Cannabis sativa
tctctctctctctctctacatccccatcaaccaactccttcccctttctgttatatccaaaattcgattaacacatcagaggaaaacacgtgtcaagctaggaaaaatacaaaccaaggcacgtaattataattacatttgaggtggaataactcattaaaagcataattaacttaacatagtatagtatatttacaactcaactgactgaatagtcttatgcgagataaatatatacaaattgttgccttgcacatcaacgagaaaccatgtaacttaaggtgtataagacaaggcactaacctcgattaggttgatgagatatactgactgtgaagacacttagcgtataatatgcaaactaagtataacagtcgggcgaacctgaacaactaatagcgaggcgccaatctcgttataggaaggcatgctcctgtttctttcacctatcaacttcagacgtctttcagtgagacttacagtcttgacgagttagaagctgacattcgaatgatgactattgaagtattcttttcatcattaagaattgtgattgtcaaagtgaagtgttatgccttcaaacgaagaaacaacgaggcgtacatcatcaatctcaaaaagataggggaaaaaactccagctcgcgatcaaggtcattgatactgagttcctgccgagacatcccagaacgctatgatttaagacgtgtttaaatacacgatcatttttgtccagtgccccataccagagcagcattggagccaagaaaaacaaatcctgatggattttaggtagtaactaaaggcaggaaggttaaagaacaagaataagttactgaaacaaagattgacaatgcttttcaagttttaatcaaggtttctgatgagaatgaagaaaatgaggagcaggatctggttcaaagtgcattgaataacacaagagaggggggaggggccctctcttggttatggataaatttctatgttggaatgtctgaggagctaataatcagcaaaaacagagcctaattaactaattcattcgatcccaagatgttggtttgattggcttcctcgagattagggtcaaggtctagaaactagggaccttgtacctaaatgtatttcatggttggtgtttttcaactaatatagcatggcaccatagaggaagaatagcaatagcttggagccctttaagatacattgttgatattatcaaatgtacgggtcaacttgtgcatttgaaagtttcagcaatggatggtcactacagtagcttccttactatagtatatgcttttaatgatagaattggaaggaaagaattacggaaggatttatgtggattggcatcctatgagaaaatggctattaatgggggatttcaatgccatattagctaaagaagagagaattggtcataaggtgaaatatcatgttgatgcagattttattgactatgttacccgctatcaagttgaagatgttaaagcaagtgggaatttctatacctggaccaataaacaacaagggaatgacagaatattctcaaaaattgataggatcatggctaaccagtcttggattgatcaatttcctaatgctaaagtaatattcttgaatgaggggctctttgaccactcccctgggatgctaactctatatcctggtaggtcaagtggaaagaagcctttcaaatacttcaggatgtggaaaactcatcctaagtatgatacaaaactatctaaattctggacacaagaggtaaagggttccagaatgtttcagtttattagcaaactgaaagctctcaagttagtcttcaaggagataaataggaagggtttctcttatctacaaacaaccactattcaggccaagttgagctagaagaggtacaagtgaagatccagcaagatcacttaaatcctgattatcatgatgcagagttagtagctaggaataaccttttagaggctcaaagaatttaccagtcctttttgcaacaaaaagcgaaggcagcatggatttagaatggtgacaacaacacgtcattattccatgcaagtatcaagcaaaggattaggcaaaacaaaatgttctcaattgagaagtaggatgagagtagggtgaatgaaccatctcaggtaactgaagccttcatttcttattataagttcttattgggttctctatggaagataggagaaggatttttcccaaggtgattgatagagggccaatgttgacaccaacacaagctgaaatgctgactaaggaatttactaaagaggaagtgaaacaagctctctgggatacctgggaacaaagccctagggcctgatggattttgagttacttcttccaagacaattgggagctgatgggggagtatttaaatagagcagtcacttttttcttaggaatagggaaaatcataagagagagattaattccacaattcttgcacttgtgcctaaggtcaattgccccaatatagttaaagattttaggccaattgcttgttgcaatgtcatttataagattgcaactaagttattgtgttctagaatcaaaattatccttcttgatttggtttccaagaatcaaggagattttacccaagggaggttcataggacacaacattatgatatgccaagaccttgttaggaattatgggaggaaatcaaacaaagctagttgcatgatcaagcttgatttgcaaaaagcttatgataccacagagtgggattttttggaggagatgctttatggtctatattttcccattgcattcattaaactagtgatgaattgtgtgagaacccctaaattctcttatgtttaatggatcccttcatggattctttgaagctaagaagggcctaagacaaggggattcaatgtgccctttgctatttatcttacacatggaatacttatataggattttgggaaaaattggagctaaggaggattttcactttcatgataggtgtactgagctcaagcttaaccatcttgcttttgcaaatggtgttttattgttttgcaggggtgacttcagaagtgtgtattacttgttacagggtctcaaattggtctcaatgatttcaggcctgcaacttaacccacacaaagatgaaatttattgcagtaacatgccaaaggaagatgtaaattgaaacctagaggcctctggttttacctagcaagaaatgccattcacttatttgggggtccccatctttgcaaagaaaatatctgggaaagaatgtgctataattgctaagaaaatgatagcaagaatcagaacctggagctccaggaatctatcttttacagctagagtagtgttaaacaattcagtgttgatgaccatacatgcttacaagtgccaggtgatgattttacccaagaaagtgattaggaatattgagtctatttgcagagcattcttatagaagggacaagcattatttaatgggctaggttctattgcttgggattctatatgtcaagcaaaagctactcgtggtataggttttaaaaaagttttggaatggaacaaggctggaatggggaattacatatgggcaataacataagagaaagacaatttgtggctaaggtggatacacagtgtgtttgtcatagaggaagactggtggagttacaaagctccactccaggggagctggtattggggatgtcttataactctaaaggatcatttcaaaaatttgctagatggacaacatgtactgcagtaaaagtatagtgtgtctaatggatataaaatgctttgtccaggccttaataaagttcattggagtcaacaa

SEQ ID NO: 111856 - DNA, 4884 bp, Cannabis sativa
  modified_base (4397)..(4400): a, c, t, g, unknown or other
  modified_base (4807)..(4839): a, c, t, g, unknown or other
tctaaattttgatattgggggttttattaagggcaaaaaatgaaatttccctttagaataagcacttttaatatataaagatatatataataaaacacctttaacagtactccccccacccccaaaaaaaaacaatgtggccacgttcttgcaagtcgactgtgagttgtcacaaaaattgatttaaattgataattccggggtccatttgacgtgagtagcgtgtactgtccactgcccaatgcccatgatttcgtgtttaggccatggccggtactacaagttaaaatttggcaatctttccattttctctacttcccaactcatcatctttttctctataaataaataataaaaaaaaacatcatctttttcacccaacagtactaccagtagtggcatgtggatcgatggctttgatgaggtttcccatatgctcttcttaataataaaattacagtttggacgttaccatgtccctttatacattcttacattaatctttcaaagtttggcttatagtgcactcaatagggaccaccatgcgctttaacatctcttttagtaaacaaaatacatgccaatgtcctcaatcatcatccattatgtgaaccaactaattcagttcaagcaatgctttttctttcttctgcatacgagattatcatttatttaatgttgtcttcaattggaggaaaagtatgggtcattttgagtgttaaatagggggtgggttggtatactttttcatatttcatcttaataaataaatatatatttttttttatcacttttgtttaattatgtttgacacgcaaagcaatctcaactactttatggtagatctagaagaaattcggtggcatgacaagctgtatggtccttctctttttctttgtattcatatttttctcaacttccattttcaaaactaataattaataataattataaatattaaagtttaatttttaattgtaaataaatatttaaatttaatttttaataataataatatttaaaatctaaattatatttttaaaatatattattactatcaaaaattaaatttaaatatttatttgtaactaaaaattaaaatttatattaattctagtttaccaccaccaccacgccaactcattaaatattcaattttttaaatttccatttttacttttaatttttcttttctatttttgttgtgttgatttggctattgtaaataagtttgaccttttctgctcagagaatctctactgcgaagttcagtacaggtttctttttaatttaagttcaacaacgtaaaagttctgccatcttcaaagtttgtccaattcaatattgaaatcttttcaaagttttcatcgaaaatccagcttagacttcccaaccgcccaaagtaacacctgtaatattacaaaatcaattaattattaaataattgacagccaaactaaccaacgaaataataaattataatgaaaagaatatacctggcataaacagaaatggtaacgttggtacgtaacggacaaatcaacgccacacacacgtaacggaacggtgataaagcgtaacggccaacggaaacgtcaacacgttacgacgatgatgttaacggaatacacattggaaacatcccaatggcggtaattgaagcattgctcatctgatcagatcggagaaatgagtctctcttaccaagttctggattaaattcattacaataataataataataatggagtttaatttgattttagtttttcttttttttttcaatttttttttgttgttgttatggtattgattgctagtgcagaattatgtcccgatcgaaaatgtgtgcttctatagcaaatcatatatacaaagggagttctctttcactcgagtcatgtcatgtcgcaataaaattctagggtttttgagatctccaagtacaaaaactctatccaatcgaatcagcaacctccttcaatcataatcgccagagctgaccaagtctctgccgcagaatccaacgactcacacattgcaactcaataaaatacacgccggattcggacatatttatcagccggaatctgagatgagaaaagtacaatactgaccagaaaatgaaccaacctgcgggaaaccaaatcagagatcatccgccttggacatgatcaaaagacgacttcgagtaggccgaaatcccgctcgcctcctctgctgatgtgaagaaggtcggatcaacgcggttaaagctcgcttcacccattcgccttcaacgccaccgattcgaaccagcgagttcgtcatagccgatctgcgcatgttgagacgattagaaggataaggcaccgtactttgatttccaccaccattgtttagattcttgtgaaggctgcaacggaatgatccaggatgattagttggagagcacatacaagtcttcttcgtcagagaaactggacggctttgcttggatacggagatggatcgattaggagagatcgaacggtactggtcaatggagaagctaacggacgaagatcgagaagctgagttgttgtaattaatgttgactcgagttggagaggacggacggtgatgatctttctggaagaagctggaagctgaagggtagaagctgaaacttgaagaagaagcaaaagaagaagacgaagatgattgtgaagaattggatggcggggagtagaaacgaccgcagggtgagagcgagcgcaacactggtccactcgacctggtttttctagaagaagaataagacgtcgacattgatgagaggtaagagagagaaaaagagagaaagaaaggagaagaagaagaagaagaatttccctaaagggccccctcggggattggtttggcaaacctaatgagtctccaaggcggaatttatagatggagaaaacaaggggcagatggtaattattcagacgtctatgggctattaattaaatttaagagagataatccatggtgacacatgtttaaactattcttgtttggatggttagattagcaaaataataataatttataagagtatttgcggccaaatctctttaatatttataattgttacacatataattataataaaaaaaaaaatagcgacaaaaatattttattttacgattttattgtagtcgtaccatttatttgtcattaagtgtcaactcaaaaacacttggcgacatattattagactacatattaagggctcacttggtacgccgtattgtaatgtattgtattgtattgtgttagattgtgttgtattgtattatattatattagtattatttaatacaatacaatgtttgatattgacttatattcattgattgtgtaaagttataatatatatttttaatacactcaatcctaacaccaactacgtgtcccgggtctgggtccaggatcccgggtccgggttcgagtcccagggccaggtccgggcccatgcccggggtcggggtcggggtcggggtcgaggttcggggttcggggtccaggcccgggcccgggtccggggtctggggtctgaccacaagagaaacaaaccacaaaccccatcaccagcatgactccggcgacctctctccggccatcgtctgaccccatgtgtcagaccattcaaatcccaaggtgtcgacgacctcaaccccaaccggcaccgcccctttcgccaccattagctcaggatcgcaagtcaaagtttggaggttcaaattttcaacggatttttcagccacctccggcgtccgtttgatgagtcatcttcaccattagactcagctcatcgaggagaacaacctacactaagccatttcgccaaactcactactttttttcggtgacgtttttgtagctctgcctctttccggtgatatcatgtactgttttgacaaatggttggcatggatgtgatctactcgtcgaggtggtcattttgatatacactactcctatttttagtgacatttccggtacaccaatttttaccgccaccgatagttaatgtgcaccgcttaagtgagggttcgaaactccaaattttaaatatagtcatattatatgtcattggactcaattttgaaagtagaatgcaatgatgataattatttagccatttgatggtacaagtgagagtaatatctaagattggactaaataattagagttttgggacttgagagcttaagatcgtcttttggacaaagtttaacgacttgagagatgtaggcactcaacttgattattatacttgatttttatatatgttgaataacattagacatattcattttttttatgattggtaattgtttgaaaaattaaaaacgtaatctgcatatttttctggactgttctggggnnnngagtgccaaatatatttttttacaaataattatgcaggttataatttttgggtttattcaaaatacagtcgttatactgccagattttctagaaaataaaaagagaatatattcttttattattcttattctttgcctacttttggttatattaataaaagtcatgttgatcatgacttgtgcatattattgttccacgacctagtctctgtgtgtcattataggtagatcaggtgtgcacatgtaggtgaaagacctaaaatctgtacaggtagtgaattaaatttaagccctggtatatggtggttatcaagtgcgactactcggttttggatgtcgttttctgtgattggtatagagagctagggatctagtgttggaatatatttaccaggatcttagatctnnnnnnnnnnnnnnnnnnnnnnnnnnnnnnnnntgaacttctaaaacgatgaataaaagacataaaagttaagaataa

SEQ ID NO: 111857 - DNA, 3063 bp, Cannabis sativa
ggcgcagtcagggtacttttgccggcgcaacaatgcgccggcaaaagttggttttcttgtagtgactggagctccccaggacgacacactaggtcgggtaaaccttagatcaagcatcccctgaagttgtaatttcaattccttaatctctgttggaaccatctgataaggtgccttagaaaccggctccactctaggtactaagtcgatagaaaaatcaatctcatgatgtggtggcaatcccaataacttctttggaaacataaccaaaaattcttttaccaccctgatatcctcaggcttaaatgtttcgggtctactagagtaaatcacgaaagccaaaaatctcaaacatccattgtgcactaaatccctagattttaatactaagatgattggagttcaagatccttgaacggatcctacgatcacaaacggttcctccccctctgactgaaaggttaacattttccatttacaatcaatgtgtcacatacttggacggaaaatccattctaagtataatatcaaacatagttaagtccaactctaccagattagcgctcaatatcctattctcaattctaattggcatagacctaaatcaccttttaaagatagctaattctccgctaggtattagagttccaaatttctatctcattataatcacaaggcccacccaattttcaatttttcttgaggacacatatgagtgtgtagctccatattcaaacaatacagtatagtaggaatcgttgataggaagctaacttgttaccacagaagtactagctacagcatctacttgggtaaaggaaaactcccagagtgggttttgcctctagatttagtttctttttcctcagctaaaggaaatccttcttaaagttccccatcaatctgtactgaaaattgactttttgttatactccttggggtgacgtttcttgaaaggggacaacaggataagtataagtctaaaaaccacctctgccttggttcccttagaacctcttactctgacttgagcaacctggtgtcggtggaatctttcttttttgatcaacgtaagaatcaccaccatctctaccaaagctcagagtaggaacaattgtggtcccactaacacttggagtccctttgggctcttgtaaaaactcaaccgcacccacgactcgaagatacttctctaacatcttagcatacgtggtattgtcatcagtggtaatgaccaagttgtgcttaatcttggagtttaggctggccaaatatttctctttcttgttgaagtctgtgtacaatacccgaaaccaacttagcgagtcggtgaaacttagttatgtattcagtcactgacatgttttctccctgaaccaaattggtgaaatttttcctcttggtattcagaaaatctttgttatagtacttagtgttgaacaggtcttggaattcctcctaagtcattctagtaaagtcccgagtgaaggacactatttcccactataccaaggcatcctcctagtattgaaatgtggcacaagtcaccctgtcaatgccagtgacacccataaagttaaggattctattaatcacagtcatccacttctcgactttcattacattagagcctcccaaaaatgttggaggtacttgcttacaaaatcgctcatacaatgactccattcagttacaagcatcagtttgttttgctggcaatactggaaaaggagcaactagcacttattgaggagtcacaacaggaggaccctgttgtctcaacctctaaatttcttcatcttgctgatggattctggcttgcatttatgcaaacctttgctcctagtcttgaggagcctgtggcagattaacattgcctttgccatgagctcttctacaacctgtatcccaaccacggggatgagggagattctgatctccccaaccacctttagtctcaaccaagttgtcttgactccttatgtttcagcgggtgtccattgataggactaccctatgaaaccataagtaaggtcggtcaaacagcgatggaacttacaatccaaataccacatacatgaaattatgcactatccatctaacaattactaacatgcttcctatcatgcttttcaaatcatataaactattaaacaagtaaaggcttactgagctctgagtcgagcttgtctttgatgatgattatgcatatcttgacaatcttcggtaaacaacctggcggctttgataccaaattataatgccctacatgcttaggcatgctataataattttctaattattgtgaacatcttcggtaatcaaaagttttctcgggaatcgtgataaattaaatcttttctattaaattcaaactttactaaatacatatttttacatattttttgagatcccattaaaggtttacaataatatacaaaatatttttttcacaaatgttttgcccaacaactttgaaatatgagcccatgttgtcctaaaaccgaatactctaggcttaaccatccaatatgtacaatcatctttaagctctggagtcactactgctcaactttgacctttcttttacctacacattataccatatctgttagtcgacagacgtagtaagaaaagtatagaacatagaacaaattagagacttgaaaataggtgcccatacaactaccaaaaatgcttaatagatgaatcaagaacattcttaatagaagtacgaactatataccacatgcactaagtactcgtcccatactagtgtaggttgggttaatccatacctcaagtacaactaagcattataccacatacactttgtactcttcccatactagtgttggtaacattgtgccatacccattaatattatattgtaccaatacactctgtaccctaactgtacaagtgttggtagtatacaaatgatataattcagcatgtaagagttagtcccacattgctaatgtgtgaaaataaattgtgatatataagatgaaagggctactcctcccattgccaattggttttgggatggaacctcattca

SEQ ID NO: 111858 - DNA, 8753 bp, Cannabis sativa
  modified_base (26)..(39): a, c, t, g, unknown or other
agggtccaatctgtaacttttgcaannnnnnnnnnnnnnaatggtatttaccctataatttataatgagaggagcatttcagtctcgttttcttttctttgctccagttttataattattttcttctaaaattaagtacacacaaagctacatgtcgttcactttaggaaaaatgaaacgacatgatcatatcttcgttggcacaattaacgacataaagaaaatctgtgatggcgtggcgttgaataccaaaacacacgtcgtagccttctaagcctatcaatttttgtcttttaagaaaatagttttcatttaacagtgaaaatagcgaaacggtgaaagaaggggtacatacagtacaggttctttaaaataaaatttatttttccagcaaaaaataaattgttttttatttattattattttcaataaattgccgcgcgttattcccgagaaaatggcgacgcgatccttgtggcgcggccgagccaaattcgcggcggtaaccaccgccttattcggcggagtagcggcggccaacgtagctacctccgatgatccttccaggactctgaagctctacactgcagttcctgttcggctgtttcgtgactgcgtcactgctgctagtatcgcctttggtatgttatctgaactacgttccatattaaggttttagattttactcctagcctgtcgtgtttttgctttagcttcgattagtctttatatgttatagaacttggagcttggaattcggtgccataattggtgaaatgtgtaattgatttgagcttacagtacaatttaagataatcacaaatgaatttgttttattgcattagtttgcagatcgtagcttattgctatgttgggtttatgattgtttaacttgagtctgctaatgttgtgttgagcctacgcgaggcaaaattatttgtcgttatcgttgaagccagtgattgtgaagagagcttcagtgcggttctttcttcattacatgttctcggctttttgaatgtgttaactggtgatttagagaagtattttgaaattggttataatggagaggcttttgatgcatactttgtcagaaacaatgtattcatacttaagcaatcaagccccaacaatggaaattatgtgtacatatctttgaacatatttttggtttttgtattgattagattatgagtactcacttttgggactggctgaagatagtgatgaaaggtcacgtgttaagcatgaagttcatctaagatctgcacgtaaacttcaagaattatgtttcaagaatggaggcatatatatcaagcttggtcaacatattgcacagctggtatgtttcattttacttttctacatatttatgaagagaaatttaactcacattctatatttcatgaccttctggacaaagttttgtaatataattttgaacaattcatttcaaaagtctattattcttcaggtacaaatgtggaatttcaattgtcatagctgttctttcatactttatgcaggagtacttagtacctcatgagtatgttcagacaatgagggagtgtatgttaaataaatgtcctgtttcttcctatgatcaagtgtgtgaagtgttcaagaaagagttgggagagacaccggataaagtatgtattttgttttcatctagactcatggttgtagtattttcgttatgtagaagtaaaataattgtgtactgaagtaagcattattaatgcagatattctctgaatttgatcctgttcctatagcaagtgcttcactggctcaagttcatgttgctcagctgcctgatggccgtaaagttgctgtgaaggttttaattgtcaattttacctcaaataagaatctttagtgtaattaggtgccgtgcaccaccaagttttcatcctttgtgatgtagaatgaatcacagtttctttttctaatgagaattattttctacttttaaaaactttccaacattcaggttcagcacattcacatgacagatactgcggctgcagatcaggccaccgtggaattaattgtgaacaccttgcattggatctttccttcttttgattacaggtattcttggatgatttcttccctaacacagtatggtaagccaacttagtaccaccacaatcatgccgtccaaccatgcatcaattgtcatataaatagtacttctaaaatttaggaatacacttctttcaaatgaaatgctgtgtttaaaatttctggctttaactagttcttttctgcttatgtccagatggttggttgacgaaattcgtgaaagtttacctaaggcaagttgcttaatctcttgagtatgcttttcttatttttttttctcatctttggattaatacttgttaagtttgtttttgggatgtattgggtaacaaaacatctgacttctatatcttagtttttttgctataattatccacaactcttaggatcactttctgatggggttaatacttttctctcaagttattgtaaactttctccaatttatatccaactttttcaattttggattaataatcaaatacatcctttatataatatgttaggccaaataaataaataaaagacacagttgaattgatttttgtcaagactttggagtttggactaggaattgtcattgtttatccgtgcaaggtcttttgttaatttaggttacttttaatctactgatttttcatattactattgttaaatctttttttagtgcatcatagaaattagaatagaaaacttgtgacaagtgatggtctgtacttgtgaaaagtataaaaaaactactttatagtttggaaaaatagtatgctttttcaagtgtgagaattatatgtgacaagtagacttatattaaaaatttgtagctctttttgatacgtaaaagtgcatggtttttatttatttaaaaagtaaataaatctaaacacatatttgtttctgacaacttgattagatatttgtaagcatgcttcacttatttctgatgtagccttatactgctttggctttactgtaaccaccaggagctagatttcttggttgaggccaagaacagtgagagatgcttggataatttctggaaactatctcctcatattgcaccttatgtatatgcaccaatagtgtattggagtttgagtaccaaaaaattattaaccatggaatatatagatggagcacaagtaaatgatttgaagtctattcgaaagcttggtgttcaaccacatgaagtttctaaattagtaagctcatcactgtaatttttgtatggggtctctaaacttgctgctgatccaaccattcattgtcatattatcatattataatggcagtagacatttactttgaccaaattatattttatatttttttatgcttcaatgtcattgttttcacaaataaaaacacttgaatgcagttcgagtttacaaaaatattcatgacatatgattgtactttatgcaggttagtcaagcttttgctgaaatgatgttcaaacatgggtttgttcattgtgacccacatgcagcaaacctactgattcgcccgatgccttctagcagaaagagcattctaggtagagttctgctttattgttgttctattagttttggtgctagtttaatgcataacttgtgactagcattagtactagtccagcctgtaaatgtctgccaccaaagttttcgagtcctagttgcaacctgtcattagttacatgtgtgtttgtaattgtgccaactactcacactagtggaaacaacgtataacaattattccaagtggtagtgagtgtttgtagcctttgttttgggaatttatttgacagaggaagtttgtcaagaacttctattcaaaatcttctttagtagtagaaagtttgtcataacttgttcctattgaaaatgtagtaaattttagagcacaccccgttctctatcaattttttttgatagatttcaatcagtcacatagcatttatccaattatcaaaatcctatcatggggttttccccatcaaaataaaataaaaaaaatagtaataaagaaaaagtagttaatatctagagcttattcttgtaaactcaaataacatgttcagtatgaattttctgatcttctagtagtttctgtggctactagtaattcatatgtgccaaaaactaacttttcctttcatgtgaacaggcaagagagaaccacagttggttcttctagaccatggactgtacaaagatcttgacttccagacaagaattaattatgcttcactctggaaggtacttaatattatacctgagaaaattcttattccattattgcatcaatcttttgaatgaagcagcacacttagtcgtcttccttctgttttcatgtttactacaggcattgatattttctgatgctaaatccataaaggaaaacagtgtgaaactgggtgctggagaggatttgtatgcgttatttgctggaattcttacaatgaggccatggaatagagttatagatccagctattgatcacttagtcatacgaggtggtgacggtgaccgatctgaactacaggtgagcttttcttactgcatacaatcatattatatgatacctagttctgctcagtgttctatgaatattgttatgagtagttggtaccacatgcttgacaatatttttctattctatcaagcagatgtatgcttctcagtatttcccccaaatttcagagcttttaaggaggctaccacgtgtaattcttttgatgctaaaaacaaatgattgtctacgatcagttaataatgccctggtattgcatcttgacctctttttacccctttcatctgtttttgatcgcagtcctttaattaaaaccctccctgtgttttggcattggtaactctacatatttcttttctatttaaacatggtaatattctaagaatttctcaaatcaaagattaggaacaatcaagtagaaaagaagaataatcatgagacaatatgatcaatcttagagataatcacgccaagtttacacaagtattgcactttgtccaaaactcttatttccaaatcctaggtgatgaatttgaagcttgaggtttcttcaatagaaataaggagtgggatgaaacaagtctttaaaattatcaggtcaaatttttcttgatgaatttcttagagataatttggattcttggagagcttggagagagtgagaaagtgtgatcaaggcttttaaattctaatgaaccccttaaacagtgcaggaacctccattagacttgtccaatagaattagagtcattaaattcaaattttggatcatttacttattaatttcttaaccaggattttctcccagtgaggttaggtcgcacaatccttggagtaaaaccctgggacttcatattcatttgtcccagacctgtttaggaataggtgatatgtagcctgtcctgttgtataattgctaaaatcacatttcgacatttccaaatgctctcaaaaattttgggtatccttttccactccaatggtacacttcagactgagaaacttaatttcttatcacctacaactcaaaagtcaaattttacattcactttgatgtgattttgactaagtatggaaacacaaccatttgtgttcgcactttgcctattaccagctccaacatcttttggccttagttattttgtgacggcccacatggatgggggatgtcaagtatatgcactacattgttgcttcatttacacttctaaaatatcgttgtaaacttgtagtttacccaatatgcaaaatttcataatttatctgtggttaagtttgctctacattattttgcatgctaccgcttattcgcactcttcatccactaaaacatttctgaaacagttgcaggagtcttctctggaaacattcttgataattggaaggatatcttctgaagctgttattgaggctaaattgttagagagtaaatccttgttggttcggttgaatgtttggatcgatgaaattttattggacgctcgactttttggaatgcaggtggcgctatggcttttgcagctgaagagagctttgtgttggatttactgaagagatgttctataattattctttggttcctgaactgggctcgcacattctttttctccataggtcacattccccacgaaaaaaaatacagggtctcgatcatatgggatttgatatataattgattttataaaatggaagaacaaataagtgattattttcttttaaccaaaaaagagggaaacaattcactgtttttggtttcaagatgcagactgttaatttttttttggatctcatcgatctttgtaaacatcttattccaactggtaagtgagagactgaaagaaaatgattcattcgggatgctagtttttacacacaacttcacaataattaattgattaatttccctggaaattcagaagtgggagtaccagatttatacaaattcatattttgttctgtatcattattatctacacgtcctgtctaaatgtctaaatccgggttttctgtatgattaaatttgtatctgattcaaaattgtgttcatttgccaaattcttggtttgtattgtaataggaaaatagtagtgtatactaattaatgtttaaattaatctttttgttttggaagggattttaaattgatcttgagtaacaaatatttaaaattattttagggaaaaaaaattaaattgagagattgaataaaaaaaattattctagaaagcacaaaatttatgtcagaaaacaaatatggttcataaatattttttattaatatattaattaaaacacaaatcgagtaagatacatgtcctcacaatttagccgacccaaggactaaatgaattatgagtttcttcacccaaatgtgtttatatactcacaatacatagagtacgtcaaaagagacttgtggcctaacagaagaaaagagttgtagaattttgtgttaagccttcaaaagtacaacgatcgttaccttgttggcatcattgatgtgatatgtatattatttcagctttcatttattaaaactaaatgtatggaatttggatttgaatgcctatatagtatacacgcattattatattgatacataccttgaaaatgaatccctgaatttcatgtaaacatctttctttattgtaacatgtggggtgagttagtgagtgagggttgcaacaactacatccgccccagaagagtagtaagtagttggtcattataattaataataactccaactggtttatgctctactattactactactatttctgtccctcaatttatttatttctagtgcctctcaaccaaactcgtacgattgcataatctttaccgacacaaatatggtaacaacaataaatgaataattaacattattactttggttgggttgctgctatcataactcaaaatcaaaataacaacatatgagagaggagaaatttctgcttttgtgacgttgaacagcacatataagacaaaaacgacaatgatttttatattgtaatagaattttttttttttgggtttcaccttttgtacttgtatagtgtttaatttgttctacgataatttaaaatataaaaaaactgatccaaacgctttatttcacgcatatagaataaaagagaatgcaatatactatttgaaatatcttaaataacacattatataatattatataggctaaatactattttgaacttgtaaaacttattaattggaccatctattttattaaatgataaaatatgtattttctaaaatagtaaaaatagaatttgagctcaatttttaacaattttattttttaataaaatcaacttgaagacaatttataactgaacaaatacagaaaatgtaatatctctagaacggattattattaagttttattttgacaaagaattagttgagggtactatttgtaccttgaaaaatactaacaaaataaaaaatttaattaataatttttacaaaaaaatacaatctaaaattgaataaaataaaagagacatccatgaaatacattcaaaatgcaccaatagaatttcccaatagaacttccctaaacttctttaataatacaataataatgatgacttttgtagtctattaactatctatggcacctaacactattgacagagctagtaataagggcagggactgtagtccttccaaaaaaaattgtatatgttaaatagataaatatctatatgtatgattagttttatttaaccctcctaaataatttttgttcatgatttgccccaggttgtatatcttccttccctgccaaacttcgtacttttacaattattaaattaaaatgatatttgatattaaattatgaccactacaacactactctagtaattataatatacatgtaacataaccttaaacaagtttatacatatacatttatagtaagaataagtttagagtgtgttaattaatattaatagtagaagaaaactattgtgggataattaattgattgatgattgggttaattgtacttaggaagggaaggtatgaagggcccgtttggtatgcaggattggactggacaagattggattatgctgaaagtaatcccgtgtttggtttaagaatggactggactattttat

SEQ ID NO: 111859 - DNA, 3406 bp, Cannabis sativa
ttttttttttttttatgaatagtaaataaaatttcccttttagaaatgttaatagcgggagctcacttctctgttcggcgagtcaagggggtcatcaaacttagaaaatgatagaagaagaagaagtccctttgcttaagtaccagcaagaaccacgaagtgagtatctggttacacgaacatggctggaatcaaaaaagatatggcaaatagctggaccctccatcttcagccgccttgccatgttctccgtcactatagttacccaatcattcgccggacacttcagtgacgtggatctcgctgccatctccatcgttaccaccgtcatcgtcggcatcacattcggattcctggtaatcttcactcatcagtatgttactacgcgtttacccgtctgttggtgtgcatatatttgttcttaattctggaactgatcgattatcgccacgggaatgggagttttgttttatttagttaggcatggcgagcgcgctcgagactctttgtggacaggcttatggagggaaaaagtaccatatgatgggaatttacatgcaacgttcttggattgtgctctttataagttcggttttattagtgcccatgtttatatttccagctccgatcatgaagctcatcggtcagaccgaggcggttgcggagaagactggtctggtggctaaatggcttattccgtttcatctgagctttccgtttcagttttcgttgcagagattcttgcagagccagctgaagatggctccgattgcttggatttccggtggcgttctagggcttcatgttattttaagttgggtttttgtgtataagatgagggtaggtcttgttggcgctgctttgactattgactttgcctggtggctctcggtcttgggaatgcttggatacactgtttatggaggttgccctgaaacatggactggtttatcaagtcaagcttttgttgggctctgggactttattaagctctctttggcttctgggatcatgctctcgtatgtgtttgctctatctctcaatctcttttactcatattctcttatggtggatgaaatgtaagcaaagtgtttgtaatatgtcaggttggagaatttctattacaggatgttggtcattgtatctggttatttccaaaacactcacattgcagtcgatgccctttcaatctggttcgttcaaattcacaaccttgtccttaactatatttttttaaattagtactctaatgcacctcctctgtttttatgtagtgtaacaatttatggttgggagtctatgattcctcttggatttttggctgcaacagggtaagtttcacttacttgtacgtttctatctttcattttgtgcatgaagtactatcattggttaaccgggctgttgaagctcttcaagattttcaaatgaagggtggaccactccaatttttactaacaatcatgaagcggtaccacatggatgcacgaacatcagtcattcgctcaattgatgtttctcccctttttaatcttcttagacttttataggagaaaccatacacacaaatacgcagcatcgcttcccttggtctttctcccatgggagaaatataattcaaattcagttcgacattgtccttttttggcccaacctgtattttgttcaaatgtcatcttaagaactagcaaattttgctttcttgtttattgtcctttttcggtagatcatttaggaaacctatatatcaagagtataataaaaaaggaacaatagtccttataccttgtgaatttggttgagtttactggatcatattttttcaccgagttagggtgcgggtggcaaatgagcttggtgcaggaaatgcaaaaggtgcaaagtttgccacaatgatttcagtatttacttccatatgcgtgggacttgggttttgtttaatagtcgtgctactccatgaaaagctggccatgatctttacgtcaactcttcctgttattaaaatggtcaatgagttagcaatcatgttggtcttctccattcttttcaattgtattcagccagttctctcaggtcagaaagtacatatcattattacactagtttaatttgcaaaatctgaaatatagtctcatgtagggatttagggccttgtatttgtgaattccaggggttgctgtgggatctggttggcaatcaaaagctgctttcgtaaacatgggtagctactaccttgtgggggtaccacttggtgtatttttcgggtggtatctgtcgttgggtattatggtatgcatggttgcctctttctgtggagtctttccaataaaaatgaacatgaaactaatgctaaaagccaacagttctgaatgggttatccaattattacgagttctctacataaattcccttgagtttccatgagcagggaatatgggccggaatgcttggtggaaccattgttcaaaccgtacttctcataatcatcactatgagatgcgaatgggaaaaagaggtaacagaacttctgatattaggaaagtttataggaaagttttgaaaataatatcaaattgtgggggtcatgtcatgtcactaaaatgtggatgtagcagtatactgacattctcatgaattagaacactgtttagacatttaatatatttggaatttgactcgcaggtgcagaaagcttggatgaatatcatcaaggaagctgcgtccaattgtaacaattaattggagttcagaataatgtttgagcatcatcatttcatgtacattccaaccaaatttgtcacattgtcttgaaaattcatttagatgattcacatcttccctgataatacctctgtcaagctaagagtaaaatgaacctacatttggcttcaggtcgttgcctagccagtacataccaggcccctgggaaggaaatatgaagattcattttggtggactatatattgttaatatggttccttctatattttcatctctaataaactcattttgttttgtttttgttaatatttatttttgaaggataatatgtcatttattgaaataaattcttcagcatgaagcagatgattattactcgagccttaacatggtaattaataataatatcatagacgtctaatttcgtatttataacttttgttcaattataaaatcttaatacaagcttaactgcaccagaatgtaagtttgatgcatttacttgcgggataggttgtgaaatttaatattgaaacaattgtctcgttccaataacgtagctaaacaatttatatgataagtcaatgtcatacatatgaaatagtgcatttaaattgggcgtgctgaacttgatttatattttttcatttttagactttaaaatagttttttttttgtttttttt

SEQ ID NO: 111860 - DNA, 4083 bp, Cannabis sativa
ttttttttgggggggggtttttttgaaaaaaaaaaaaaaatcaagaaaaaggtacattcaccatgatcatcgatcacaaaccaactcaatcatgaccgtacgatccaactcacttcatcaccaaaaaaaaaaaaaaaaagcagagtacagatgatcaaactcttcattgtcacaacttaaaaatggcagcaacaaacatagacatagacaaagacaataccaccttgcccaaacctccattactaccaccaatggcatccgagctgtcatccgacgtggcaggcccagtggtatcagcatcagtagcttttttcttactagccttaggtggagctggggcaggagctggtgggagaggccttggagcaaaaatcccaagtggttgaagaaccttatcaacttggtaaacagccaattggttatcagaataaactgttcctgaaattgttgtgttgactattccagttgttatgttgacttggcttcctgaggttgttatgttaagagggtactcataagtgtcactggcttgagtttgaacagggttgctcattgtttgaaaattggttattgaaatgaatgatgggactaagtgaaattgaaggagttggactttttgttggtcggttaggccgtttagggttccggttttgaggttcgaaaaggcgctatcggacggggcaaacatggttagttcactgtttgtgcttccgagttggttattgatttggttaccaacttgtgtgctcttgagtaggcgaattaggacggtgaattgcccggcttttgttaggattttgtagatgtctgttgagggcgggggaccgggtgggagagccggggccgcggtttgagctgaagattttgtgatgaaaatgaggaggagaatgagaacaagtgagggagtgttgatgagcatttttgatgtgttcatgttttggtgtagtgagtttttgttgttaggatttattggtttgtgtttttggttattttgcatggagtggtgttgaatgaggagagtgttagggggggtttttattgagggtggagaatgagtgttattaggtaaaatggttctatttttagttatgacttattgtgaaaactaagtggttaggttgtctcatgactttgttggaaagttgatggaattatttgaggaatgctaagttgtaatttaaggtaacatgaatcacaacaattatattggtattggtgcattttaatattcgattttatattttaatttaataaataataaaatcgctaattaattatagagtgttgttgagtgaggaggagaaatcttttaataaaaatgctccaaaattcggctttttcaaaataccattttctttatttttactactatttattaaaaaatatctattttctaaaaatatacataatttattttttaaaatattacatttaatattttattaaaaaaagacccaattatattttccaaaatcctaaattaaaaaaatataaaaaatttgatattaaaaattcaattatattttcttttataccaactagcaacacttgaattaatattaagtaatagacagagatatgtaggagagagattgctttggaaaacagcaaaacagagattgttttcaagtgggtatgggctaaagagaaaaaagataaataatgtgtttcattgctttacttgcaattatttggggaaacagtagaaaaaccatgtgtagatagatccaaagcttaaggaacaaggtttaataattttactgtagtagtattttctaatttttacctgttgccagttgcatatatgattgtgattgatgacagttcagaaagttgggtctgagatgagactccccaacttattattgataatgtgtaattggtttatgagttgatttaagggattattattattattattagtcaccttttaacgaccttaattcacaattattattatatgaaatcagtaccagctaatagaatgtaaaaaaagacaatggcccatcaaaaaaagaactctcataattttaggtaacaactcttaatctatagttgatatatttatacgattgtgtataatatataatgcgtgataaaggaatcatattatagaggtgagtgtacttaatcaaacaagatcttatcgtttgaaatcttagtaagttaaacaatcggattcatttaattgcttaagtaattatatgcatgtccaaatccattcagtgaacaatgatttacgacctatattaatacttggccaattcaaattcttgaacttttgcaattacgtttttgagctgggctattttattatgggcctgaattatgtatgggccacttgaagcccaatattgatctgatgcaaccttgtacaagcccaaagttaagagttcaaggcttactttgatatatccagcccaggcaagcctttgtcagactattgggtttgggatctaatgggtgcacattgagttttgacgggtttgggtggtggaaattgcaccctatacctttatttttgttaatccatttcatttttatcttttttttttctatatatttaatttataccctcttttatttgttatatcttgattatactatgtaatgaaattaacttataaaatgagtacacttcaattgaatttaaaataagactatttttagttaactgatgaaaaaaaaataggtatatttcaacttaccctgtttgggtgcgtataattggtttaccaaacctacccgtttgtgtgaacgggttttcgagttttgagtgtgggttgggactgggtttgggctgggttgaacttttttttttggaatttttacaaaaatactggattttagttcaaagtttataattttactgtcacaacaactgtaaaacaacaaaataaaaataacagtagaacaactaaaaaataaccataaaacaatagtgaaaacttaatacagtatttttgaaaaaaaatttaccctacgataaaaaagaaaaaatttgaaatttaagtctaaaaactttttttttttggttcatttggaggaagtttttttgttttgtttcttatttgggctacgtttgattggttcatttctaatacacagtgtggcgcagtggttgtgcccaactaactagctataagtttgtgagctgaaattcctgtcctcaaaagtgttgacaataatttgatcagatcttttgaacactaatgaaattcttcttattaacatattaataatcatcctacactaaccaaaccaagggagttagttttatttatataaacttgtaattacattagaattttcatttaatatcgaagtatttttttgcaacagtaaattatttaatatctactaattatagtttactacttattacactaattaatagttaatatctactaattatagtgtactagttattagactaattaagattttttcttgtgaatttttacatgtactaacaattcaatttttttttagttgttaaaaatttttgctaaactatactaaaattatttgatttaaagtttttcgcccaattatgtttaattttactgatgggtgcttaaaataaatagaagattagagtacaatttgatacatataaaatttttggggcacaaatatttaaaaacttgtcaaaattcgtagacatgatcgatttggtacattagtaaaattgagccgaatagaaagaacctgaaaaagtttaaaatgtcaaatttagaagaaaaaatattataattaatcaaaaattaattatgaattattaaggtatcaaacaaacaaacccaataaaattgtactcaaaaacagtacaattctaactctcataagtacttaacacaaaccaaaattaagaaacacacatacacacatttatatataaaacacttacctagctagctataataatatatatacaagtacaacacctcatacaatatcttccaaataacccaatccatggatcatcatcaaactctggcacacaccaagattatattatattatattgataagctatatgaacatgcatatctgttcaaactcatcatcatcaactatata

SEQ ID NO: 111861 - DNA, 3464 bp, Cannabis sativa
  modified_base (2504)..(2526): a, c, t, g, unknown or other
tattaaattacactaataatataaccaaaattcttagcatttctcataatttgtgggtgcccagaatatcatagctactcatataatttatacatatctttttacatattcaaatgagcatttccaggtattatatacagtaggcattttcctagtcaatcatatgtgattatattgttattttgtcaacagagcaggtgaatctgtctgctcccactgggcacctttttaaaagctttgactataaatttacaaaattaacacatcaagaaatggaactagtaaaacattataaactaataataataataacaaaattattgatcattggtaatataaactttggtacttatcatatccacacgttaccaacttaaaaattcaaacattcataacacttagtagtacataaatcttctattattgctctattaatttgtagaaaagactttttctcactcaaatgatagtaacaatagacttggttttatttaccaagcacttcatttctgttatttatttgatactttaatttcaagttaattttttcttgttattaattaaaaaaaaaaaattggtaattaagacatcgttttggactagtaaaccttaagcatggaaatttctaccaaccccaacctgccttacaatttgtaacgttatgccatatttgtgtaaaagttatacttagctatctaacaactcctattctctgttgtattctgtttttatttttattttaatatatctccatagacttcttctacaaactcattcctataaataccctttgagcttttctttcaatatcatcaaaccaagtcttcacatcttcttcttcttcttctctcaatcaagtgttttgtgtccttagaaaaaaacattacattatggctaagttttctttgagtcttttgttagctctttctctacttgctttttctccactttgcttgtgtcacaagtatcaaggcggttatttgttccctcaattttacgaccactcgtgccctagagctcaggagattgttaagtcggttgtagccaaggccgtagctagagaggctcgcatggcggcttccttgcttaggcttcactttcacgattgtttcgttaaggtaattataaatggtcgtgtttggctgaacttctgcttctatttttagcttttctttttgagaaaactactaactatgtattgtgtaatgtgattaatcaaacattttcatgtattttttttttcagggctgtgatgcatcattgttgctagacagcagtggaagcatagtgacagagaaaagatcaaacccgaataggaattcggctagaggattcgaagtactcgatgagattaagtctgcacttgagaaagagtgtcccaacactgtatcttgtgctgatattttggctttggctgctagagattctactgttattgtaagtagtttactttaatttgtttggcataacaaatatttgactagctttagtgtgtgacataattttggtatgaattttaattcttcttttttttttcttttgctttacagagtggtggacccaattgggaagtacctcttggaagaagagatgctagaggagcaagtttgagtggctcaaacaatgatattccagcaccaaacaacacttttcaaaccattctcaccaagtttaaacgtcaaggccttgacttggttgatcttgttgcactttctggtacatatatacactttctttcttcactactttttataacacttttctcaaggcctttacagtcttttcaacatttttactacattatactatgttgctgcaacatgaaaataacgttaatttctgttaacactgttaacaggaagtcataccattggagatgctcgttgcacgagtttcaggcaaagactttacaaccaaaacgggaatggtaaaccagacttcacccttcacccaacctatgctgcacagcttagaaaccgatgcccgagatccggctcagaccaaaacttgttcttcttggactttgttagcccaacaagatttgacaacacttacttcaagaacttgttggcctcaaagggtcttttgagctctgatcaagtccttgtgacaagtagtgaagcatctaaaaaattggtcattcaatatgctgagaacaatgaactcttctttgaacactttgctaagtcaatggttaagatgggaaatatttctccattgactggttcaaggggtgaaatcagaaagaactgcagaaggattaacaattactagatcaacacaattagaatcacatgaattattatgtttttttttttattttaagttgtctttgtgttatcttttattttgattgcttctttctttttcttttgtgtgtatttctttgaagtttcagagtgtttatttggtaacaatttgaataagtgaataaatgaaattgaatttttaaaagtgaataaatttatagttttttttattattattatttacactaatctttnnnnnnnnnnnnnnnnnnnnnnnttttttttttttttagataaaatgttattatattaaattaaaataataatacaatagtcattagagtaggtgtaattcctctatccaaatatattctttatccaccgatagagcatactatactaaaacatgagcaaaagtattagcaaatcgaaacacatgagagatctgaactccaggaaaattagacatgagaatataaatatcatgaagaatactatgaaaatcagaaacactaaacttaatagaatgcaatcttttgaccactagaagagagtccgtctcaatgtagtgaatagctatattcatgtattttagtcattgcaaactaaacataagagtcagttcttttttaacttcagatttgaaacaaccaggatatgatcttgacattgcagcaattgcagcaactacttgaccatgagagtcatgtaaaattgctccgaaacccgatttgtgattaatagcatcaacatcagcaattattgttattgttatctttatttttatttaattatttatttatttctaatgaaagttgaaaaggaccttcatatatgcaatcatgtttgtaaggaaagaaatatatatttatataatcaacaaccatagaaagatcatgtacaaataatggacactgtgatgacagactaaaatgtaggaaatttagtctttttccaattttgccctacaccaacattaaaataaattagtaaaccaaggtcactttcgacctttgccaattcctaacttttcaaagtcagcaaggtcaatacgacctcgttttggctttggcaaaacccaaagaatcgagaaccttcccaatcactttgtctcagccttaggttttcctcgaaaccctagcagagagtttctctctgagaaactcaaagccaaccctcaaacaacccagaaatcccagatcaaacacaaacaca

SEQ ID NO: 111862 - DNA, 7448 bp, Cannabis sativa
  modified_base (2296)..(2296): a, c, t, g, unknown or other
tactgtgggagccgttacgagcagcgtgtttgtgagaagatgatgacgtagtagtcgtttggtgtttgttatgattcggctgtaacaaatcccaacagaaattggaaacgcaagaatcgtttcgtcgttcggcgtggcgcattctttgctggtgtttgttattattgtcgtcgtaataatcatgatctggtgtagttgagagacgagtcgatggtgtacccagtgaaagtgtacaatcaacagaagaagaaggagatgcgaaggaatacatatcttggttattattatgataagatgtatgatcgttactataatgatcgtacggcttgggattaggcatggagaatagcatagagaaagagttgttattgttttggttgtggtgatggtatacaccacatgaacatggtcccgccatattcccctgtgagctacagcatctatgcatcattttgatcttcttcttctctaattttctacactttgctatttgaaaattaacaaatgggatttctctggtgaattggaaggtaaaatgaaaaaaacacagttgggttttgagagagagaaatgagaataagtgagagaagagtgatgaagtgagagatatgaggtgtgggtgttgttgtccgttagctttataagctagtaaaatgttgaaataccagtcagcacctgcagtccacgttgtcgtgaatagcaaagagaaagggatataatatatattattgatattgatacaatgatacgtatatagtaagagaacaagtgttttatttatttaataaataattataaagagaagagagagagaaagggggttggggggacccaattatttacatgttacagagagagaaagtgttggatatagagatagggatagaagactgagtcatctctagtcaggaggagtaatattaatcagtgctgagtgtgtgtgtgtgtgtgttggggatttatgaagtggtataaggtataaacaagtgtaagaataaaaatatgttaagtcctatatccacacgattcaattaggaatatgttttgtttttgaattgggttaattaattgggttgagtgccgttattaaagaattaattaataatgaaaattatattaggaaaaacaaataataaataaataaaaaagagaaattaaataggaaaggggaggatatgatagtgttgtttggagatgtgaaatatggtttggtcattgggggatttgggtcaaaagagcccacgtgactagggggaacagtcttccatggatctgccttctccgatcacgaggcctattttagtctcaaacccaatacaaaacatcaaaacctctgtccgtatccgtatctctgccccccctctgttctgtcactgccaccctcccaaggaaaatggaatagtccccccacacccccttcaactcccactcccttctccctctgcgtccttctcaccttcctataaactatatcaaccatccttttttacttttaataaacattccctattacattacactcactaattaacaacttaattaattcttaaattaaaaaaaatctaaaacagacacccataaattaatatcaattttcacttatttttttaccttaataaacactttaaaaaaaatattataagtaattatagaaagttatcttatgactttagtatttcatagcaagtactgctctaaattaaaatacaaaaaatactaaaaaaaacacttaaagttgtagtgtcatattattaatataattaaatattaaattatttaattaaataactaattttgctaaacatttattggtgcgtaacaatgagactccatactttattacacagtataatactacagcacccaatggttctacttatcatttctctttacttttactactcttcttctttagtatattctcttcatattaaatcaattcattataaattgttttattttagattcaaaagatgcatgcacggaccccatttattttattcttaattattattcatacaaataatataaataattttagagtaataaatatgatttaaatttaaatagtggtttaatatccaattttattatttgttcattgttattattaataattaattaagtgagatgggaagagaagagatgcctaattaagaatattaattaaaatgattcccacatatattaaaaaaaatgattcccacataatttattatttaatttaattttttaaaaaaccagacatcactacaaaaaattactactttaagtaataattttttagtcacaacanaaattttttgtgactaaatataatttttagtgaaaacaaaaaattatttgtgactaaaaataatatttagacacaagttgtcactatttagttttagtcagaacaagtattgtgactaaaaatatatctagtcacaacaaattgtaattttattgactaatacttttagctacagatcatttagtcacaatataggaataataatttataattagtcacaagctttattgtgactaaaagtaaaaaattttgtagtgcgtatgattattatttagaaagtaataatgcaatattactaattattaattaaatacatgtttttgtaaattaatttataagtatacctagtatgtactattattattttcaaatacacttctattctacctaccaaactatttgaatgtggattaattcttgatcgaatattctcaggttactatatcatatatatcccgttcttttaaatgaaaaatcaaactcgtacttacttttaaaaaacataacacatgaacatagttacgtacacacaataacactactataagtctatatcatgatatactacttggattgaattctctattatatacattaccagctatagctagctatatctatatagctagctacccatattattgtcactattatgcatattttggtcacgcgcacaatgtgagagattgggtttatgtactagctctttaaatcatcttctatctcttatctctctacatagtctatactagttattattacctccgttattagttgttgtaaaagatagtcaaatccgtcaaaatctccgggaacaaacaacaaacaaaacactctacagtcagtttttatgattttgagcttagtatatataaaagtgtgtgtgtaccgtacaatggtatcacgtgaacccaataacaaaagccaatttcgtcatcataaacacctcaaccctctcttccgaatccatcaacacacaatagtagcttttttttgattttgttgtgttttcaaagagagagaaggacgtgtaataatagtcattggtaataatagaagatcctgagattttgatcagacagagagaaaaagctaaagagagatacgtatttgtatgtgtgcgtagtgaatagtgtttgttttgtgagttaacttgataaaggtatagtatgcaatcatcaaagcaaccaacacttgtttatttttgtgtgctcataaaaaataagagagagaaaatgagaagaataagaagttagtcaaagagagaaaaaataaaaataaagaaaagtgttggtattaaatgaataaaacttagtgtgtgtgacccacatcatcatggctcaagccaaaacaaactcgaccccatttgatcaaagattcaaataataaaaaaaaaaaacagtgaagagaatcggatcgtctagagattgatgagaccacactgttcgacaaatgggacgaccaccgctttccaaaagatgctctctctctttgttttgtaaactacgagagagaaaattttagagattagcccaacaaacaaacaatacactaattaaattaaattttatttaatattttaccacatgcaatagggttataatccccatatactacacgcgctttcataatatgtgtttttcactttcctctttaatacatagagtttgaagttcacgctccattggttggagtacctcggtctaattcatatttaaattagagtcgcaattaataatgaggatcccgtttattctcctttttaatggaactctgggatttgcttaatcataactcaaaatacataaataaaaattaatatgaataatatcaattcacacggtgtttaatcatggtgttatgtggctcgttggatttggtgggacccatttgggctcggttcctcttttccaaggcacgagctagagagagagccagatcgtatgaatcaatatgcgtctctctcactctctctctctctcataaataataataataatcaacactatgagctaatcaaggtgccacgtgggcgcctatttgcatgcatgcatgcaaatgttaataacttggggaagttctttgttaaataataataattattcattattaaagcattattttttttttatttttaatttttatgaaattacgagctttgaaggagaaccccattaaaaatacatatacattcctcaaaagcaacaagatacaactggaatgtctgtccttccctttctcgtcgcgacccctatatatataaatatatatattagtattttgttatttggattaataatttttatttattttaaatttatatatataaataatagttttgttctttttgggtttatgtttgggattggtctagtgattttgttgggtttgacaggatctttttctctctttgccaggtaagactaaagtaatgatataaaaacgggagagaattaatgaaaagaaaagtaaaatataataaagcaaagcaaaatggttatattggattttggatttgagagaagaaataatgaaaaattggaatgaaagtggaccagtatttggaaaaaggaaaaatccctaataagctagccgtcctatgaaagttatatacttgtcagtatcatcacatctctaaaaatctaagaacaacatacactgtaacctcttattgtctcctctaaggaagtccaactactctaaccaattaaccatatatttatatataaaactaaagcccctcttatatacccaataaagttcttactactcttcctatgtttcttttttttttttttttcgattctcttttcttttatttaaatttcaattcttggtacaaaacatgatagaattcttctttcatgatcttctctctatttatccatttaaaaaagaaatgaaaaatgaaaaaatcttctctctctagctatatatattgcttatattattttccctataattatgcttaattatgtgaaattgattaatgacttatggcttcgtgccacataattataagatgtgcacattatatatatatattaatacaatctttacaaaaaaaaaaaaaaaaaaattatcaatcctaagtactagagagtataataatttgttaaatatataaaaataattagactgtaaatattttaattaaaaatattaagatgatgccacaaatggtggagcatatatgcatgttaatgttatatcttaaatttatagagatgtaattagctagttaattataaaacttatttatatctatatatgtaatcttattattatattcactaaacatatatagtaatattatatttcatataatctctctttaaatataaaaaggaaccagggtgtttgatcgtatattaattagatctcaaagttgatcatcatgaaccgaatctgttgagtgtattacgaaagggttataaaataacttattaagtgttttaagaaaattctctaaaagaaataattatttacaaaaatataacatttactatttaattttatcaaatgtatatatatatgaattggtgaacggcagtattcaatatcatgttaaatattatatattatgggtacgtaaaatagttttgagtcattcaataataatataaagtataatcagttactccaatattcaaaatatatatttataaatatataaatatatatagatagcttgtaaggcaggcagtatatagtctaaggatcgaaaaaaagatgaatcttctaaagaaaaaaaaaaccaccgacactttctattatgtgccagaaattagggattgttattattgggtcagatctagtcttgttgaatccatatatatatgtaagacccttatcacttttttcttctttgttcttcgtatgatgcatgatatatctttatcttctgcactttgaatctcttttgaattctttgcactaagaatatatcgtcaagctagagactacttactaacattgttaatattaatattccctacgtacgtacatcattatttgaaatggaatatattaatattatgcaatcataactgcacggaaatgattatatatatagctacagtatttattgcatgccctttcttagcccggcctgattccctctatgcaccacgaatatatcttgcccgaaaacagtgtatatatctatacatattacatacaccatatatactatatatatttagcaacctggatctgcatatatatggtagtataaatatattcaaatctttgatctttctctttctatgcttgtgtttaattttttattttttttttgaaagaatgcttgtgctgtgtttaaattagtgatattcttccttaccaaaaaaaactagtgcattcttttgcataagaaaaaaattagtaacaattttttaactataaggattgtgaatatacattgtcaaaaatttatgttaccaaacttattatcttaccattaaaaactcagtacgtatgtgaaattttatttttcaatatgattgggcaaaaatgatttattaatatatatatatatgtgtcacatttctattttaaatttaaagttattgaccaagatttttagtaacagaacaaaaaaaaataagagagatttaaagatattaaataagataaaacattacgattttatgcggttataaattgtgtgtttacagcaatgagagttcctttgagatttttattgcatttttgtgaaggaaaatttataaaaatattagaattttagttaatttttacaaaaatattgtcacactgaaatattttcaaaaatactgtatatttataaaataacattagaacacaaaacagaacaactcaaaactagaacaactaaaaacaaaccctagaacaataacgaaaacttaacacaatatagaatatagtgtcttatataattatccctacaaattttgtgatttttttcgtacatatattttttaagtaatagagtactatcacatcaatttttcaaataatcaactgttattatcgaattaattgttttaaaattatgtagtagtcatatatatatatatactaggtgatcgttacgtgccaagtcacgtactgttagttttatttaatattttaattttttattttaattaataattaaaatagtataatt

SEQ ID NO: 111863 - DNA, 4308 bp, Cannabis sativa
  modified_base (4264)..(4265): a, c, t, g, unknown or other
ccttagcccttcatagtatggggattgaccttatagaatccctccccgggaaagggcagagttaaatatgcaatagttgccatggattatttcacaaagtggacaaaagtagagctaatgaaatccataacaactaaaatagccttggattttgtaatcaaaaatattgtcttccggtacggactacctcataagatagtcttggacaaagacaagcaattttattgtgatgaattcatggagttttgtgacaaatacagagtcatcaagagtttctccgtagtcgcaagacctcaaacaaatggccaagcagaagctattaacaaaatattaaaggtcaccattaagaaaaaaacttttggcttgcaaaaaaaactggccagagaaactacgacacatattatgggcatacaggaccactacaaggacaaccaccagacattccctttttcaatagtatacggatgtgaaacgatgattcctgtggaaagtataatcccctccaatagaagaactacttatgatccagccacaaatcaagccctattgcaagaggcactacatctcgtagaagagttccgggaagagtcccaaatatgcatggcatcatactagaagaaagtggcaaagtatttcaattcaaaattccaagactggaaatttgtaattggggatctggtcttaaagagagtatttcttgtttctcaagagccaggagtgggggtactcgacccaaattgggaaggattgtatgaaatcacagatgaaataggcttcggggcctacaagctaaaatatatggatggatgtttagtcccaagagcataaaatgctgatcacctctgcaaatactatcaatagttaggagtttggtatttaacttcatctttatatttccaagttaaagacacgtattgtgaataaaatgtaatgtttatgttatccttcaaaatatagactaagtgacccaaaatttacttaagtcacttagggggttttagaggaatacatacgcaaggacaagaaaaaatagcaaaacacagttaagtgtatatacttaaaacatttaaaaaagcatgttcaaaaagaaaaagggacaagaaaagctcagggaaaggctatgttaagtgtctccccaacatgcaaaaaataaaaattaaagtattgttctagtggtagtagtaataagagaaagtataggaaaagttgtcaattaatttgccttgggaagaaggcgaggacccacttgatcagccaccatttggttaagtttcttgtttttctcccaaaattgagccaaagcagcctaccagtctcaggatttagcatgaaagtaaggtgagattcaaactcgttcaatttctagcacatgaagactccatcctcgaagcatttacacgatgcttactggtcactagagcaaacaaggcatctctggcagctttcacgacctcctttttggcttggtccctgaactcgcacagctctttaagctacactaacatatttgctatagtttggatgtcaacattatgcaagtcctcaagggtcttgagcttggacgccagtccttggacctcctctcaagcattcaacaagtctatctctgcttgggttagcttggcttgggtagaggcaataatttcatccttggccttcaacgtatcatgatctcgctccctaagagctttctctgacagtgtgtcattttagagagtctccatttggcttttagcctccctaagcttctttaacactccatccatgccgccttgctccaagatagagagtccttgatcgatcaaagtcttgaaaaggtggcatgcctctacataaatctggtaaaataaataattatagggattaataagacaacaaaagtgagtgaaaaactcgaaaggtgttaagtataaacttacagaggtaagggccacacttatgtctttaatttggtagactgggttggaagaatcataaaccgcaaaactctttatgggaagcttaatagttcagctgtaaacttactcaccatctccgaggcaaaaggtgcaagagaaaggcccaagaagcgcttaaactagtcagtcatgggatcaaggttcaaaacccaaacatcactagtgtattcccccagaaaagaccatcttgagcctcccttagccacttttttaaagcctccgcctctgcctctcccttcgttagcttgtcaaaagcatagttgtgttttgcaatgcaaagttagactcgctctttatcaggattggtgggggtcagaaggattacaggtggggtaggaaagtctttaaccttagatgggatcccaaagtcagtgcttggtgcaagattccatgaagacctgggcttcttaagagatttgggattggaaacctcactcttctatttctggtcgagtgggggaaactcctcttcctcttcctcaattagcacaacttcttagttaccaggcacctcttcgcttggacccctggggttcaccaccactgatggaggatcggccacctctgactcagggctatgtgtggcgtttagcatggctaagagagtgggcttcgctattggaaacaaataaagaaaatttaaaaatacgaaatacacaaatcatatataaagagacattaaataagaaatactaatcctaccccgatgtcttaattttgtcttagcaaattcataaattaaagaactggtgtcgtcatctcctaaataactatttgatgggagaaactagcttaaggttatgtagcagaaatgatccaagagaataggaattgggagaccagaacctatttgagaccggtccaagaagccactcgtgttagaaaaagaaaaatccttttccctattaccccgctgagtatagggcatctagaatctatataacctcatgtcaaagccgactgggtgtaagtaagggtactcttgagccgaaggaacaaaacgaaagttcaaagggggcttacaagcaccagaggtaatggctccaggggtcctagagttgggcatcgggaagggaaaacgtagcctggtagacgtagcctctttcctagtcttctcctagccagtctttctagaggcactctgaaggcgtgcataatggttctcctgctctttcttttatcggtaattgtatttttccatagtcgttgtaatgatttccaactaaagcttcttctcagttcccagatttcgagcgttgggaaatgacaccttagataaattaaaaccctcgaccatttgatggcccaggatcagtttagccttgtaatagttaaaggtggtcacaaagtcgccaacattcaggtcctccctcttttaacaagcaaacacattggcgtgattcaagaataattaagtgggggctatcctgtgcaaaggaggaatcctgacctacttggtcacaagttttgggcgttcaaaagctttaattgtattccttaacatttttttgagagttaaaagaaataggggtttcgttggctacatgggcttgcaacttatgaaagccatccttatgaatgtcacccttcttggggacatgtagtagtttgtgaaaatacaaaatttttgtagggctggaagtgacccaacccctagcagcataaaaataaaaaggtctgaaagtaggttgtaagctcgtgggataagttggtatggggtaagtccaataaaaacaaaaaagtctataaagtaatcttaaagcggtatcatggctcctgacatgaggtgggtctgtctccatgctccaaagcccttatagttgtgattgggtgttttatcatctttgggaaaactatggtaaactcctgaactaattggcttgatttcattcttagccacacttttatttagatggtgggcacacgtcaagggcaagtgcaattcatcagcatcccatccgttagaacaataaatgtactttttgtaaggtattggaccttgcataacacatccaaagggacgagcttttgtgctaccttggtcgagggatgattaccaacaggggtagtgttggacggtacttgagaattagacattgcactttttgaatgaagctcaagaatctcctagttgaatcagaaaaaactgtgtttgtgaagatcctgaagaaattcactcatctgaagacaagaaacccaacagttagctcccttgcaaaaacctaagtccaaaaggggaatgtggttccataactgctgggaagaggtgttgggattttatgccctaaatcaaacccatttcaatnnaatctgatttgttatcaataaaagattagaagtcatttatgtt

SEQ ID NO: 111864 - DNA, 5490 bp, Cannabis sativa
gaaagaaagaaagaaaaaaagaaaccactattattttccacttaggactttttgtaccgttccaaataatttaacacttatcatgttgacattatttttgttcatacaataaaattctatttattgttgctggttatgactcaaatgctataataaaaaaatgaggtatttctattaattgtgacattgtcaagtttagtatgcagaagatacattatatatatatactacgatattcaagcagcaaattatcacagtacaatcttttatcagcctttttagtttattgaagagaaaatcccaaagaagccatggttagcctatcaagctcaggttattaccttctattttgcctactaggcttactgcttacccatctcccttctcattcagccgacccagatcctttgcaggacttctgtgtagcaaatcttaatgccactttctctattaatggatatccttgcaaatccgtctcagaaactacttctgaagatttcttctttagtggactaagcaaagaaggtgacacaaatagtaacccttttggattcattgttaccgctgggaatgttaagacgtttccagggctaaacactcttgggctctccatgaatcgagtagactatgccccgggtggtttgaatcctcctcactcacatcctcgtgctaccgagactggcgtggtcatcaaagggaagctcctagttgggtttattacaactgacaatgttttctactccaaggttttgactgttggagagatgtttgtcattcccaggggacttgttcacttccagcgaaatgttggagaaggaaaggccatgagcatcactgccttcaacagtcaattgcctggggctgttgtcattcccacaaatctctttgccacaacaccaccaattcctaatcaagttttgactaaggccttccaagtaggagacgatgtcgtcaacagcataaaatccaagttcggtggttgatttagtggttctcacaaagagaagttttcaagttcgaatcctaaaaaaaaaaaaagaaaaagcaagcttggtagttggtgcttgatttactgcccaaagatttatttgtttgttacatgttctcttgatttgtttctctccaagtgtatctttgcttcattacttcttttatgcatgtacagtggaaatagtccttactgaacaatgtacgagctatgtcacttttggcttcagtcttttacttttacatccttaaacttaaagaataaattcaaataaaacattggctttacatattggatacatgacttgtctagtatatcattcattaagctgtaaggcttcagaatatttgcagcttgactttttaacacaacaattaaatctctattgacataatttttacttattgaagattcagattccctaccttaatttctggattataactttaatagcctagaagattgtacagaaaaaagttatagaatttggaacaaaagatctagataaaacttgaaagaacagtctttactcagctaaatttaacaaattttctataggtactgatacagcaagagtacagagtatccagtcagatggtacatagggagattagatgaattctactatctatcgtattacaatgataagaatggtcataacattaagaaacacattttcgcatcaaatacagaaataatcaaacaagttccaaacagattaagaaagaagaactcaagaatggtcgtcttatgtttgtcgatcgaaactaccaccaacctgcatatgcagccattcgggcggtgagccttgagcataatcccttggtgcttgtgaaccaaataacgatcctgcagcatcaaatgcctgcagaccaatctgagatacaactttatcaggtaagaaatcaagccacttcaaagcattctgttgaaataaattgtgatccataaatgaaccatgcatttattacacatcaaataaatgaatgacagggataagattgcatgacatagggcggcccaagcccctaccttcgtagtcctagttgacttttcattagttacccatttattatcaactagttattacttaccttgagctgccattaaaagactgcaaacaagtttctttccatacaaaataaggcacacaaataaatcagaagagattttgaggaacggaagaacatctaaatgaggaaatggcaatggaattattgctgtttaagtaagttgacatgttaaaattaacttctattacctctagtctaggacacaagtcccagtctaatgtatatgcaattaacacgtgttttgagtccaagactgcgtatcatcgggagtcgtagggggagccacagaataaaaatcagagtttttttacgaagaaaaagaaaatgtcaatgttcatgaaaagctttgttatgtctataccaaaactacaaacacgggggcctgagaaaagaaagaaattgtatttccaaaggttcagattcaagactaataataaaggaacgggtcaaacaattttacgcaaattgtttgccttttctttttatgttcttaaattgttactttctacagatgaagacagaattatacctatttgcaatcttattgggatgaaattaacagatttgaacatacacttctgacaaaaccgataaaataaactagatttaaaaaactatctcatctttcttgcactcaatgtgaaggaaaagaaaatgtaattcaatatatatatacatatatttatatatataagcatatacccttacatcttttgacgaaaagccttcaatggtaggactcaaagtcatcctcgaatttactgtttctagcttcattgacagaaactataacaaaagaaaaggttcaattaatttagaaagatttgagtaaagaatatcatgttttaaagtaacaattcaaacattaattttaggcaatacctcaacttggcgctgcagagattggatgtaattaattatctcatcaagaacaagtgctttaccaataacctattaaacaaaaaagtatacaacaccagagcaacgtgtaagatacaaagtgaagctgcaattgagagatccaatatattatatatgaataatatgaatatgaaaaatcaataaaaataagcagatccaggttatgtacaaagacaccaattccattattggtttcccaggctcaactatgtggcatctaccaacacatactaaagtaatctaatagaacaaattagatcaaatatcaactaccttgttacatccaggaaccaaatcttgtaaaatcttcatcctttcactaattttttctcttcttgcctgccaaataaagaatatgagaacatgtttccaggcacagtatatatttgactgagcaagtgaatcacacaagaactgaaactattgttcaacatagatttagagctagattaaaggcttaaaagtgtttaaagtaaattcaaaatgactaaagatgtattactctttctgcaagactatgactatcagtagcttggccccttcttgctctaacgtgaatataatcttgtttgggcggctcagaaggtatacttgcttgttcacctggcttatcaccaaccactgaactagattcaacttcaacttttgaagcaccattttcatgtttggatcctgataatttcgtcctcttaccatttgagttattctgttacaagaaaagaaaacatgaaattcacagaaaaacatctcatgagaaagttccaaagtaagatttaacatatatgaataaactaaatcacaaaacccaattcatgtttactctcataagcctaaaaatgattcacagtatcacacaagtctcaaatttattatagctgaaaggaaaacagaaatgaaacataaatatgtgatcaagtatctaaaggagctacatattaccaattcaattcacgagaataattttaacaagaacaaatatccaaatttgaatagcatttccttctttttaagggtgcaatgaagtagtagagattttccatatacgactaaaaaaacaatacaataactttctaaaagacgaaccaattcattggcactactagtggagaccacctttgaagactcatcctcagagctcacatccctcctcttccttccaccaccaccgccactctgcccagttacagtggattccttcatcgacccatctcgattcccggagctctctccaagcccacttgggttttggctcatatggctcattcgaaggcccagcccggaaacgccaccaggttctccgccaaatggccaaatctcggccaaactataggaagatgggttggcagcagagaatgaagattcgtttatgaatgtaggatccattttcaaagaccccaaaattcatcaaaacgataacaaccggggttgtagaattcgaatccgaacacgaagcttccaacaatggccagcagaataactaaaaatgggttctcttttttgggtgtttaaggtagtggggagtgtaagaactggctaacactgagttagtggaggtatttaaggagtaataaaaagagacgagagctgggtcattttcaagaaagagacacaagcattaatcaaacgatgttgagagagagagagagagagagaggaggaagaagaagaagcagagacgagcagagagtgatccttttagccagagtagatgggaagaggagtgcgcaatgcgcttctttacatctttcggtcaaagcagtgagctagagagagattgggctcgtttggcaacttggttaacagagtccttttctggtgcaattttatagccgataatcgaataagaacaaatccaaacaacattttctttaatttttttttttagaaaaaatgattaattggtgcatatcccatcggcattcctaaaagaactatatgttagttataagggttttatactttttcttatgttagttattggtattataccttatgagaattcctatctcatagatgatttactgcatcgagctaacctttaaggatcaaacataatccttgacggagtgatgcccacttcggaaactaacgagcgtactacgccttttaagaagaggaaatttgagggcttcacttcactgtgcactagacctcacaaaatagttagaagacacccgaatgttgttagagacttcccttggaacactagggagagggaccttgaatcgagggcagagtttgatgatctttcagaagaaccttctgaagagccttctggtgaaatctctagttcaccgagctgcaataatggtgttaggaggagtcatctgattggctctttcgtaattgaagaatctggctccagcttatctgttcactcacttatccctgtggaggagaatgtcaactctcttctacaggagccatgagaggtgttgcttgtaactgtagagggttggggcagacctctacagttcgcgaactgaagtccctgctcagatcgcgctc

SEQ ID NO: 111865 - DNA, 1779 bp, Cannabis sativa
aataatttaaagaatcaatttaagaatattaataaataaattaatcatatttataagataaatatggactcatcagctaccaaaatataagatgcacctaagggagagttatacaatgttgtttgcaagctcaagaagtctttatatggcttgacgcaagcctctagatagtggtttgaaaacttctccactgcccttgaagaagaatattttaaccattctacaacagatcactccttcttcatcaaacatttcaggtctagtttcaaagccttacttgtatatgttgatgatgcgattcttgttagcaataatttggatgagtttaaaactttgaaagtcaaattgaatagcatattcaaattaaaagacttgtgaaagttgaaatatttctttggtctagaaactggctagatcagatcaaggtcatctctcaaagaccttatgcacttcaagtcctagaagatctatgctacttaggttgcaagcatatgaacacacctatggaagccaacttgaaactcagccaaaacatcaaagatgatgctcttgctgatgcaaccttgtatagataaatgattaggatgttgtagtacctcacgatcaccaggtcaaacctgtcctttgtggttaacaacttgagtcagttcttagggacacctcgaatgactaacatggtagctgctcaaagagtattacaatatgtgaaatgaactcctcaacatagattgttcttctctgcttaagttccaaagtcaagtcaaaagcctaattctgactgggttgcttgtgtgaatacaaggagatcaacaattggattctgtatttccttagaagctcattaatttcatagaaaagcaagaaacaacacaaagtttcgagatcatcaacaatacagagcaatggctaacactaccttataaattttttagctcctgtcaatttgtaaagagttacagattgaacataaagaacatgtaatgctacattgtgacaacaaggtagctcaacatataactccaaatcctatttttcatgaaaggacaaagcatattaaaatagattgtcacttagtgtggaaaaaggttcaacataggctaataaaaataactcacatatcaactaaagagcaaattactgacattttttacaaagactttatttcttactcaatttcattttctaaaagacaatacaggtttgataaatatctgcactccattccatcttgagggggactattaaaaattagctataatttctgttgtaactttagtctatatcagggccggccctaggcatagacgggctagggtcgcgcctagggcccactcattttaggggcccaaataaaaataaaatactttttaaaaaagatatatatattttttaaataatttataaaaataccatttatctttatagtaagggttaaaaaaaaaattttttgccatttcaactcagggtcgccctggactatatttaatgaagttcaccttctttggtctctatttgttttctcattcctagaactaaaattatcaaaactcgtaacttaataatttctattaagaaaaaaagaacataaaataacttttctatctatattaaaaataatataaataaataaaaacataatttttgcacatctaataaagcaataaaatatcgggatttttacatagtatactgtatttttgcattttattacttttatactgctatacggtagaaattacaaaaatactgtacatttatactatcttttatactgccata

SEQ ID NO: 111866 - DNA, 9050 bp, Cannabis sativa
  modified_base (4825)..(4828): a, c, t, g, unknown or other
  modified_base (8949)..(8951): a, c, t, g, unknown or other
gttcgggggaatttttaacggtcaaaaaagttcagggggcacgatttggttcatgtcaaagttcagggggaaaaattactaattagccaaaaattaatgataaattacaatatcataactgaaatctatatcatgatttgggcttattgtattttccaattatcttaatcaaataactcaattgcctttcaatatatttttatttttaccacaactaattaaatatttttataaataaataataaactagaattattaggaaaatactgataacaaaaataaaaaaatcatttaattttatctgaatgacttatcaaatttagttacagtccaattaaattgaattaaattatatttattgattttacatagttaaataatttctatattttatttaaatttctgttttaagttaaacatataactattgactggatttttagccaatcgatgtggaatcataataaatgagatttaaactaaaatcgtaacaataaatataattaatgataccaaattttacaataaatgtaaataaagagactgaatttaaagaggttcagctccagttgtcggtaatagcttactccccttgtgttttattaatcagggatgcaaaagtcaagaacaggctcttaaatgcaaagaataaaagattatttttctctaagtgctcaaaattgcgaattcccctcccaagttatgagtgaccccttatataggggaaaaggtcggtgcttctcgcttcagaagacgcgaccaacgcgaagttatctcaaccgtctccttgattttcgaaggtagttaaaatctaatttttatgataatatcccgttatttttgtgagtttataactgtctttgagcttcatgtgggatttgaacatttgaactagtcaatgacaacaagggtcacccaagggtgtgacacggtcgttaaccaccttcgaggatagaagctaacacctggggtgatatcctcgagaccaaacatgagaagggtgccaattgtcatgacgagatgacccccgagacccctttcacgttgtgggtagtcatagtatcgtgtggatgtcctcatctacctttgagaatgtcattatgtctatagtgggagtagtgtcatttaccccctagactaatttagcctatagctgtgtggtggttgtgtatcccacttatgaagtcgttagtctatcaatttatcttcttagagacacccaccttactcgagctaggggtaaaggcgactgtcagatttctattccaacggtcatggtcacccatcatgattaacggtcaccacattggtcatgattttacatattcttcattaatttagtctcagtattttcgtgtcacatgttattactcttgacacgtcatcgtcgttaaaatttgagtaaacgataacatttaaataattataaattaatttaattttataatcaaaattaatttattctctctaaacatatcctattatgtttttctctgcttaatacaaaattacaaaattgaccttgtaaattttttttttctatttgtgacttaatacaatagtttgagcttgtttataaaaattgtttaaagacattgtagggaccatggatccatgaattcaagctccaataaacgttaataaaaatttaccaagtaaactacaacaaaaaatgttattaggaatgatttttttattccagaaaacctccaaagttgttcccggagattatttggcataacttatcattcctgatattttattcctgataatttgtacttgaaaattgatattaggaacaaaatatagcattgtgtctatgctaaaatatctgaaacgaaaatgagttgttccagaaaattaagccagcaacttgttttttacacattattagaaatgattgttttgtaatctggaataaaaatatcattcctagtgtcatttttcagaataattaaatttatttaaagtgatttttttaaatatcacattttttttctactaaataatttcttaaaaaattaaatatgtttatatttaataataaaatagttcatacattgctatatatttaaaagatttcgtaaatgttcatactaacaaaagtaataaattagaattgtaagatgtggaatcattatcaccaccaccattatcattccctccagtttgttgtgaaggtgtaggttgtactcctgggatctgcggtggttggtatgacatcgacatcatttgtggcattgtgacatcatctatggcatatgtgacgtctgaggtattacctacgacatcatctgcattatatgcggtgactgtgatatcatctgcatgaacatctagaacatatgtaactgcaacatatgatgaagatatagaaaaaatgacatgaggctaccatgacagttacccatgccgaaaagctctgtaaacaagtggaataatcaattgatgttcggatttttcttttgaataggataatcaagtaaaagtgaaacttcacttacctgatgtttttttttatcaatcacttacctgatgttttctttgcacgcttgttgttttgatatttttttcaagtgatgataccaattattagcaggattaggcaaaaaaaaaattgaaatagaaatgccaaccccactaggtattttattttgtgaattaggttttctaaagactacaattgtaacaccctactagtttaggcgtattatcgtgattttatattaattgtgcaatccgttgctaatgaacgagtttattgaaaatcataatttattaaaactttaatttaattactccttaaatgaaaataaatatcctttacataatctggatctcatacttaaaatatttagaaacataataccaaacattcaatacaaaagttgtcgcctagcgaccattcaaaatacaacatgttgtcccaaagatcgtatgctccaagtctaaccgccccaacatgtacaatcttcatccgcttccactcactgttgttcaacatagctttgcccttacctacacatacatacaataattgtgagtcgacaaactcagtaaaaaaagtataatcataacatagatataaaccggattacaattaggcacccatacatcaaaccataacccttccccgcgtcttacacagtactgagtcaagaacgttcatacaacaatactattgaccataatatcaacctatactcggtactctagtcgtaccgatgtgataatgtcaaatagtacttaagccaacatacattcatcgctatccagtatagctctatgtatactgatattgctattctaatgtaatctaacaggtaatcataaacatgtatgctaaatatgtattcacatatacatattattatactaatcttacttcaatttcaaattcaggtgtgtcggtcaacttgagtagaattgctgctcgacgatttataggcccctaagttattcgtaaaaactagtgagtgacacgctaaatcacttttcagggacttaaaatcaaaactaaaagtttccctatcgatggataatatgacaataccctaaatattgtaaaaataggaaaatctagagtgccctaaattgccccaactggtagaccggtttcccaactggaaagccagttttgtggggtctgcttgggaatggaccaaaattttgattcctacaggtccatacagaatcggtcgactggttcagtgcagaaatcccaaaaactttttaagcaaaccaaatcgatcccaaatgaattcaaaccttccagaccacctatttaaaccacaacaagttaattaaagcagtaaaacctaataacacccatcgaaacacaaatcaccattgaacagcaaagtttgagctctaaaactcaaaccttgctcaaacacaacaccaagcatcaattctaacttaaatcagctcaataacccttaatttaacttgagaatacccaaacaatacctacaacaaccctaaactcaaattcatgcagaaaacccaactccaaacataaaaattcaaggagaagggaataaagaggcttaccttgagttgaatccctaaagttccaatagaattatcggcttaagcttagaaaaacttgagaatacaaaattcagtagtgttgggcaaaatcatagtttaaacctagtaactcaatattaaatccaatttgtacatcataaaaaaattattttaaaatgggatattggcggcaaaactacctgaattttatattttttaacacttaacaacaaaagaaaaaaatttgacaacaaaacctactgaactcccattctattttgctcttcatacttttgtaaaaaatctcagttgagtgtacacgtagcaaatttttagtggtctacataatattaatttttaaaaataagtataaaatatagtttaaaaattatataaaaaaaaagatattttattttatttttttctttttttcctaaaaccctaatttgataacgtatcttccttctccttcttcaactccattgtcactaccaccacagtcactaccactaaagctactactaaaaccaccaccacaaatcacaaaaaaaatattaccacaaataacaacaaccaccacaactttaacctaaatccaaaattataaacgaaatttggacccagaagtgttcaattgggatctaaaacttttcaactatggggaaacaaaattgagctttgattggctcaatgggacccagagatggctcaattggagttgtggtgcttcgactccaacgaagtcaaccacgaagagagaaagtagaagagacggagagagagagagagagannnngagagagagagagagagaacctgggaggaagaagattgagagagagaaagagatggtaaatcgagagaaagatatagagggtagatcgagagagagaagacacacgtggagcttcagctccagtgaggtccaccacaaagagagagaaagagagggcctaggaaggagaagattgaaagagaaagagagggcagatggctcaagagaaagagggagcttcggtgagaacctaggtgcttcagctccggcaaggtcctaagcggcgaggtccaaaacaaagagaccaaagagagaaagagagggtctaggagggagagctgagagagagaaagagaaatttaggattttagaaagtttatgaaagaaaaaagaagaaaaaaaaagtaaaaaagttttaattttttttttctaatttttaaattttttaaatatttacaattatttttaaaattaatattacgtaaaccattaaaaaattttcactcgtacacacatatacacgcggacagtctattgtggaacttaattgaggttttttcacagaagtgtaaagagcaaaacggaatgagagtttagtaggttttgccatcaaaattttagtttctgcggttaagtgttaaaaaatataaagtttaggtagtttttctgttaatattctttcaaaattattattactaaaaaaatcatattttaaaaaaataagttttatgccaaattaaagccgtaaaattaaatgaacaagctcatgataccaattgttaaaatttaaaacacattgatcgtgctattatcgataattatcaatacaaaacatatcatccaagattaaatatttaattttagagcattaactttaaaattagcaaatatacctcatttaatatttagtgttgaatcttcaagagctatgaccactgttgatttcataaacctctttgatctacacatatagaaaaacaagaaagcttgggcataatgaaaactactcttctattctctcaacatggccacacctattccaccttaatcacttatatagaccacttttgtgaggaatcatgggccaaatgggcctacatgtccaatgggagagaatcaattgtcaagtcccaatgggtgaccaaaaatattttagagcgtgtccatgaccctaagtatgttatcgattatataattattttaataccgacactgtgtgagcaacaattaattatatttgttcacataaaatatactaaagtgatcatttaagcatatgaaaaaattacaataatattgaaaaagcattacggtagaatttattataatatatgctttagtataagtggaaaaatgtatcatagcaaggatcatcacctaaacaaccttaattaatctttcataaagtatattatgatccgctttttataatacttgtattatggaaaactttatttattgcagtgatattgtggttgatatgtaccatttgttcttttactcatatctgtttttcttcccattttctagaaaaaaaaaatgaattgtacaccataagagatgataagtaaacaaagattatgaggagtactatcatcattagcttttgtttttctttgtttagatgacaataattaaagaatttggatgaaataatttaggcctttaaattgagattaattccttgaattctctgttattctcatagagtcctctaaaagaagatttaacattatatatcaattgcataattgataaatgaaaacaacacaatttagataatgataaagcatactaatacaattataactaagtttgtaagttgataagtgaaaacaacaccattagacaatgataaagcatattaatacaacaactcagtttgtaattttctcttctgtgttggataatgcattctcaaatgtgatgtcgaaagtcaaaccagagttcaaagtgaaaaactaaaggcattttcccatcataataacacaaataattattttgtccaagcagattgtaagtcattctaatatattgtattactatggtgtatatgtaattttggtgtaagatggtgtcagctaaacatcacttgtcgcatcatgtattctttttaaaaattacttatttgctgttgttattttatacatattggagggtattataaggtgaagatataccatttcccttctgtgttttctccagtttagtcactgttaggaaattctttacatgaagtgattagtttgaggttgttagtctgtttgagtttgcctaagggcatttccggaatctgtagcgatctgttatgcaatattattatatattcggcatgggaagccatgcatgtacatacatatatatatatatatatatatatcatataaagctctgagtgttccaaaatgtattaggactttcattatattcaaaggagtaatgtccaaaaggatcagcagtagtagcaacgtggtcgtctggttggagtaacatgagtaggtcatcattgtcataataattgggttggaatagtacgacgtcatttgatgaagtagcagctggcatagtaatattgagtcgggtggtcgggtcagcaccccgggtgatggatggattaggagatttatcatgatgatgaacatttgtataagtattttgggtcaaattttggatttgctcagtcaaacggggtattaagacgttgcccataatgtctctgaattgttgactattgacctcacatttcagttgctttgcttgcttttgaactctgcttctccaatagttctttatttggttgtctgttcttccaggaagcaattccgcaatcttagaccaactgttagttatataaatatattcattcattacaatacatataacatactataatagtgggcaagactattgactattgagcaatatttatattttgtgctttaattagttgatcatgtgtggggatgcctctacaatcattttgcaatgtttcatcttgttttatttcttttttgtgtgttcagaattttcggacaactctgagaatatgcttcagatttggtcaaaatatcatggtattaattctaacgtatgtatgagattttctattattatagattttaaaatatagttaacattatctattactgcagtacttaagagtttatttgtttatatattgccgggttacaggttcaaaacatggcacttattccttatttcttttgtgtatttagaattttaacagttactaatatattctcctttaatattctttacactttagaagtgatttttttttttattttacaaaattgtaatattgctttatatattttgttaacattttgtgtttatttacttccctattaaaattttaaattgtatttttctaaaatactgttatatatttaaaatgaaaactaagcgcaaaaaaaacaaaaacaaaaacaaaactaagcacacacgtaatctaaagataaaaccaagaatataatttattataggtaacattaacttgatatattaaatgtctttgtaaaacaaaaagtgttgttctttttttaaaacgctcaaattttaactcactacatatatttcttttatcttttatctttaaaatattacaatttaaagttaaactcaccatacatatctctattatcttttattttatattaattatgactatgtgtctgtttggcacaattatgttgtggaaaaaagcagttgtagtagtgttgtgagaaaaaacagttgtaacaatactatgagaaaaaacagcagtaagagaattatagaaaaaaattgacctgagaatttgataattataaattttaaagtgtggtgagtttttaagattctataataataataattttataatctagtttattataatcacaaatatacaaaaaaaaaaaattatatattttttaattcttttttctccacaatattaatttatatgcatttgataaaaaaataatttatattattgttaaattatatttttatcacttgtaaaaaaatattctagtttataagtaaatctaagttgatggaatttgttaactaataataaaaatacaaatataaatataaaatactataacacaaaataaaagggaaatttgattttnnntgcttacatttggttaaaaaaaaatttctaaataaataataactaatatttgtaaaatatgacaatttttatgatatccctaaaatacccctatttaca

SEQ ID NO: 111867 - DNA, 2676 bp, Cannabis sativa
ggcataaaacccaacagaaagtacttcaaatctcctagatccttgagtttgaacatcattcaatttgatcttgagaacttctatgtccttgagattcttgctagcaagtatgccatcatctacacaaaccagtaagatgatgataatggtaggagagtgcttgataaacattaaatggtatgttgtagagcgtgaaaaaccttcctctgttaaagctgtagaaaacttttcaaattactgtctagaggcctgctttaaaccatacaatgatttttgaagcttgcaaacaacatttggtggtaatggattctccccattaggactataccctggagatagagtcatataaacatcttcatgaaggtctcatgaagaaatgaattgttaacatcaagctggtgtaagaacaaaccatgaacaactactaaggctaggataagtttgacagaaactaattttgtggctggggcaaatgtgtctgagtaatctatgccttcaagttgattgtactctttagccacaagtctagctttgaatctctctactgagccatctgcattgtacttaatcttataaacccacttacaaccaatcacatgttgctctgcaggtaggtaggctaaccacaatccaagtgtagtttttctccaaggcatcaatttcagtgtctattgcatggtcccacttaggaatgcctttagcttgactaaaacagaaaggctcttgatggctagagatggacaggacaacaactcaaaatttgggagatagcctggagtaatcaagcaccttcgataaggagtgtgtagtggctggcatgttatcttgtgaggaaacatagagattgtgagaagccagataacagtggtaatcatttaagtatgaaggctttgtgatatgtttagatggcctaacagtctcgggtgttgcagcatgatcaggcacaagattgtcaaaatgaatggaggaatgagatgaggaagacattgatgcaagaaatttttttttagtattctgatggcaaaacatcagtattgacaaaaggaaaaatggcttcatgaaagacaacatcactaaaaaaaaaattcgattggtgtttaaatccaaaagtttatatgctttcatgccagtaggataccctaaataaaatacaaggtgtagacctcagtgtgaacttggatctgccctaagattagaagcatatgctaggcatctaaaagctctaaaatgttcataagatgggggtttggaatgcaaaatatcgaaaggtgttttgagctttaaattgggagttggtgttttattgataatataagcagtagtagcaacacattcattctaataagatgaaggaatgtatgatttaaacaataaagctcttgcaacattcaagaggtattgatgctttctttcaactacaaaattttgttggggtctttgtacgcatgagtgatagtgaacaatacctaaagagctaaatttttttgtaaattataactctttggcattattagatcttatatatgcctttgatttaccaaattgagttttaataagctataaaaaattgggaatgaccttctgagctttagatttagttttgatgaaatgaaccctgtgtatatactatgatcattaataatagtaatgaagtatttgcaaccatcaatagtaggagtattaaaaggatcctaaatatcaatatggattaagtcaaaaattgcagtagtaacattgtgattagacacaaatggtaactttttttatttaacataatgacactcaaaacaatgaaagtcattagaaatatttgaatttaattgcaaggctttattcagagaatgagttttgatacaagatgaatgccctaatctgtaatcccaaactgtacttggtgttatttttgaatcataaattgaaaaaacaaaaggaatgttgttgacaatatcagaattcaaatagtaaagcctgcctattctttcacccatcccaatcatcaacttccttaaattgttctgtatttcaccataacaggaataaaagttgaaagaatagtcaccagagttagtaagagaaatcatagaaagaagattacaataaaattctagcacatgaagaatattaaacaaagacagattaggtaagaaatctagaaatctacaagcccgagctataagtctattgatagctacctagaaatctagcagtctcgatgggtctggaggaggagtcgttagttttgggggtggtgctccaaggttctttcatgcttaaatccaaagtaaaaggcaaaggtactagtcaaaataatgtttcattcactagaagaggtttatcttttttctctctcaaagagtctggattcaaaatggaaaagaggtaaaagtggtgaatagaaattttgtgctctatttataagggaagagctgacgatttgtgtgccccttatattaatggcccagattacatcccaaaaaatacaaaataaatccaacgatctaggagtagaaaggttgacattgaatgcaacccatgcgaatcgtggtggtttcaattatagtatttttataggtatgctggcatgattcaaccgtcatcacgccacttctaaaaaactctaaattcccgtcggttttatactgtcaggtaaaaaattcccgacagttcataaaaccg

SEQ ID NO: 111868 - DNA, 2155 bp, Cannabis sativa
attataaaataaataaaagttttcgctaagtttaattatttatttatttttttccataaaaaaaactgatagaagttaaagtcaaataaagtcatgtattttacaaaagaatattgttattaagctccttaataaggtgtttaatacttaataattttttatataatttattaaatcgaaatatgcagatctaatattgaattgcaaaataaaaaaaaatgtcctaactcctaacatttctcattttagaaaagggtttaatggaaaatttattaggataagttgagaaatatttttttttatatcaattaattaaaaatattttatattatattttattaaaatttacttatttttatgagtgagttgtctaatataattttatccttcactgaagtgtaacacataatttatattaatttaaaaagtataataaaaatatcatttataaaaatgagtatatcttaaaaaatataaaaataaaagtaaaaaattaaaataaataaaataaaatagatatacaatgcaatttctacacacaattattgtggtaggacacttctgctctactaagacaaaaacctaataattgactccagccagattttttttcctttttttggaagctgtaaattaaattgcaatgacctatcttttgtttgttattttatagaattaatgacctgtttgtatggtatactgtatttaattttatatgaaaggatcattgtcatgttcttgaaaaaaataataataaaattttgttgtcatttatctaatttgacaatttgtaattgggagtatcttattgttagtgtcgtatcaatatcaatcagaattagaaattaatatattagatatggtaacgtgtataattattttattataaaatatttatgtatagagatagtggagtatggtatggttagaataggagttaagtgagcccatgatctttagttttcactcatatcaagtttctctgcaactctttgaaaaaatgagtttcaatacagcacacgagtacgaacataaaatgaattttatgagttaagattagaaaaattaagtaaaaggaacaaacacatcaacataacttgacatgaaataaaaatatattaaatacgtgatgtgcttaatttggatttgacataattttttaaataaaataaaataacaaattgttaataataataataataatataattttgtaaaagtattaatttaattttctttaatatgaaattgattttttttaaaaaaatatagatctatatattaaaagacagagtaagttaatataaatacgattcgattttttacaaattaaattagaattgaaaaaattaaatgtgagtcaaaaataaatcaacacatttaactcaaaatatatatgttgagaattatgagttctatttcaaaaccaattggtaatgaattgagtagctcatgttcttatatacagctcaatattttgccgagtggacatgtgtgtataggtgcggatcaaatatgatcacttgtccggaaagaatatggctctaataccatattgaaaattatggggttctatctcaaaattaattaacaatgagtggagtagctcatgttcttatatatagctcaatactttattatttatttcataggagacaatgtccacaataatatataaagtagttcaattaaaatataataccaattcagcatgcgacacattttatcacctctaactgcttgctacaatattttctattttctttctttgagggaggtagctccctttgccacaatactatcaactactcttgatttttcttttcattctttggctttgagtggtattccagatattaaaggaaaaagaaaaatctccgccacgtcactagcaagtaagaccaaatgagcatttacaatcacgaattcaacactaggggtcccaaaacccacaacagggcagctaccctagcctcttctcccaaagccttagataataaactgagacttggcccattttgaaatttattggactgttctcaaacttctctgtcaaaaactcattgtcctactcacttaagtttcttgggttttttttttttttttttttttttttttcactctcttctttatcaagttctctctatttctctcca

SEQ ID NO: 111869 - DNA, 1648 bp, Cannabis sativa
cttccttgttcgtttagaagactgagaatttgatacatgaccaccagcagtaatagtagaaattctatgaccctggctatacggtgatgcaggagacctccagctctgttttctcctactatcgtagaagtccccaagatcctctgtcatccatctacctcgataattaccagccggtgttgctggagacctccaactattatttctgccgttgtcataagagaagtccacaggatcatccattatccatccacctctatgtttcgacttttgcggtgtagtaacacttggttcatgatggtgagattttttctttttatgagcagccttgccaaggtcatgaggagcagacgcgaattgctttttgtgtttctgttctctgtgaactctcaaagttggggtggatggttcccggtcccttttacccaccttcaaaagtagataaggcgtcaatgcatttgttttaccaaagttagtgagagagaaaaagaactagactggcacaccaacaattgttcaatctacactaatactaacctgataagagtttgtgcactctcgtgcgaaatgaccaccttccccacacctaaagcacgagctagccacagcattagctcctgtggtttcaccatatatccctgtgcaggactgcatgacaaggactcgtttagtttaacagtttttatatataatatgcaaaatttgcaagttgggtgaactagtttggtgcctttgagtccttgacaatcacaagagcatatatgtggatggaagaccttaagaaaaagaaaaaatgcaaataaatagaaccatataaaacctatcttaacttgcaagatgtttaagagttctgagctcataagtaatttcacggcaaattaagagggactaaaaaaatatataattatatgtatagcataaagaaagacagacagagagaactcctaataacatgaattgatgatggagaacatcacagcacaagcattgtacattcagtacttaccaagccggtatgtcccacttgaccacatctgtaacaagaaactacgttttgacaagaatccgcatacttgacacaacataaatgccccacttttttgcaaacataacaacaaatttcctgctcacaaaaaccaccaaggaagccaaaaagatcaaagttataaaactaaaattaaatacatatcatgagctctacaaaattctatcaacttatatgcaaaacatgcaataaaccttgagatcatcatgttcataatcattccagcatgaaaacatatcatgtccaccatatccacactttaaacatatatttgatctcgtggagctacccttatacttatcaggacagtccttagcacggtgcccactctttctgcaggtaaagcaatcttgtccctataaaaataagttcaaacagtaagaagagggaaaagaaagtatcgaatgacaatcggtgaatcacaaaatatttcaatgattagttcaatggattttaaatattatttcacaaagcaatcaatattgtgatataaggaaccagaaaagagaaagagatagcttgaattataaataacaaaaataagcccacttaggtggcgtttggatggaggtaataaagtggaatggaaaggaaacaatcttc

SEQ ID NO: 111870 - DNA, 8138 bp, Cannabis sativa
acttgcgtgagatactacttgatacgtacacttgcgtaataaacagaattttcgtaacagctgcagttgataatggggttacagtaggatgttttaacaaagaattagtcttcagtttcaaggtgaaaggccgaggaaaaaggagaagtcaagcctcagaatctcaatccccttccttgtgtgtcttcaagggtatttataggctaatcccttcacatgggccacccttgatggatgttcatagggatggaccctcattgttggattggtaggtggcttattttccatgtggtctttatcgatgtcaggttgtactagctgtactggtggtgctctggacgcgtgggctgagctttcgcaggttaaaggcgtaccccgaacaagtgtatcttggttgaagatccatattcctcgcgggagcatggggtttcgacttctagagtggagtgagtcgttggctcacgggcgtctttcttgtggcccgcatccaggaagacttaccttgcgaaaaccagttccgcaagattagggctcttaccctcccggagcacggagcaaggcacttgagcagccttacagatttcttgactttttcttgattaatttccatgtgtcatgcttgcaaaaatgtggataacaattacatatcgacctagtcatgcataatctaattacacacagtaccttcactacatgtccatctacatatgtgatccgaacaaaatcaaacacactaaaagtatagtgtatagtaaagtgtacttagcaattccatattagagattcccaaaactataatacattatagatttgttttcttcatatcgtataatcttatttctcttgtacatccttacaaggttatacttttttcatatgaataaggaatttttagatatttaataattatactcttataattaatatatcatttatcttataactagggaactaagctttgcttcgcacagtgttacctaatatttattaccttttgatattgttatttttttgaattaatttagtggtataatataaaatatgacattattgtattattgtgtttgaattattaaataaataaatagagtagtagaataaaattcagtaatgtgtagaaagatgtggttgtttttgacaaataaaaaaatatggaattaatgtttttttataattaaattaatgaaaatgagaacaactcaaccaaatttagaaaaaaaagaaacaaaagaaacaaattcaaaacgatttaagtgctatttatgaaattttatacttttttttggtgtcgttggaattccttctccatataggtgacagaaaatttgagtggaatgaagagtgtgaggaagcatttaaaggaatgaagaaacacctttccacacctccagttttggctaaaccaattactgggaaaacattgttcctttatttggatgtctcagaaaatgccataagtgcagcattagtgcgagaagaaggcaagaactagcaacgtatttactatataagtaaaaggttactgggggcacaatcgagatacccacctctagaaaaactcgcactctacttgatacgtgcatctcgcaaaatgcaatcatattttcaaacacatcctattaaggtcctaacaaatcaaccattacgtcatgtactatcaaaatctaatgcatcaggaagattaattaaatggtcgattgagttaggaaaattcaaagtaacttaccacttgaggacttcaatcaaagcacaggctttaactgacttttcaatataagtaattaactcaagagaagactccaaaatagaaaatgaaatagaaacatggaaacttttagttgatggggcttcaaacgagaatggcttgggggcaggagtagtagtggtatcgccagaaagcttcaaattccattatgcacttaggttttagtttgaaactttgaataatgagagtattaagccttgttagtaggatatagaataaccgagacactaaaaatcaagaacatcaggtgcttcagtgattcgcaattaatatagtaaatcaagtcttgggagattaccaagcaaagggcctaaaaagggccaaatacttagagaaagttcgaaaaaatttagagaagtttgattatttcaaaataaaaaaaaatccaagagaataaaactctaatgtagatgccttagcaaaactggcatctcagtttgatctcgataaatttaacttggttctagtggaggtactagacgagccaagtatatgtgagaaggaagatgttgacatgatagatgcgaggcctacatggatgacaccaatcatcaagtatctattaaatggagaacttcccatagataaaactaaggcacgaaaactcttatatttgattcctcgctacacaatggtcgaaggaaaattatataggaggatattccatgcctcttctatgatgtgtgttaccaacagagactaatgaaataattaaagaaattcatgaaggtttctgtggaaatcacataggttggcaaagcctatcaaaaaagataatccgtcaaggatattactagccaactatcaatagagacacacacgagtttgttaagagatgcgataagtgccaacagttctcacatctacctcgagtaccacccatcgaattaagaatgatgacctcgccatatccatttgaaatatgggagattgacctgattggatccctacccacaggtcgaggtggcacaaaatatgctattatggcatatgacttcttcacaaaatggatagaagttgaaccattagtatccattacattcaagaaggttcttgattttgttatcaagaacattatttgtaggtttggtattctaattaagatagtatctaacaacggtactcaatttgatggagatttattcactgagttctgtgaaaggaataaaataattaaaagcttctcgtcattgtcaaggccttaagcaaagagacaagtagaagctgttaataaaaccttgaagcataatataaagaagaagttagatgccgcgaaaggaagatggattgatgagctaccacaagtgctctgggcccatagaaccatggagaaaatatcaataggacacactccattttcattggaatttggctcggaagctatgttacctatagaagtaaacattgcgacctagaagcatgaattctacaatcaagaacaaacccaagaacttctaagtatgtccttggatcttcttgaagaaaaacgcatggtcacaatatctaatgatgcgtatcaacattgtatttctaaatactttaataaaagagttcgaaaaaaactctttaaagtaggagatttggtgttaagtcacgtatttgtaaatacacaagatccagcagctagagtttttaacttgaactgggaaggcccttacattatcaaagttgtagttggaatcggagattacaaattagtctggcttaatggctcactaataaaaaaccattggaagagcaaatatttacggccatattacagtaacttatcttgtaatatcaaaattaatctttgtaattgttgttctttatttttaataatgatttgaatatttcaagtaatcataaaattttgtttctttaaaattacttagggggatatatctgtataataactatattccacctagaaatatatgcaaaaaagaactaggctgctaaaacttagaaattaaatttttttcacaaaagaaaggatgattgattaaaaactgtcctaggacagtataaaatcaaatatcttgaaacctttctttaagtggaaattaaaacaccagttgtaagtgagattttttctcataaaacaacaaaaagctaagtgcaatttgaataaataatggcttgcatattatagcatgtattataaacgagatactagagtgtcttgaaaaataatacgctagctaaaagtatgaatatagaattaactactcatatgagcaatcaaaaaatattcaatcagtttaaaaaaaaaaaaagaattgttcaaaatattcgaagtttgctcttaacatagcaggatactaactgctcacagaaagcttagcagaatactaactactcgcagaaaacatagcagaatattatggctcgcatatgaaataacaaggtaataattgattcatgtataaacatgcacttaatggagtgaacatgtaaccctaaaatatatcccaagctaaatcgagaaaagtattttgttgtgaataaaaatgcaatcgataaacattaataactcgagaaaagcctgattaaatggcataacagtaaatatatataaattaggaatgttggacttccaacaaagtaaagtttaaatagtattacttaatgccacaaggggcaaatcattgtctcggcctaaaggtcatttatgtgagttaaagcaataaaaactaaatccacatggctggagatttagtgggtacttcttcctcttctttttcaacatccttggcatcctcgacttcatcttttttagtctactcacaaaaggcaagcatctcatcggctccatcctctagaaagcttaaatccatgtttgaatttgccatccaagcttgataaatagatcatttggtgatcaagtttatcctagcgttggcattagcctctacctttttaagctttttgttggcctcatcaagtgcttcctgggtcatttggttagctttgatgaaatccttggcttgtttcttggcagcctcaagctcagtcttgagagttttctcttgttcttcagcctatttttttaaccaagaaatctcaaactgggaatcattccatttcttcacaacagctttgcgctattcgtttgacctgtgaagttcggtgcttagctggttgatgctttggaggcccctttgttgagccacatgagacaaaaaagatattggtaaaagaacaaagtcagaaaaaaaatatatgaaaagagaggtataaattcaaagtaaaagaagagaaagcatactaaccgagagggtgacattagcactccttgctgatagactttaaaaatcaccattattgatcagatcccaatcatcttgttgaaaagatttgtaatgacaccagcaggtagtagcatactacgagaaaactagcaaacccttaatgcctgcaaaatttggtaggggcaagaaggctccaagaacaccatctcgggtttagatcctaagaatttaacttcatgaacagaccctaaagcatgttcatcagtgttcgcagcagcaggtgcctaagaagtcgctaggggcacctctagctcaattacaagctaggtcaaggcacattttttgtttgttgtcgacttcttcatcctcttcaacgattctgggtgtgacctagaagcagtctccaatgcagtagaccgtcttttgcctttcttattgggacctgaagggcttgataggaggtatacaaagtccagatctgcgagacaataagtgaaacataacacttatacaatataaatagaaaagatgtggtgagattatctcccacttaagagtattaccataatcatcagacaaggaagaagagctataataattactaaactccctagagccagtaatcatgaaaaggtcaaaagggttaagttgagacatgtcccaatttagatgtccaatcctatcaaaattagtgctatattgattggcaatcctaaagtaagaactattacaaattaatttgacatgatgctcggggtaccaatagtcaaacctatgggaaatgagatctacacagttccaaatataaaagttttttttttgctatctctaaatttaacaagtgatgtttgctcaaccctaagaatggttggggaccatcgacaagcaacaaaattattacctcgggaggcatcatcttcggcatccctaggggtcacatttcttagatattggctgcgagccacataatccctatcctcctcgtcagcaggaactggaacttgctgccagtctgaaaaatttgggaccttaaatcacttgtagattgttctttgccaagaagggtgcaagccttcaagtatttcttgtgcaataagaagtcagctgctcccaacccaaagggaaggccaagaagaatcttgtgccttctctcgatctcaagagttgggacgggtctcctgatgatcgttgttaacataaaaaaacaaaaattagtaaagtatggccaatatgtattgaattaaaacttaaatgtaagtttttgagaaaaactatacttatgtataatttgaaattttgttgtgttgatggggaaaagacaagtggtccaaaagaagtcatccttaaactcatttttattggaaaacctcacaataatcctgtaatcattggtgtgggtcccgagataataaaagcctcatgcaccacgcttcattgctggcaggctttacagagtagaaataaagaatctctagtgggatcggacactcccaattcagaatatggtagagagactttaaacaagccaatatcctgtatgagtttagtgctaattggaatgggggcaatgcctagataattgtagaagtctttaaggtaatctttaagagggagaattgtcccagctcttatatgttcaaggctccaagcgcctattctaaaaggctcgttggtgctacaaccctcgtcttggactagatttttagggggatagcagctgaattctccctcagcaacagacctaatgcgacatctatgttcattcttgatgccacatgaccttaaaacatccccaacatagggtctgatcgacctgactttggattctatcagctcagcttaaaaggtgactgtgggatccaaaagggtctttgatttgcgagctttctgagccattatttcaaaatttaagtcacctggtgaaaaagtaacagtgaccgaaggtaaaaatatgggccttacaagggaatatcaactcagttggaaggtttaggccaagccgcttctcacaaataatgcgtctaccctcaataacctcttgtaagaatcgcctataacgattagaggtttcttcctggccagatttaatgagataattccaaattttctcatcatttatctcaagtatggttttaggtctttgaggtttgggtttaaattctatggcataaatttgaggacaaactaattctaagggttctgggattgtgaattttgggataaattgggacatgattctaaatgattatgtcccaattcctagaaaaatagagcacaaataaaacccaaaaatctacgagtcgtataaccttaaattgtctagccctagagttattcaaacactcaaaactaaaatacccaagtagacaaataatgtagagaagaaaaacacttaccaaaaattgaaattgaaagcatagaggaaaaatcaacaaaaaggagtatcacttactattttgatgagaaatttcgggcaggggagaacttcgcgattgaaattccaaaaatcaaagagctgagtcttgatgatttttaggaagagtaatgcaattagaagaaactcgcagaaagaatctaagagacaaagagggcatgcaaattcgaaagctagggtggttgagattttgtcgaagcttgaaggtttaagggctgaaaatggcaaaaacagtacacaacttcaaatttatacctaaaaagtggccaccgttcgatcaaaagaaatataatctaacagatgggaactttataagaaaagaatattcagagcattaaatgggaatggtgtgcctcaaagttttgaaccactaattctaagcatgaaaattttaaacgagaaaaatacaattgtacccttgaagacacttaaaaagttctttttaattaaaaagcactatttaaggggctattgttatattcaaaatttagctatcaaccagaagctaacataggtactgcaaaaggaatatgaattagctcaatgattataatattaaattgcattattaatataacctaaataactcatttcaataaattatggttgataaaaatattcaaactcattgccacataagcatatactattagaatatttttatttatggaaattattttctaattaaggaaatgattttctattt

SEQ ID NO: 111871 - DNA, 5062 bp, Cannabis sativa
ttatccggctaatgattgaaacggaattcccaccctccgatcagtagtggacgaggttgataatatttctagggttagtgaggatactgaagaaagccaatagaggccgaaagctcagcttagagtttatgactttggaaggatgaagagaatgaaacccactttagtttttgtaactgggctgggcttatcatattgggctaactcaatcaattacaacataaagaaactgtaattttgctttttgtttttttctaaacattctaaaattaaaattaaattttcaacctttataatcttaaattaaatgaaagaaaccaactatccttacgatgtgggaccacggcgctattatccaataataaaaaaaaaagcacaagacctcatccttttatcttcttctttctcctcacccaaattcccataactgaaagaagagatgtctatcacaggctcacttctccagctccctccattgcactccctcaagctctcatcttcctccgttaccaccccttttctccatggctccactcccctctctctcctctcaaaaccctcttcagctctcaccactccaactctctccccgccctctttccttcccccaattcgagccatgagatcaatgcggggacgcgtcgtttgctccaccaacgacaagaccgtgtctgttgaggtggttcgtttagctcctcatcccaagtacaagagaagggtcaggaagaagaagaagtttcaggcacatgacccagaaaaccaattcaaggttggggacattgttcagctcgagaagagcagacccattagcaagaccaagactttcatcgctgttgctgttcccgataggaattcccccaagaaaagtggtgaagaaggacaacaagagcttgggattcccttggagtctcagcaacaaccggtttaggatataaaagtgagggttttgtaattcgatgttggtttgtgaatttttactgcttttgattttccttcttacttattatgataatgtttcaagttttagtgtattttgaatgcccttgttgaattgataaagtttagtcttttataaatttgagctgtttttctttgacattggtgttgtttgatggatttagctaatatagctaacagggtttagtaattgcaatgtggaattgtgagttcatttttctgggttttgcaacggttttaaatggaaagcttcacaattaagtagaattgagacagattccttagtagttgttgaacctattaatggaggtgccaaaatgacctctcagtttggaatgttggtgcacgattgttgcttgatggtctcttctttaaacaatgtcttaatttcttttgttaagcgatctgcagatagggttgcccattcgattgctaaacagtcctgttttatgtgagattgtacttttaatgaactaaattctccttctggtttgatttttattgtaatggatgaacgtttcaattaaataaaataccatttcatttcaaaaaaaaaaaaagaaaaatttatgattagttcataatgtggatttttgtttagtgcttttgagtcattgaaaaactacattatatacttcataataatatttcaatattgagcaaagaccataataatttcgaagcattttcgtttagaaagtatttttactagaaagattcaaagaggtgtgttgtttagtatgctgttgcatatttaatcaaattgtataacatagtttctttatgttattggagaagaacatcgagttttttagtagagaactattggttattattctgtgacctgtattggagagtagaatacaatcaaaattatcatataatttatattacacacaaggaaggaatatatcacatcagttctgtagatccattgtagattttgaataattattttctctacgatgctattgctaactacagatgttccttccttagaaccaaataatgaatgaaaacaaacccacttgagcataggtaatttttaaaccactaacagcttagcctacatgctttacaatcaattagctaggtctacctatttaaaaatactatattttagatcaaccctcctcacattgcaaacttgtcttaatatttttcaaagtacatgatataagagtattaacagaatccactgactccatagttagtttggctgttggggatgaatttgttagtatttggaatgctactgtaagtaaagatcccccttctgaacttttttcctctggcctagaggtgatgactagaggccttgactctatcccatcgggaagaatggagaatccagacggcaaaatcgcaaggttgcttgagtcacatccggtcatcacagattgcattccggagatattcactggtgcatagaccaccatggattcgaaagggttggtgcagcaatcttgaagtatccacatgctgttatctttagagttaaccgtctgagaagaaaagaaaagaaaaagatggaaattccaatctattttagtactttgtttgagtataaagaaatcatttgacaggaaaaggaaaatgtttattgacaaggattttacttggatggaaactgcattgccacgatcttgtcctttcgataagttggccatggattcaactgcacctccacttgagattatgtcccactgaaatttacaccgaaaaattgtcaaaacaactactctaaacatgtttcttagattagcatatgaaaacgaaaaagtgtagtattgaacctcattccggtgattttcgtctctcaaaaaatcgaatagcacatttgcagaaacaggcaaccatactgaggaaacggcacaaagtatcagtccaagaggttcaccagggtcgttcatgttcttcctagaggtaattcttatgtcgtcccctgttttgctagacactttagtccaagtattgtagcttgacgctgcaactgcgcggcagaaactccatgtcattctctgtgccaacttcagtatactcttcctcccggcaagagtggctacgcctggtaaagttcaacaagtaaaagactaaagttaaggaactatttttttaactcatagttttaggtccaaacatagtaaagaagatagttggaaatgttacctgttgaatccttcataggaacattagttgccatgaaaaagaccagtctttcacattgaagttgcagagtagctatccagtgcctggctccaaatgctaggccactgtttacaatagtacggtacattgtatgaactgtgctcttctggcattccaagtgttctacccaagtcacctgttatattatattcatcaccaatctatattatatcatattatatatagttaagaaaaaaaaagataaagagtttcaatttgtttttcccttcattcaataacgattttatggtcgaccccattaatcattttcacctttctatgtttcccttttcattttcgagttgttttccattacctgaccagaagtactaattatgaatatgatgattatatcactgtatactaattgatattattacaagtatctaataaaaacaatataccttgcaatggccattggatttgtcttcaatgatacaaccagagggacgttttctgcatttgatcaaagaagcatcaatgttttcttcgacattatcaatggaaacatcaacaacggcccactgctccgcacttaattgcttgcaatatcggacgaaatacacttctcttgtgggcaccatgggtgtcagcatttgcagctccgcaaacatctacatccacaaaattttaatcacctatttttaatttcttcttcgtaaatgttattatatatctacatgagatttttactacaactagaatttgttctattaataggaactttgtgtgtgtcaatgtcagtgtgtgtgtttatatcgtctaatttcattttgtttttagttgagagattatgataatttttgcaaatcaccaataataatttcttaatggatgagtcacatgtgacccttttcgttagaattgtataataatgtgttaaagttaattaatgatgagggacccaatactttatgagttgtattatctgacccaattgactcattccaatactataaactcaccaattgtacggctccattcttattctctgcttcaccattggagataacatccactgtcgccgccttcgatatcatgcacggaaacatctccttccattgattctgctcaaatcccaaaaaatattaatttattaataaattataattttttattaattatgatgaattttaattttttttttaatataatcataattattaattaccacatccatgaaaccctgaaccagtcgaggaagatcgacgaagacaacgccgacctctctagaagcctcgacggatctcttaggaccattattcataccggatttttcaacggcgaattccttcaagtactcgtcgtaattaagtatttcgcgaccagtttccacactcctaatccaaagcggttctccagccgtggccatttttacgagctcctccatggattgattcacaatctccatcattctcgatttctccagtccgaaaattccagtataaaactccaacgaacttctcgtctcttgctcatttcccgccgagcacgacggcgatgaagtccccattgggtactttcttatcgtcgctctcagcttctccacctaataaactcaccattattattacataacaaaactcaatacatacaattactcttatatataatcgattatatatatatatatatatacctcggctttaagtttggcattttcaatacgaagctgttgttcatcggttgaattggatgggtctctggcaacagtggccgatccacaattaggacaacaagatttgttgatttgctcacgaagtgacttgttctcatctcttagtttgtctatttcagatttcagcaatgaattttcatgccgttcttgtatagccttatataaatcacccaaaattaataaataaataaataaataccaataatatgatatgatata

SEQ ID NO: 111872 - DNA, 8713 bp, Cannabis sativa
  modified_base (7550)..(7563): a, c, t, g, unknown or other
ttgaaaagtaaaatcagttttatataacatgtttttaaaaaatatttttattttttcacttttaaaaatagaaaattgattacaaaaatattaccaaacgccacctaaatcgttcattttaaattttaatatttactaaacttattaaattgtggccttaaattttcacaatttttaatcatttgaaaacttgaaagcctcatttgatacacgtgatagaggaaaatccaaattacccgtattatcacgtattgtatatcgaccaccaccgacttacgctttaaaactatttataacaccgttttgtaaaatagtaacttaaaaagattaagactgaactcatttgccctaaaaaaactaaaataaaaattaaaattaaaatcaaagctttaaactcttcgaatctggactgttgatcatcatcatcgggacttaataaaaagagagagtagggcttctcatctctgttcatctctccaatcacgaattcaatccctagaacaacgattccaaaatcaataaacgactctctcgctccaaattttgtttctatggtgagaaaatgttttaataattcaatcttcgccttttttgttgggaaaaactcacactcaaaccctaaccctaatcgtttctactcgatttctattctgatttttttttaatttttttttctctattttatggatgcggaaaagctcgcactgagcgaagcaaaccctagtttgattgctttcccgcccgagcagccgcgggcgttgattaacatcaacggtttctgttccggtaccaaggcaatgcccaatgagctttctcagaagtctccgccttccgttgtcgacaagtttaaagcgctgttgaagcaacgggacgacgacttgagggtttcggcggaggacgaggtttcgttgccacgaacggaggaaattgttcagctttatgagttggtcttagcggaactatcattcaattccaagcccatcattacggatcttactatcgtcgccggcgaccaaaaagagcacagcaagggcatcgctgatgcaatttgtgctcgcattcttgaggtctgtttttggtctctgcgggtttcgttttttctgctttgtgtaattatgggaagttggctgggtttgtattttgttttgggtttattgtttttgagtttctgtacatgtaaacctaattgtgatgaacgtataatcgatatgtcctccaaaattctatcttttgttccgtctgattggagaaccttaaaattctgtttgagggattttaaagtataaaactaagccgctcattcattgatatctcaagtgatgttgtaaatttccagttttcatgttatactagacttctacctttatttcatcattcaaataattagtgtaaattcctgcattggctaaagttttaacttcagttgttagtgttactgaagattcttctttcaacttacattttgtacacgaatctaagtagagaaatcagtattccaggtgaaagatctgtggtggctaattttgagaatgaatgtccggaggaaagcttgtaatagtttttcaaatggccttttgtgttattaagggttattgcagctgaactgccataaaaagtcatggctctgtttatactactctttcctcctaaaatagtctttatcatgtgtgttgtcatgaacaaagctctatagatttcaatacttgcttgctctaaatttggttggctgtgacagcctttacattattacagatgattcttttagcttgcatttttgcatgttatttttaggatttttttcaagtcaatgacaataataaattgaggtgacattctaagacactagtgattagtgacctacattcaatagagaaattttagttttttacatgtaggctcttatatcttattgttaagaaaaacatatagttcttataatatttattgtaccttttcaggttcccgttgaccaaaaacttccttcattgtatcttttggacagtatagttaagaatataggtggtggttatgtccagtatttctctgcccgtctacctgaggtaatctaacaagattaacaaactgttgtgactgttttctcagatgatataaatgaatgtataaaagttatctcaagaatctctagtaacttgtgcttttagctcttgcttaggtcttctgtgaggcataccgacaagttcacccttctcagcatcctgctatgcgtcacctctttggcacttggtcatcagtatttccaccagctgtcctaaacaagattgaggaacaactgcaattttctccatctgttaaccaacaatcatcgagaatgcctccactgagagcttcagaatctcctcgaccaactcatggaatccatgtaaatccaaagtatttgcgtcaggtggaacattcagctgcagaaagtgtaagttttttcagtggattatttcttttcaccacctcaaaacattagggatttggctgttaatctatttggattatatatttacaatcacaaatatccaaacgtgcagcattgtctctagatctcaactctaatctccactatgagaaacaaggaattgtagtaaaatcatgagaaaactctcatcaagcgtcctcacaccttctttaacagaaagtgtgtgggtcgtggctcccttcttctttatctttacatacgatcatttctaaaaatttgaaacttatcttccaaaatgcaatccactctgaacaatcatggctgaactagtttgtcaagtggtcatgtcaatttataattttgaatgggacaaacatcaggctaaaggagtcattttgccttgtactttggaattcattatagtgacgtccttgaatgttgtgggttctggatgaaaactaggaatgatggagattattattattattattattattattatgtcttactagttgtgtatcggttgattgataaattaccttagctgcaatgttaaatatgtaatctgtttacaatattttgcagcacatgcagcaggcaggcagggcttcagctctgaacatatatgctcaaaaacctggcatagggtatgtagaattttattctggctgaatctgtttggatttttttttttcttcaattaattatcattaaattgttttgatatatttatctctatatatatatgttttaaaaacttggcagaacaattggtagagatgatgagcttggtaaatggcaacgaaaaccgtatcataatcagaatcagtttgaaacttctgcagcatacaaagtcagtaatggacgtgagcatcaaggaccaagggccttaattgatgcatatggaagtgatgacagaaaatcaactttaagtgataggcctttgcaggttgagcgtattgacgcaaatggtttggagcataggtcttctttaatgtcatggcagcataccgaagaggaagagttcgactgggaagatatgactccaaatttagcagcagaccgtggtagggctggagaattcttgccatctttgagaagttttaaagcaaggccaaattttttagcaccaagaactacccatgtggagtctgatactcggaatagttggtcaagtcaggcgcagctacctgcagcggatgattcctctattgctatggaagatgcagtccctccccttggtgtatgcttccttcatatgttctcaatattgtttatacgcatctaatgaaattaacgagtttccaatcatatcatgtcattgcatcgtagattcatgtttaattctctctctttacgtttgttggtcatcttgattaacatacgtaattttctgtatatgtatttatgcagattcaatttgtttgctttgtagttgtgctgtgattccttccccatttttcttttttactttactgttgagagacactttatatattgtttagagatgtcttcaaagattgtttgagataatctccgtcatcaatttcactttaaagacaaaaacaatacatgaaagttgttaaggaagctctcagttgttaattttttaagtttggcagtgctgaggccttggtctgtcttttgttagaacatggacaaatagtacattaaaaccccaatttgatctgctagccaagtaatttctgttttgttttctttacggttttgataggccatacaaaatcctcgtttgtctgaccttttttacctagtgcaattttcttcctagtcattggtttttgtttatgctacttagctctgtgaaacatcagttaattgctataataagtccctacactgatgcgatgtacatttttattttgttctcttagtttttatattatgtggagaaagatcttgtttaattggccataaaactaaatgtgagctttttgctaagttagaatgttatttgttgttgtgcagtttggccgtgggttgccgggtaacatatctcgattccaagatgagacaaatcatagtctagtttctcgttatcctcaagaacactggaatatggctcacctctctcagacttcacaccaccattccagaggaagaggccgaaacttccaaatgcccatacttccaggtggcgataacaagtctcctttcattgacaagctcccagatgtcagtacacaacaacttcatgggtccttaaatgtagtttcaagaatgggttcttccacgatagaatcctttaatggtgaatctcgatcagttgttccatcatcactgggagttgttccatcatcactggggccaaggccagtacacgtgcataattcgaatgtgccaatgcatcctggtttgccattgcgaaaccagaaggttccctatgactttacgaattcaagcaatacccaaaacaatcaacgcccaaataagacttcatatggttttgacaacaaggagcaaagtttaacaaagctgccgcaattttcttatcagaatgtttctatagctcatgcaaaccagcacaaccagatgcaaaatcccttacaaccacaacttcttccaacacaggatggccgtgataatttccttaactctacaggtgctcctttgccacctcatttggtgaatccaaacttggatcgtggatacagtgcacgaggatatggtgtccctactagtactaatatgtcaaaccctgtccctcttggacaattgagcttaccatccaacaatattatgaatggctccttgcacttacagggtggaggcgtaccacctttgccatcaggacctcctcctacttcattgcaagcagttctgccttctcacaatgctggtctgcctgtccctggccaaccaccagggactgcattctctggtttgattggttctctaatggcacaaggtttaatctcattgaccaaacctactcctgtacaggtatctgagctttttccccttgaccacttgaagtttgaaatctgcagtttaggcttatgttcttaaccattttgtttaatattttaggaacctgtgggactcgagtttaatgtagaccttcttaaggtgcgtcatgaatctgcaataaatgctctctatactgatctgcaaagacaatgcacaacttgtggcctccgatttaagagccaagaagagcaccgcagtcatatggattggcatgtgacaaagaatcgaatgtcgaagaaccgcaaacagaagccctctcgtaagtggtttgtaagtgcaagtatgtggcttagtggtgcagaggcactgggcacggatgcagttcctgggtttttgcccactgagactgtagtggaaaagaagagtgatgaagaaatggcagttcctgctgatgaggatcagaatacttgtgccctatgtggagaagcttttgaagagttctatagtgacgaaactgaggaatggatgtacaagggcgctgtctatttaaatgcagtagatgtgtcaacaacaggcacggatacgtctcacttaggtcctatagtgcatgcaaaatgcagatcagagtcgagtaccgttccccctgaaaattttggacaagatgaaggggtatttcttctgcccttatattaattctttcagttttctcattttttttttggttatacaatgtgtatatttatattacaccggtgagaaaaacaacatcttggtggttatagttttcttgtgatcttttagtgatgtgcccacctatttgaaaattagctgcaaatgtacattggttttaactctgattaccattcattttgcagggaactattgaagagggtagtcaaagaaaacgaatgaggatttagtgtagttaggtcaactagatttgtcttcctgtaacttattgagtttcttcatgtttatggtactggcttaacttgtttttacagtagtgttggagcttgcagtaccatggcatgatgccataatcatgtacatgtatagtttggatttgtaccattgacactatcttgcagccaaggtcagattttttcaatgcagtattgtgcaaaaccagcaattttccccatctcttttcttttttccatcagataaacgcatgcaagagggatattcaaaacaatgttagttctttcataacagtttcttttattcttttcaataatattttgtgttgaaggatcccattgaattattatatggtataaagcaaagggctcccgaggcctgaagtattggattgattgtgtatgtttttaggtccttctgcaatataatatataatggttactacttactactgtgaatttagaggatatggtgattgtttctgaagcaggttctaatggcaatgtgagagatgtagtccgtacagtctacaccgaccattgacatttgggagtgataagacacatctcagtggtcggtcttagtttgtttccttttgtttttattattttaatttctatctagcaaggatacaatgtattataaatgtaacctaaatttagcttttccattgtatgtttttcacatgtgtttctgatgcaatcaatttgtctttttcatttcggttattttcattatgtacaattctctctcttaataataatgattgatcattgttcaaaaataataataataatgattgataatagtagtataagttgagttttataataattttttatataaagtctatatctttaatttatattatgtatttattttttgaaaaaagaaataaattttcttccaattcatatctttaaaaaaatataactataaaacaaaaatatattatatcttgagtattatgataattttttaaaaaagtgtgaaatttattagaaaaaactaaaaaatattaaaataattttaaaaaatatgaaattttatacatgatttaaaaatcaaattaattaaaattaacgtaaaataatataaaaagaaaatttcaaaaatatctatttataaaaattaagttcatatttttttaatcgcaaaaagaaaaaaatatgggaaaatccattttcaatctatacaaaaagtacgaacatataatttttaacaaatcaaataataataataataccttacaaaataataataataatannnnnnnnnnnnnnaataataataataataattaggcacaataactatttctttccttcaataaataaaatataagccaataagattacaatcgatcttcttctttcttttgctttattcaattttttaaattaaaaaaacatattttgtatttataattttgtttttaatttaaaaaatgaagttattatggtaattgttattttttagataaaaattggaaaaaattatattcaaagaatcaattggaataatttaatatcgagtctcatatattttaatttaataaataatataaaaaatcattaaacttatcattatgtgatacttaagtatattactagtgcaagattcttaaaatttttaagtggttcaaatttttacgtgtgttggccttggccttaagaggctgactttgaatgtattacagatgagattttgcagcttgaagaacctttagttcttgctatcttgtttttcttctaggtttctcttagtgaagaaaaaagcttagagaaagtatgagtgttttctctcccctccccattacataaagggataaaggggtttatataggcttagattagaattcggagatacctgtgacccgctagggtttctgtgcaaaaataggctcactattggggtaaatacatttaatacatgactttaaggcctacggtagaattctagattatggggcgaaagtatccgtacaaaggaggacccatgctatctggacaagtgtcatgcatgagtgctactacagtagacaagaatgtcagaaggacgtcgttgaacaaacgaaatatatttatccttgcgatacgtgcactaccatgtcctcacataggagataggatctgattttgtaggtccaagtgtcaaagagtagtcacgactcacgtcacactataagggcttctggatgtacctcttgggcttcttgtccaaatatgatttgttgattgtccgaaggatgttgttcgctctatcttttgtaaggctagactggcttccgggagtaggatgatctcgtctccctaattgtagctccgaaaatacaaagtgaaaattacatgaaatatgggattttgaaaaaagttacaaaaatatggcatttataggtttgccactcttctatggcattttttcacatttaag

SEQ ID NO: 111873 - DNA, 1425 bp, Cannabis sativa
aaggacattcaagatgatcgagcctttttgcaatggcgttggcatggtcaatgagagaattgatttcagaattaatatccagggttaccaatttctctagtgaagaagtcataatcactgggggtggatcgtttgtatactctcgagccctaatttaaagtagaagatagatgcaatagtcaatatcatgctctaaatttgttcgattcgtactcggtatcttctttgcaaactctcaagaaatttgcaaagttgggtaaaagtggtaaacaatggcattacaaagtatatatacttagaatgtgcattttgtgtgaagcccagatcaaagggttagattaattctccaaaagaacaaaaataatccaacagctttgaatcccattagtcaagcatttaatgccatgtttgggaccaatgtaaatcaaatgataatattatcctcgagactcgcaccaaagtaaatagcctcaaatttgcttacttcattgcacacgcctcataaaggaacagatgcttctcaaacaaacaacatagtgtgacgtattgccttaaatttaaaaaataaaaagttgtcttccatacatttgaaactattttgaatttataaagatttcacctttagcctccacctatccatctatacagtttgaagcaagcctccacaatccacaacattctagaaaattatgggtaaattttatccatatttctggcaagggacatgtggattccaaatattagcttagggcctatcagtgagcccaaatgcacataaattgggccaagcccaggatccattatgccttcaaggagaacaataaacataactcgcccaggcaaggttccgtcaatcttagttagcatctgcaaggtccatctctgtgtatctagaagaggtctttagcgtgtctccggaagactactatagttacccattttttttttaccaaattgcacaagatcatgaattactttctgaaaatctcaaacaaagaataatatcttgctaaaaagggaagttggataattggaaatcatgtaattaatctgtcgttaattacccatgaatataggatacataatgaacaactaattttgtgataaggcctccatgtcagcatacacaaggtacctcatgggtcaggcttcaccagataagcccaaagtcaatatattatttgtaaactcttcattagaggggaaagggtactaatatgatctctataatagtataaatactcattgaattcttcatgcaaagggttggaaattcttggcatacttgctcatagggctgagcatgggttgacaatgggcggaccaacccggccaatccaacccgaaatgggtcgaagcatggtcattttttgtgggccgaaatacatatgggttgataaaaatataacccgctgctattgggtt

SEQ ID NO: 111874 - DNA, 1359 bp, Cannabis sativa
  modified_base (30)..(37): a, c, t, g, unknown or other
ctcaaaaccaattggcaatgagtggagtannnnnnnntcttatatatgactcaatacttttatatttaatccatgtaggataatattctccaatatgctcatttcttttaaaatttttttgttaatgtaacagtaaccagacgctaatctgatatagttcaggagtccagacaaaaaataaatatataataagtagtctaataataaattgtgagaatatgtacatgcattgttttgtttaagtatgttaattaatgtcaatacattgaattttagatagtttaaagttgttaaatatacttgtactgtaattatattgtgacttatgaccacataaacaaattatattaaaaaatgaggagaatgtaactgaaagagtcaaacagagtgtttgcagtgagctttataatttttggaaaatttttgcaacaataccaaaaagaatttagagagcaaaattcaacaatggttaaaattcatagagaaaaactcttatatattctattatgtagaagactcactactataaaaaatacaatttctgctaatttaaaaattgtaatttttttaaaatcgacgctattaaaaatttatgagtatttaaaactgacgatattaaataactatacccatcggttataaagggtcgttaagtattgccgttagttttaaagagacacgtgtttaaatttttcaaataaatattatttaaactcgtcagttttaaacaatgggatttagtatagctgacaatttaaaatcgtcggctatactacccacacttaaaaactgtcagtgaaacaaattgaaataataaaagcctaattgaagtccattatataaatatatataaacatgctttagggttaaagagtagcgcagtcgtcctttccttctctttcgtcacacactctctctctctatatatatatgtatatcaaaaaccaccaaagaagaccatccgagtcgcaccattcaatcattctctctctcaagccaccggagaggatcaccaccctttcttcttctctctttcggtctgggtgggttcggaagtggtactccggtgtcatgaagtgtttgtaatgggagttgcagtctcgtattgatttcgtttctttttatttttgcaggttcagtcgtcttctttgtcgcgcacatactagagctctggtcatcttctacatcacacaaggaaactgtaacgtccccgctttaagcttttattgggcctttacactcatggaatgaatggctcttatacatgagtacgccactctggctgcttaatggaatgatggctgaccctacaaaccaacacgagtgtttccagcgtactttgtcctcactagcacgctt

SEQ ID NO: 111875 - DNA, 1018 bp, Cannabis sativa
ggggaggacagtataaatgtaatttctatcgtgtggcagtaaaattgaaaagtattacccgaaatccagtatttttgtaaaaacccctttcagctatgtgcttcattttaagtcattatatatttttgaatcagtccatttattctaaaacttaatctgagtatctacctagaagtagaacatgatggcctttgatcctacaactcatgactctctctttgtcttaaaaaaactgaattaaaagaaagttattattattttattcattattattgaaattttcttggattcttactcaaaattttgtcctgcttaatattgagagattgcccacacaattcaaggcaatactcagaatagtggggaagactatgtagtctatttgtcgactgaaggagaatccaagttcagatcttgattatactctgctacaaacataaatcaagagttagagatctaacgaaaggaatcataatattctgctgcaactaatataatattttctacaacccttatgtgtttaatttattattttaagattttctatattagaatgttagattatagttataatctaacatacatgagtagtaaattaaggtaaaaaaatttccaacaactgatattagagccatttattatttatgaaatgtggatttaaaataattttgtatattttatgagatttggatgattcgtgtttgtttatgtgttttggtgaatgattgtgatatttacaaatttttctatagaaaataatttgattttctttctgaaattattttataatgatagttgtttaaaaatgaagcaactttgttttttcgatgaaaaacaagaaagttgtgcatgtttaaaaattaatggcacggctgccactgtcactcgtgcggagaccgagtaatgcgcagacagtatgcagacgtctgagaaatcttgaagaaggaggttgtaagtattgtggacaatgtcccacatggaataaatggtagagaattgagccatatataagaacatg

SEQ ID NO: 111876 - DNA, 2851 bp, Cannabis sativa
tagtttactgaaacatcattcatttacaaggagttaagtaagtaagtattttttttaagggtaaaatacatcgaagagtaaaacgataactttttgtccctactcaatgtaaattatttatagaggatcattaattaatgttaataatggataattcatagcgtatctgtataggatatatagagcattctgtgtaacaagagtgtaattctaaatctatcattgaatcaaaaagaattaataagttaggaaatttacttgataaatttctaatattcttattgagaacttgattacataggccaatatggtctcacattgtttgggatgatatcatcttgtaggctcaattaattgatttatttaatcaattagaattctaaaattgactatgtcaaattttaaaatttttactaagttgggctaaattgagaagataagagaaatataggcttatttgttaattatgataaatttgtgtcaaataaataaattattatatttatagtttcaatttataattattatgaattgaataaggtttaaatataatgtataatcaattatatatacaacacattcacttagatgttatactacatcagcaattcaaatcaaaattacttgcactgaataacgaatatcagtgaatcacactagcaaccattgattaaagattttatattttaatatattgctaactattttattcatggcttagtgatcttaattctccgtacaatataagtcactgcctcatgtatgaataaatttttttctaatatttatttatataaattattcaatattaaatattaataatttaaaattcaagtatatataaaaatgttaaatttatatttataaacaaaatatatctttataggcttttcaaggtatagaccctaacaaaacctagcacgacaatttgattaatgtcattgtgcgtaggcattcctaactacgtgaccctagtgttcacgtaatttatgtcaagattcctcttcagtgactagttcatacaagtcatcatagagtagtagaagttcaatttcaaatttccaaatggattgaaaatcaccatcaaattcagtttcaaagttgtacggatcattgttgtattgttgggattctattttattattaaactgaaataaaacataaagtaagaaagatataagtaataggatataaatacaatacaaatgtaacaaatgaaaaataaatatcaagtttagaatctaaatatgatgcatgaacacatttaaaatacatcaaatatttaaaaatttcacgataaggattatccaaagattagggccggtcaaattaatattgaataatatacaagaccatgttcttgtatttattaattgtgttttcctaattatttctttaatatgatgtgacatctgtctgggtgacacatgtaacatgttatataatttggacggatgattttgctcttagtaggtcgtccagactgttatgaggcttaaggtcatatataagtagtaggatgtccgaacatggtcactctggtgacatccgaccagctctatcaagtggatagctcacatgcatcgactaggggtgtgagttagcaacttcagagttatacctcacgtatttccaaacttgcgcctgtgagttagcaacttcagagttattctattttttgtatggtttttcaaccttagaagtttgagtatttagcattcctattttgattataaaattataaaaaaaaaatgaatttaagtatttcatcaatcaaaatttatgttaaattataaataaatctattacatatctaatttacaagagaactcaaaaactaatattaaaaaattcatatatcataaattcatatattagtttttttatttataaataataaaaaaaatacacacacaagcgcgaactaaaaaatattataaaatagcattagaacaaaaataaaattatgtatatgagaaaagaaaataaaaatgaaggactaaatcatattaaataattattatattaattaaatcattaaaattacttttggtatgtaattacatctaattatcatgggggtatgagaattagagagaataattgaggcctcctaattacctctaattagagagttattgtgtaattatacgtgactagataaacacaccaaactgtgtaattacttccatttacatcccattccaatttacacgtgacttttcaaacacgccctttaggatattatagttgctctctaattatataaaattatatgaatcacttaattactttttatttatgcttaaagttttatgaaattttcgagtatagtactatatattacaaaaattaattaaatgtatttaaattttatgcatttaaacttctagacctgccaacaaaaccaaaaaaaataacattaaaataggtaatcagactttcaagctctcttttattctcttagataaatttactatttttcacaggataattagtaagcttgagaaccagtgccctatattctatctgtatttatttcacattaattcttaaaatatttaacaattaatttagaaaatagaactggttaataaaatatttagtaaatcaaatcttgccataattaaaatacttaattagttatcaaataattagctgaaatgaaatgtaataaagattcaatattcttttgattctcataggtataggtgtatatatatgttagaattcttataatcactcataaaatattttatgcaatattaaaattaatttcgtaacaaatatattatatattattatgtgctagaatttgagataagatgaatgaggttctatctcaaaatta

SEQ ID NO: 111877 - DNA, 4496 bp, Cannabis sativa
tttaacataaataattttatattattctactatttttattttactattttaattatttattaaataaaacatatgataaactgttttattatatatttatgacatatacttgaatatataagatatattattttattttattttataatttgattattatttttatttatttattttttttgctgcgaatcattcatttttatttaattaatattatatattttaattttaatttaatattatatatttttattttaatttaagtttgttttttttttcttaaaaggaaataaataaaatagttcagcctattcttaaaccaaacacaagattactttcagtataattcaatcttgtcgagttcagtactccaatctttttcagtccaatccagtctaatcctgtgtaccaaacgggcgtataggaacatttcaagtagatgtagagttatatttgtggcttatttgtagaattttcattgtgttttaaagtaaatatatggagaatcagtgaaaattaaattattgcaatttatgctataagaatatttatatgaatatggattcacgtgatgatcatgtaatccagtactaatgttttccatgagagagcctatagttggtaatcatattttctaaaattaaatacaaaaaatatatatttttcaaatatctttcattgtaatttatagttttttttatatattataatttttctttcacttaaatttcttaatgaattgatctcttcattaactatctctctctccttttcgtcacttccatctcttaaaccaaaaaaaaaaaacacataatttatattttttgtcaataataaacaatattatatatagataatatgatattcgtggtttttattctatatatataatgatatggtatcatgagtttatagattatacatcaaacatgcatattttaagaagtaaaattaaatgttagtggagcaagttgggatcaaagctgcaacaaactggtccgtactaatccgagcgttacacatgttagcaaaagctcgtgtgtatttccttccgtaaatggtcaatcttccacaatgcttctcgtacgttttcacctaaaatatatatataaaaaaaattaataataatttagtatttaaaatagctacctattatatattatttatcaatttcttaatattaatgtatataattactcacatgcaacttaaagcagtcccaatcgtccacaagaggttggcctggtgatcgaacatggttcaaaattaatgagctattcttttgtgttccaaacaaaagtcttccaatctcatatattctataatctgtcactttccttccattaatttcttcatcaagttgcttttgtaattccctcttttcacgagatccacttggagccttacgcaactatacatatacaaatttataataaattaataaagtcgtaataataattttaataattaataagtatatgtatatatatatatataaccttgtgcgaaaaatgatggataatagtatcacgttggtcatgatgagcgttgatgagaggatgatgagttgttgaagagagagtagtggtagtgtactgagaacgaggagaaggaggaacgacatgattaatgtcataagagaagttgtcgtttataggatttgagcccatgtaacactcaattacatcattcctttgatgcatatttccatattccatcacatgagaactaccctctccaaaattgctattaattgttcttcttctaacctgaaaaagaatatatatatttatcattagtaataactaatttcttttataaatgattattaaaaaatagaaaactcgatgatcttaccactttatattggtgttgcaaagtttcttcacgcaaattggctttgtcgctaatgatgaaaataattaacaattaattaaaatcttaattaaactatttgtgattataagagtactaaaacaattatgtaactagtgtattacataccaatgttccatccaagaaatactgtacaagtcccctaagcaggtgtcatattcagaaagtggagaactgaaatcatcatcggggcaatacgtagcataactgctctctcttgaatttgatgctgttgttgcatatatatttatattcttagggagaagtccatcaaaaatgctcccagactcacacgcttcaatgtaaattaccttattcccccccaaaaaaaaattaaattagcaatgatttttatataaactcttatttaattttaagtaataattaatataagtttgtaccatttttctgtaggctttattctcatgcttctttttcagtacatgtacgagatcatttgcataaacgacatctagttcacctggcatacctgaatattaataaaaacaaatataataagcttttgataaaattataatgttattgttatatcaataattaataacattataattaataagtagaagtagtagtactatatactgaccgagcattccaggagccccatgatcggcatagtaaatgaaaatatggtcatttggaccactgtcaaggaccttaccactgcctccagtcacagcacttttattaccaagaatcacagcataaagattttcagatgtaacatgttttcctgtataatcctgcatatatataattattgattaagtctattaatatttaattagaagattaaaaaaatgtaaaattaattaaccttgggaactcctggataaacgttaggaccatatggtttgttgataataaccccaggcctagggttgtttgggttaaatgcaatgtcatcatacatgaaaacaataatgttttcatcttttaatccacctttcttcagtatttgatacgcatggcacacgtcagcctgtacatatatatatatataaacatattatatatttacatatgtatctaataattctgcaattgaaatgtatgtatatatgtacatttggtattaaaaaatttgcaaatataattaattaattacctgatgcctataattcaaataatatgcagagccagcaatgagcactgcccatctagtttgatattcatgaccacttatcattacatcattaagtacgttttctgatgatgaatctaacgacaccaccgtaagaggtatcatgattgaaataaggaatgccacaaaaaacttcacccagctcatgtttttattaactacctgcaaaacaagcaaataaatatgtattaattgaatttattgaacaaattaaattcatctagagccattaatttattgatcagtattattattaaacaaacaaatacatattatatattaattaattataaacgtacacaaaaatagctagctagacataatattaattcatgaatatattatacataccaccaaaacgaatatataaatatatattgatataaatactgtaaatatgaatatgatgatcagagatgaaagttgttaattaccaattgtaaaaaatattccaatagagattttagctttctctcaagtaataattaatctcgctgatacctctgatctcctttacattgtatttgatgaggtagctgcattaatttatagtgatcatgaaggctatgcccattgactcatagcgcacctctttgcaaatttagtaagaattaatctatttagaggaatttttcttagtttgattttgagctatatatgtatatttttgtgtatacaagtggtatatacttgatcaatactaaagacaactacgtaaatgtagtactatatatatatagaaagatggaatacaatgtgcatattgcattaatttgattttatatgtagaaatagtaagttaattaattagtatatataaatagaattttgtatataacgtgtttaactagataaaattaaagaaagtatataagttgttgatatccatacgcatatatagggggttttatatcaatttatatcaagataagttttacaaaataacagtgtgttagtgtgtcacagtaaaatttataaaaatattgccttggatcatatttttcatcttttatattgtacacacggaaattcaactacgacgctttcatcttccaaactcatgcacaaaactactagagaaacacaaaaacacccaaaaaaaataattattaattttgaaaagataaaataaaaatagtaaaatcaacgacaaataaacaacccacagcttcatcataacaagaatcaacaaatcaaaaaaggttagaaacttaaactcatccgaattcttttaaataagaatttaaaaatgatgctcaaacgtaaatctcgaattcaatgataaaaatgatctgaagcttctgaaattgaatttatatacatccgtgattgaagtagatgcaaattaatatacatcattttagaggaaaaaaaaaatcgatcagtaatttgcatttgttataaatattaataattatgtagatgtccaaatctt

SEQ ID NO: 111878 - DNA, 3854 bp, Cannabis sativa
ccatacagtatcaaatatcaatcgacggtaagagatgcagggtacccacagtcgcagagtggagaaaaagttttccgtttttttttcatttgagaaattactcgtttataagaacatagtactgcgtaggccaaactacaactggaatcaattaattttaacataattattatggaacttcttcaagtctttaatagaaagctaataataagtatgatctcaatacagcattatgtcgtttggcaaaaagctcgagttcgtgtgaaagcacgactcactatagcaacacaaaatttaaaatagggggcaaaaaactaaagacaatttaataaaaaataccaactactaaccgagcatgtcggcttgaaacaataaccaagctgatcataactcgttatactctattggctttccaattaacccatagctgaaaggcaataatgccaagaagtcatatcatcaacacacagaatgaagccaatctttacagacgggaagaactgttatatgtagtctcagtcagataaaccagctttcttcttcaaatgcgccttaaagtccataataccaccctcccatctggtcacagcttgattttcacaaacccaaatctcctgggcaacctggttgatgagcctgaaatcgtgactaacaagaaccaaaccaccatcccactcgttcaatgcctcagctagggaatcgattgtctcgatatccaaatggttagttggctcatcaaggagaagcatatggggttgcctaaaagccaaccaagcaaagataacacggctccgttggccatctgacagattcttcatagccataacctgagccttacctgttaggccaaactttccaattgaacccctcatcttttcctcctcatttccaggatactctttgatcatatactgcaaggccgacatctccatgtcaagcttctcagtcaagtgctgatggaactgagcaattctaaggtgattgtgtcgtcggaccatgccatctagaggaaataattcccccgtcatcagcttcagaagcgtactcttcccagctccattgggtccaaccaaggcaattcgtgagtccagatcaactccaaaatcaatgttcttgtaaattaggttatcaggtgtgtaaccaaatgttacttcaacaaactgaagcactggtggaggaagcttcccaacatcaacaaaacggaagaccaaaaccttgtctctggcaaccttctcagtaagtccaccacgctccattttcgcaagggttttctccttactttgtgcttggcgagctagttttgcagatccatgcccaaaccgtgcaatatactccttcattccagcaatctgttcctgctcccacttgtactgtttcatttgattctcctccagttcagaacgtgtctgaacatactgatcataatttccactgtaaatcttcagtttcttgctttgcatgtggatgatgtttgtgcacactccattcagaaaatcctgagaatgtgatattacaaccagaatgcgctcaaatttcttcaaggtctcctccaaccacacacaggcttccaagtctgtaacaaatcaaaatatgtaagtacatggaagtgtacatgttattcttcttttgggtattatcttagggttgtgcccagcaaaactagcttaataacaattacattatcaaaatggcgcagcaggtattacttaccaagatgattggttggctcatcgagcaacaaaatggttgggttaatgaatagtgccctggccaatgctatcctcatcctccagccaccagagaaatctctggttttctttgcctgcatctctttgtcaaatccaagaccgtacaatatctcagcagcacgtttctctgctgtagctgcatccatggcctccagacgttcataaattctttcaagctgttccccgcctccatcatcctttaaaaaagagaaaaaagtcataagcaaccacaaacattcactcatgcaagaagctttactacactaagccattgcaacagtgaacacacctgcgctgacaagagctcaacttctttctccaatcttatcttctcctcatcacagcttatgacagcctcaagcgaagacatgtcagaagcttcaatttctcgagacaggtgatatatatccatgtggtcaggtatgggaagctctctgtgcccaattgcattgagaagagtagacttaccgcacccatttaatccaagcaaaccataacgtctgagacaatttgaaaacggtaaaaaaaaacatcagcactatataagttaataatccagcaagaaaatcatgacagaccatgagtgaaattaaaatgtatgggcttacctgccataattgagctccaattcagaatccacaatgagatcatgcccatgaaaagtaactgataaagactctatctgcaatgtatataaaatcaaaattgcaaaggtatatattacttacgagagaaccattatcgtctagaaaacaaagtaaaaatctatcatctgtattgatattttattttcacatcttctataaaaggttcaaaaagtaggtacggtaaaatatatatttatatttataattatacatatacatatatgtatatatgaacacatacacgagtgctttaaacatagctaagaaacgacaaattacacacacatcatctgaaaaaataaataaattccgaatatttcagagaataatttatccattaacgaactaattattctctacatatacccaaaacagcagcctagaaacaatattccctgaaaatttagtctcttaatctaaatttaaaccaaatcttaagctaaaaggggcaaaataaaaaaaataaaataaaaaccaatcaaacaaatactaagaccaattcgagacttacgcgaatatctctagagagaggatgagagcagaggacaccagtgcaagtccgatcggatatttcaagcgccccaaccccattcgccaacttatcagctccattctgtgacacagccgccttcgatgaagcagatgacgccgcggctttgcctccccgcttggccgccgccgcggccttcttctgtgcggccttcttcttgctggcgtccgaaaccatccttataacctaatccaccaatcgaaacaaataaaccataaaaaaaactaaataaacgaatcaagaataccaaaacagaaaaattgagaatattatatcagaaatcgaaccttcgtagattgcagggatgggatctgggaggggcgatgaaggagaacgaaagagtacgatcagatctagggttttcaggcgttggtatagatgaacggtgatgaaaagagtaaagaatacccaaagagatgagaaaaaaagggttagaggatttcggaacaaggaccagagttaagaatttatttataagggagagtgggttccacgtgttccttgtatatactgttctattttaatactagtagtactagtccaacacattagggcatacttttttctgttgtgtgagttgcgtatgcaatcacaatttttaaggtcctccctttgaaaaaaaaaaaaaaagataaaaaagccaactagttaggtcggtctgatatttttccctgtaaaacgctgccgtttttaattgggccacgagacttattatttgagaaaattatgcttgcaaacgaaattttgaaaaaaatatcacaattaacgctcttatttttaattgtggaatatacttttagttttataattatttttgaacaggtatataggtagggcttattattttatttttttatgttttttttcactctttttgtatctaagctaatttttttttttttttttcta

SEQ ID NO: 111879 - DNA, 3991 bp, Cannabis sativa
ttttttttttttttaattttgcttatcacaacaactaaaatcccttaagaaattaataaacttcagaaataacaaacaaactagaaatctactatttcatgcctttaaaacaatttatttttcaacctttatgtccaaaaaaataaatgtccggatgttttttttttaaatttttttaatttttttcataataaatttgttatataagtgaaaatatcaaatatagtatacattattgacaataattttttattttaatttattacaattgttcggaaaatttaaaccctattttttatattataaactatttaaatttttttaaaaaatttacaaaaataatactataaggatcaccaccgtaaaaagaaaaaattgaaaaaatattcttgcacctattacttattacatacagtgtaataaatatttgtcatttatattttaaagtaaaaccatatcagtctggttaagattagctatattgtatgtgtcgaatcattttctaattaacaattttcaacaaactatattgagccgtacgctaagtcgtctatctttacagtataaaaataatataaatacatgaacaaacattcccttccttgctacattttctcactactttgctttttgtcctcaaattttctcctctccgctcaatgtaccattcagtcttcctttcatacgaatggttcaggttgatatacattgcatctaatctgtgtaaatagtcacataatatatatatatatgtatgtatgtagatatatacacgctcacatctttgattttaattccaggaatgatcatcgaatttttgcaaacaatattatgtaattaaagagagctatttcatgcgaatcctgctatggttggattaaggtacagtcttaattggattcacatatcacgaagctgcaacgatcgtgatcgaggtgcttacttaattaacctctatatttttatttgtatttgtatttttttagtatttcctttcatcttcattaactttatggctagtacataatgagtttgcttcatcaagaaagtcagaaactacttgttgcgatttcgatctaatatatttggttaagttttgttctggtttgattttttctttcttcaacattctgcagtgatcctaacataatatttaattataatccagaatatgtaaagacctctactcgtttgataaaatgtatgagtaaaaagggatctgtattttaaacatataactagtctctgtataagagttttcttggtcttcaaaccaaacacagagtgattaactagacataaggaaatgcttgattcaattagcactatatataacttgaggtgtaaggttccgcggaataaaaactattgtcttatatggatacaagactaattattaccagagaaaatttaaggtgtagtaagatgagatttttggcatgggttgcttcggggtcaagaaatacttaccattagatcatagcctttggtcactatgaaatcctattttaattttcttactttatgaacttggaaaaagagataaggatctgagtgttgagctcttagaagatgggtttgtctttgggaaaacagagatgaaggatttggttgtcaactgcacacatatttagtgaattgttttctgtaaggagatcaattttgttctgtagttattgccagataatgaaatatctatatatgctcttaattaagatagcagtgcttcatgaagtagtacttgtatggtagtgtaaatttaacatatatacatgttttttactgaattaattttgatatttgttgggagtttagaatgatctttgtacatatgagttcaaatgtaggggtttttgcctactacctaaaaggcattataactttaagatccagagagggactgatttttgagtccttgtttgaggtactaaaagtcatattattcagttgttcacatgagcaaactttagtgatgatcagaattaatattttatcaccaaaaagaagaatgtgtgatttcaaaaggtggctatttggccctcttgtttgttttttctttcttccaaacatcttattatcagtatcttgcatattattatatactagcttatgcatatgtagaattgtaacaatgtataactataaaataatgacggctaaaagttattatattataacataaaatgtttgaagggacaaaccctttcttagacattattccagattcttgaatgtgcaagtctttggaacattatgccttaatagtttacagctataaataattcttatgattagcttaatcagctaagaacatatctttctaagaaataactagaaaattaaaattaattatctttgttttagctattttctcatttactcttttcgttctcatgtgtagctagcttaaaatcatactctttattaagttaaattataatagaaagaaagattactggtttgaagaaaaacttaagtaaaggatgttgtttgaattacaaatatgcatgctgggtagctgggaattaatacccaaataattgtgttttgtagatgtaattgataattggttttgcctcaatattgacttaatgttttttttttacaatatatattttatagtattatttatgtaatgaaaataattaccaaaatgctatactaatctagtttgaaagaaaggaacaattatgaagtacaaagtgtgtttcagactaagctaatctacttttaagggaattagtttggtttaaacatttaattagtctgattttgttttaaattttcaacaaaatgctatactaatctagttttaaaaacataaaacttcggactaaaccaatttgaaccatcttacaaacaaaaaaagaataataaaaaaattatatcaaaaccatagttgaatgagattgcaagcataatttaatagcagaattataaaatttattcagtttgtgtgtacatttgcatttaatcatgttcattaacccatgtttaattatcttttgatttctatttttttttttttttgcagagaattatcatttgaattgattaatcttttgcgcatatatagaaaacttatgttgagtaagaaaattaacactttaaatttaatgaagagtacttacaaacttaaaacactttaaacacaatgtctaggacactctcctacttttatacactttagactctctttctcacacttgaacttttttgctcaaacttgtattttagcacacatcatacttatatttataggctacgagagtgaagcatctaagttttttagtcttataattttttaagttttatacaagtttctagtgctctttacagaagtttggaattatcttcaagattcatctcgtttaatgaaatttagttgatttctgaattttgaaaacttgattgtgcttaatcctatggtgaattcttggagtgccttctctcatatagtgatagtgtacttttacatgctttgtacttacataaaaaatacaggattttggctgtacaaattgctgactgattgtcacagtataatatcactaagtaattgattggttgatgtaaatcttttaataattgtatcaaccacgtgctttcttgttgttgagcattcacacaaatcaatcacctcgaatagattccaaatcaatctaagccttgatcaaaatactcaaacaaactcacgcaaacacacaatgttaaatcgaatcaaatcgggccttgaatccccttgggatgcagattctctttttattgagtataaaagtattataataatgcattagttacaaaaaggttagatagtgctatttatagacatgagctatttaggaaccaactaacataactgtctaagttctcaactaacgtaactattgttgtggtaaattgcaacatgcaagtatatgtatcgtttgaacaagtattactcacaaagagtgaggtcgatcctacgagaattgtagttaagtacgttaaa

SEQ ID NO: 111880 - DNA, 6154 bp, Cannabis sativa
  modified_base (141)..(145): a, c, t, g, unknown or other
  modified_base (226)..(228): a, c, t, g, unknown or other
  modified_base (290)..(295): a, c, t, g, unknown or other
  modified_base (408)..(428): a, c, t, g, unknown or other
  modified_base (568)..(573): a, c, t, g, unknown or other
  modified_base (800)..(817): a, c, t, g, unknown or other
  modified_base (4774)..(4777): a, c, t, g, unknown or other
  modified_base (6098)..(6128): a, c, t, g, unknown or other
ttagcacactcaattcaattgaaattgaactaccatattcttaatctatatgtcacgagaagatctatttgtcaaatttaacgagcagattgaagtacataaataatacaactgaactagaacctaaccatctcaagattnnnnncatttgatctaagatcaactaggttatattgaattgaatagatactacggtaagtttattatatcttatccaagttcaatnnnggtcccttctgatgcatactctatacatcaaacccaagcttactttaaccaatgccctggannnnnnataacacttatccaaggtgcaagcaaaatacattgtagattatcctatcaactaaaccctgtgtactgataaatcacaggagtacattcaatcacacaatcttgattactttnnnnnnnnnnnnnnnnnnnnnaaacaagaatattaatgtgataaggattcagatgaatttataaatcaaacaagtgatcacatgaaccaaataacacattaaataagtaataaaaataaatttgtttctttatagataaatgaatataaaagattacattnnnnnngagttttatttagggcacaatgcccaacaaactcccacttgcactaacataaaacaatcagtacatttcaattaatcctagattcagtctgtgtttttcaaatataattatagtcaaatttctagtgaatggatcaacttagttgccttcagtatcaactttcttcaccagtatgtccctttttgccacatattctctgatgatgtggtatttcctctctatgtgtnnnnnnnnnnnnnnnnnncgaggctccttactgttggctatagcaccagtgttatcacatagtaaaaccagtagtttttccattccaggaacaatgtcgagttctgagaagagctttcttagccagactagttccttagcagcctcagaagcagctatgtattcgacctccatggtagagtttgatgttgctgttagcttagcacttctccaaacaactgttccacctccaagagtaaataccatcccagatttagacttcctgtcatcaagataagcctggaaatccgagtctaaatataaatgcttcctaaagtatcctaagttatatcaaaatataaatgtttaaattgtaaaataaaatgcaataaacaaacatatttagttcaagcataagatacgaggcattaaaagtaaagaaaaatatataataaagcaaagttggccgtcctacaatgtaaaagtatttacaaaaataatgccactaggggcaaccattgtctcggccaaatgacaatttttctaaataaaaaaatatataataaataaaaaccaagtctacatggtgggagacttggatggatcttcttcttcttcttcttcctctgagtccactgcttcatttttcttggtcttctcgcagtaagccagtacctccgtagcaccctcaccaaggaagctcaagtccatgttaggattggctagccatgctctgtaaatggatcattttgcaacattgttgcatctctccttagcatcagcctcgacaccctcaagctttacctttacttcattgagctgttcctagagtttttggcgggcctcgtgtttgtctttggcttctttttgggtagcctcgagctcagccttgtggttcctctttagttcctcgcatcctttgttaagcgtgtgttctccttctgtgaatcattccattgctttgagatgacctcgcgttgctcaatggatttatagagttcaatttccaattgttggactttctgaaggccctggtgttgtgcctcatgagacagaaaggatgcctacaaaatatatatataaatttgaaagaaagataaataagaacaaagagaatgaagaaaggaactagccaaaagactaaagttgagactcctctcaaacaaactcctcgaagctgccattgttaaccgaatccctatcgccagaataaaaggatttgaaatggcaccaactagaggtggcatgttgcgagcagaattgcgagccgatacttcctgcttcactaggcaaggggcaagaagattccagcaagaccatttcaggtcctttactcgaagacttagcctggtgagtcaaaccttgggcttgctcgtcaatatgtacgctagctgaagtttgagagtgaacctgatcttcagctggctcaatgattatcggctgcgagacacgtttcttgttagtagtggtcttcctagatctcttcatgggctctggatttattcctgatgaagtttctgatgcaacaatcctcttttccttttcttgtctgaggtattaagaatattttccaaatccatatctacgagacaaagaagaagattaatcatcattcaacaatataaaatagaaaggtggggaataaactcccacttaaagaaaagttaccataatcatcagatgaagaagaggaagaactatggtaattactaaactccctagacccggtgatcatgtatatatcgtaagggtttattggagacaaatcccaatctgaatccagatgactcgccctatccaagttggtaccatactgcttggtaattccaaagtaggaactagtgcaactaagttggacatgaaattgagggtaccaaatatcaaacctttgagttatgcgatctatacaaaaattatcccagctataaaagttttattggctatccttaaaggttactaatgaggtgtgtgcggtcctaagtacagttggtgactatccacattgattacctgggggtgcttcttcttcagcttcccgagggattacttttttgagatagttagtgcgagccacataatctttgtcttccttgtagacaggaactgaaactttctgccacttagagtatttcggaactttgtactcgtaagtatattggtctgagccaaggaggttgacggtcctcagattggtcttattcaatataaaatctactgatttaagtccaaatggaagacctagcaaaattttgtgcccctcagccatctcgagggtagggattggtcttctagtgaccgctgtcaacacaatcagtgaaatatgtaagcaacctcaattttacaaatcccaaaaaaaaattgagaaagagaagacacttacgtataatgcaaaacgcagttgtgttgatgggggagagaccagtagtccagaagaaatcatccttgaacttggtcttgtttggtaagctcacaataatactaggatcacttgtgtgagtaccgaggtaataaaaacctcctaaactccgcttccttacgggaacagcttttactgggtaaaagtatacaatttctaggggagtaggacactcccaacccaaaatgtgatataagacctttaggcaggccagaattctgtaagaactcagaattaactggaaaggagcaattatgagataattacagaactccttaaagtattccctcaagggaagtactgccccagccttgatgtgctgcaggctccagtcgccaattcctgacgaggcactagtattggcttcgccacattcctcttgaatcaccctttctggtggaaagcagatgaattcccctggagcaacagatctaatgtgacatcctcgctcttctttaaggccataagattttaatacatttccgatataacctccaatggtccttactttggattcgatgagcttggcctcaaaagtgatggtgggatcttggggtgtctttcatgtaagagcttgggtagacatgatctcaaaattcaggtcacctggtgaaaaaacaacaatgactcgaggtaaaaataggggtctcgctaaagggatagaagttacaattcgtgatcctcgccaagctgcatctcgcaaaaaatggcgtttaccccggtaatctcttgcgaaaaccggctataacagctgtaaatttcagcttgatgggtttctaataaatgatccctaattttggcatcatttatttcaagtttgaatttaggtttttggattttgggtttaaatggaaggtctaattttttaggacatctgttagtaggaagtctagggttggaatttcataatcaaattgggacatatttgctaaaaataatcccaatttctagaaaaggtaaattccacttaaaccagaaatctttgaatctaataaacctaaagtttttccttaaccctaaaattatccaacaaaaaaaaataatctaacaaaaataaataaaaaagacaatcaatcgcaaaaatcaaagtgtaaatatcaaaaataaaggtaccaatcacttactgctttgatgaagattatcacactaagaagaaatctgtgactggagttgagatgaacgaattgattatcctgaaagtttctgaggttaaataaataatctgatgaaacatacaagaagaaagtcaaagatagagagggcatgcaaaatgatgagggatcacatatgattttttcgcagaatgatttgaaggtttaaaaggcagtggaaaagtgggtgtttatatcctcgaattttatatcttgggagcaatcaccattggatcaaagcaaataagatcaaacagatgagaacatggaaaaattagaaaagacgggcatttaatgctaatgatatgcctcaaaatcctaaaccgccaaaacccaaagcatgcaatttttaaaatttgggttaagacaaaaatacccttaaaatcatttaaaaagctctttttaattaaaaaagaactttttaaggggnnnntgttatacccaaaattcggctgcacttgaaaagtcgatacgtgtcctgcggtggaatatgaaccacttgatataataaagttatattattaaatgcaaaataaaatagctcgttgtaaatgtttaatagaaaatatacacaactcgctgactatatagtcttaagagagataagataaaaagttattaaaactgatatgaatgagacatgtacctgcctcggagtatatagtcaaaaagaatatattcatctatctgagtagagtaaatataatcacacggtgacctcggattacatataacaagacgggaacctcataatcttaactctaataaagaaacataacgtggaaaatcatctgctaacacttagcatttttttcacatcacggtggacaagggagataactcatgttaagcgagatataatcgtccaaatcagcattaactatcaaaaacgataagaacaaaaggtagttgagcagttaagcagttatcagatattatcccacatgcaactaaatgaaacgtgaaaattgtccatgtttcatgaacagttatattttaaactgatcccaagaaaataactgccaacctatattcatataaataggggtagattccacagaaaaagaaacagagcattttttagagaaattgtccatgttatcatgatgttgtattatgtactaaaaatatcattaatgagaaagactcgcgaagtatgcatattttaacaggaaaaccacataaaaatttctgaagttattaatttctaaattatttattattatttctgtcaaatttgtattatgtaaaggctcattaattttggttgacgaaaatctgtgttaacaaatattattttataaatatatatattaatctacacaatataaatacaagaaattaaatactaatatttttaatttttaaatataataatatatatgataataataactaatttttaaaaaattattactttaacaatttaaaataatgtaatgcacaattatagaatatatatcacaaaataaatttttaatggacagtggaggtggtggttcggcaaccatggctgggatgaagaagtgatgactggcggcttaacagtagcttgggtcatccgtgtagggtgatgtggactgtggagcaggagctccgattgtggcaaaaccaagtcgtacggacttgtataacaccaaaacaagctaggcagagctcaagggctcccaaacctctccatcttctcaacatgtcgttgacatcaactgtggaaccctaggtctagttgcttgtgttggaatatattttaccannnnnnnnnnnnnnnnnnnnnnnnnnnnnnnaacatcctaaatatgaatatctaaaa

SEQ ID NO: 111881 - DNA, 8270 bp, Cannabis sativa
ggagaaatttacggactccaactgacaataatatttgtattattacatgacaatcgtgagacttcaatccaagaatatttgttaaaccattgttcacttttttcttcaaatttgagcaaaatctattaagaaactccacgtctttgataaattgacaaaatttgaatttttcatcaggtttgagaacataaggggcatgcggcttcattaacttaccattattcccaatttcttcaaatcatgtctcgcattagttgtgtcctttgatttatcgttgtccaggattgtgccgaagagactgtcactcatattcttctcaatatgcataacatcaatattgtgtttcaaagtgtttgtacaccaatattcaagctcatagaagatactttttttcctccaattttgatcttttgcaatccgtctatgttttacgcctccaaactggtcatgttttccaggaacttgcgatacaagtttgtttacttgttctaatatttcctcacaagtaaaacgtcttggaggatgtcttctttctatttctccatcaaatcccttctaaatcgatgggtactgggcaagagtcttctatgacctacatgagttgtcataccaatctctcgtatcgaagaactgtcttcattacatgttggacaagctttgtctccttgaccactccatccagacaaactacataaagcaggaaaatcattaattgtccataaaagggctgcacaaaacttgaacatagtgtttatcctataatctctcgtatcacttcatcaacccacaactctttcagctcatccaccaatggtcttagaaatacatccatatctttacctggtgatttgggtctaggaataaatagtgccaacatgaaaattattgtcttccatacacaataaggtgaaagattatagttcgctaacaagataggccacatactgtatgctaggctcatgttgccaaatggattaaaaccatcggtagctaaacctaagccaatatttctaggttcactggcaaaatcaggatgtttggcattgataaataacaaactcttttacctttcatttgtattttgttatttttactattagtatagtttgttattttcttgtccacttgcactctgttttgacatagtttcttacagactgtaatgagcttttcttgtaatctttcctttatataaatgaaaggttcaactcatgagtttttcaaagcttttacaattctttgtgtcgagttcaaaattgctatagttaggaattgtattaataagcatctctttcatggtatcaggaagccattgactcgcgtcgatcatggatcctcgacacctagagcacacctcagctactccctccaccactgctcaaccaccacctactcctctgcatcaatggaatccgttccaaaactctctcaactctgctctcacagttcatcttgatcgaacaaactaccttgcgtggaaatctcaagtgattcccactgttattagccatggactcgacgatatactactcactggcgttgcccctgtctagcgacttgtcaccggagaaatcaacccagaattcactgcttggaaaagaaaagatcagctacttctcagttggctacgctcctcaatgacagagatgattcttggttccttggctcatcatgaatcgtcgtatgaggcttggtgtgccctggctcaaagattttccagtcagtccaaggctcgccttatttagttcaaatctcagctatcaacaattcaaaagggtaatctctccatatctgattactatgataaagctaagttgttagctgattctctttccactgctgggcatccaatggaagattaagtgatttgattatgcatttactaaatggcttggcacctgaatatgatcctgtagtggttcatgtcacaagccttgtagataatctttcttttgagtccattcagttgttattgctaacccatgaaagtaggattgaaagacactacaatgtcaatgatcttttctaaaaaatctctgctaatctcagcattaataattcaagaaatagcactggtgctcctaatcgattatatggttcccagaacagagggtcgtatggtaacatgaataggcccctgccagaaatccaagatctagtcctccctcgattcctagatttctttgccaagtttgtaataaatccgaccatactgctggtgtctatcattacagatttgacaagaattttgtcacccccaaaattggagatttgaaggcctttctcactaaaattgaggatcaagactctcctcaggcctactcatctaactcactaccagagttcgttgatgactatgattggtatgctgacacaagagctaccaatcatgttgctcaaggaatggaacaccttgattctgaaacaccatactcaagaacagatgctctcactgtaggcaatagcaagaaactttgcatctctcatgttggtaatacttctttaccctccaatcttcctttaaaatcgaattatgtccttaaagtccctaatattactaagaatcttattagtgttctacaactcactaaagataatcatgtgtttttaaaatttcactctacctgttgttttgtcaaggacaaggtcacatggactgtcttactcaaggggaggattaaaaatggcctatacatattgtctcattgttcctttgtcacaccagaggttcaactccactgtcatgttgccacatccacacctaggccacctatagcttctgttactagttctagatcagatcaagaaccaaattgtaataaaataactgtctcatcaattatcaattcttgtaatgactcttctattaataaaaaaaacaatttttagtctacatttcttgtctctactaaggctcttactatccaaaagtctaatgttaatttgtggaatgtcaaacttggacatcctgcccaaagaacacttgcaaaaatcttaactcatttgcatatttcaccaaaatttaaaagacttacagttttgtgaggcatgcaaataaaggaagagttataggttaccttattctctctttgagtctagagcatctcagcccctcgaattagttcatactgatttatggggcccctctcacacaccatctaaggcaggatatagatattatatacattttctagatgattttagtaggtatacatggatttttccacttaccctaaagtctcaagcttatccaaccttccctcagtttaaaatacttgctgagaaacagttcaattttcccataaaaagtgtccaatctgactggggaggtgaatatagatctttggccaagtttcttaaccaacatggggttcacttttagcatccttgtccacatgatcatgaacaaaatggacgtgttgaaagaaagcatcaacatataactaaaactggtttgacattgctagcacaagcagctcttgacttatcctactggttgtatgcttttcacacaacaacatatgttattaatagaatgcctacatatgttgtaggagacatatctccatttgaatgcttgtttcataaagcactagacaataattttctcaaaccatttggttgtgcatgcttcccctacctcagaccatataatgctcataaattaagcttcaggtctgacaaatgcatctttgttggatattctcttaatcccaaaggttatctctgtgaaagtaaagatggcagggtgtatgttgctcgaaatgtggaattcaatgaggaggacttccctggttctctatcagcatctatctctcaggtacattcctcccaatccttacctatacctactgctaccttttctacacctatacaacatactaatactcatactacatttactgagatgtccaattcaacaattcctgaagttcaacatgcaccaaagatcagcactatgcatccaccagcacctactactactgctatgcatgaaccagagcactgagttcaaactgctaatactactatccctcccttgcctactgcaactacctctcaaaaacttggtgaacctctctcatcatcaactgaggctcctataattacccctcttaatattccaacacaacctgttcccacaatgaccattcccactaagcctttaccaaacatatcccctcttacataaaacaccatcaactctcattccatgcaaacacgatctaagtttggtatacataaaccaaaagcctacaatgccacctcatatcccttaccagaatcacttttgccaaaagaaccaacatcattgaaacaagcacttgctgatcctaaatggtttgcttcaatgcaaacagaaaatcttgttctcattaagaataaaacatggaatatagttccctatcatccctcaatgactttggtaggcaacaagtaggttcatagaatcaaactcaaagttgacggttctcttgacaaatacaaatgaaagttagttgcaaaaggctattctcagactcttggtattgatttcaaagagacctttagtccactggttaagccagccactgttcaaatttttctcactcttacagtctctttgaattggcaaatcactcaacttgatgtctttaatgcctttcttcatggcacccttgaagaaactgtgtatatgccacaaccaccaggttttattgactctaaataccccaattatgtctgcaaattgaacaaggcattatatggcctcaagcaagctccaagagcttggaaccacaagctcaagtctaccatgtacaataatggttttcggttgtctaaatcagacaactccttgttcattaaaggatctggacaaaacttaattgtgttattagtatatgtggatgatatactaatcacaggtccaaatccaactgctatttctgctattactacagctctcaatcaagaatttgatgtcaaagacttgggagctttacactattttctcagggtagaagttcacagaacaacatctggcctttatctctcacaatcaaaatacattgcagacctccttaccaagctcaaaatggatggtactaaaccctgtcctagtccaattagtgcatctcatgttctctcccttaaaaatggagaaccttatactgatcatacattatatagaagtacattgggggctttgcagtatttaacattgactagaacagattttgccttcattgtgaataaattgagttaatttattcatgctcctactactgtacactgggatgcttgcaagagattgttcatatatctcaaaggtaccattcatgaaggccttctaattcgacatgttccaagattgtgtttacaagcatactcggatgctgattgggcaagctgtccagatgatcggaaatcaacggaggctatgctattttcctaggagggaacctcattttatggtcagcaaagaagcaacaagtggttgctcgatcaagcacagaacgtgagtttcgagccttagctaacacatcagctgagattaaatggctacactctattttacatgaactttaggtgcatcttctagctcctcctaccatatgggttgacaaccaaggagcagcctctctaccagcaaatcttgtgttccatgctagatcaaaacatatagagattggtcttcactttgtgagagaccaaatcctagctaaagagattgaagttaaatatgttccttctattgaccaagcagttgatattctcaccaaagctctcaccacagatcgattcctctatctcaagccaagctcaaagtgtgctccactccctttcgcttgaggagggatgataaataacaaactcttttacctttcagttgtatttcgctatttttactgttagtatagtttgttattttcttgtccacttacactctgttttgacagagtttgttacagactgttatgagcttttcttgtaatctttcctctatataaacaaaaggttcagctcatgagtttttcagagcttttacaattctttgcgtccagtttaaaattgttccagtttaggaattgtattaataagcatctctttcaggcatcaaagtccttgcaagctaacccatccaccaggtgacgcatcactcgttcatcctttgatttttcaatatggtgccataccatgtgtttagatgtatgtctttaacgatataatcttttcaaccgaagtgtcaacggaaaataacgcaacaccttacgagacaccctttttccattagatttctctaaagttatccatcgactacttccacaaattggacaaacatctttggttgcatgctctttataaaataagcagcaatcatgctcacacacatgaattcactcatagcccaaccttaatttctttcgtcttcttttttgcctcgtagtacgttgatggaattttatttctcttcgaaaaaggaagattcaacaattttaataattcatcatatacgctgatagaaatttttcctcgaactttcaaatgcagtaactttgctagaaagttaagtgaagatatccaatggcatccaagatacaattcagcttcaatctcttcaaataactcgtcgtaatattgaaaagagttagggttgttttgaacttcttcagttgttggtcaaatgaaatcttcaacaatgggaatcatctcgtcatcttcatcatctaaaattggctcaacaacttctgtttgtgcaacaactcctgtttctagcttcctgtggtaaatccacttttgataaccattatcaaaaccccaatcaaatatatgcgcttcaacaatatataaaggttcaaattgagtatttaagcatttaacacacggacacttaatttttctaccagaatctttataagctgaagccatcgccaaaaggcttgtagacactcctaatatttttaccacattttcttcaagaagtccaagacttatcaattgtcatctaaaagtattttaaaattttatgagttttagcaacgtggatacaataattaaaatcttatgctattttatgaaattttatttataaattaaattatttattagttaatttattatttaatgaatttcttgattttgattactttggagtccatagctaaggtaaatccataacttcggtatattgcaaacaaagtgtagaccaaccttgttataaattttatttgattctagactttatttttaagtataccaaagttacgatatatttgataccaaagctataatatattattttcaactatttttatattaattacatttgtaaaatattatgaatattttataaaagatgatcatattatttcatattttatgtatgacaataatcgtaaaactttttttttgattactttggagtcaacagttaaaggtaaaaccatagctcttgtatattgtaaataaagtgcagaacaactttgttcgagactttatttgtaaatatacaaaagctatagtatacttgtaaatataacaaagctatggtatatttgtaagtatactaaaattctggtatattctttttaaattttttttaataactatatttgtaaaataataacaataatttatgaaagatgatcatatttggtgatattttaatgctcggtatttaaaaataataatgaaaatatatttttatattaattacatttaatatttatttatatataattttaaaaaaataaatttttattattattaagtaaataaaatcaatcttactaatttaactaattttattattttaaataatataaaaataatgtaaacaaatcattttttaaaaattaagataaattttttatgcatttaattaacatattattaaatttaaaaaaaatagataaagttcttcttatttattttcttaattttaaatatgtaagatattccttttaatttattaaaaaaataacagattactaacattattttttaaaataaaataaatataaattaaccaatttttttttttaaaaaatattattatttaaaaatttaaattatttatataaatttaaattaattttttaatttaactcataaaattaaaaattaatcttaaataaaaataatttatattaaatgatatttttttgtctattttttcattcttctaaaagttttaaattttattttcaaaattatatacatattagttttcttttttcccttttctctctcttccatggcgaagaagaagcgggtaggaagaaaac

SEQ ID NO: 111882 - DNA, 3826 bp, Cannabis sativa
gacaacagcataaaatacccctttagattgtcaaaatagtgtaacatactagtaaaaatttaattgtttagctggacacctaaatagtacaaaaccaagcctgaaacactaaatggatcccaaaattctatatcagttccaatacatctagtttagtctagttatctggcaggtttaatgatgaactaaaacagtttcctaccaattctctttaaatatttttaattttgattttgagatctaaactttttgggcttaaataaattcggttaacaggttttagtatttatcagaattatgtcagcctaggctaatactgaacccacctaagacctcaactgaaataagaattcaagttagcaaagtagtttttgttttcttggaataattatcaacaaaatgttaactggataaaagaatacattatatttaatgttttatttattggtttccatgaaagtgcatcaccttgttgttgatcaagttgtggagagcaatcacactccggatgagggaagaaagataaataaccaacatcatgtcattagttttcactgcatcaagtcaagaacatgagatatcagaatactaagacaaaactaataaacaaatattaccagcacagccaatcaacaaaaactatgtcatagacaaaattacctgcaaaggacttaatcaactctgaaacgttgagatttggaagaagattaaacacatcctgccaggatttaatcaaggagaaaagtcactacaaaagggaaaaatattcctagcaacaaaaaaagggaaatgacaaggtagtttccatgtataatgaaatatgacacatataacaagatggaaaattacgcataagagaatgacagtcaaaaatttctcaacaggccacctgaccaattttcatatgttatcttacttttatttcactaaaatatatgaagcatgtataggcatgtagtaggtcaatgttctgaatatgagaatcacaactcccaaactttagtctattgtacaatacaatttctaaaatgcagtttgaaaaacaagatgtctctttaacaactttgattagccaccttataatggcatgcctgtatgctcaatcatttacatgaagccagttctcaattgaaataaatcaataatctctctcacctagccttgtaatatttgagcaacaaaaactataacaatttctatgtaagtacctaagagagacttgaacctcctcaaaccacgtaggaccaaacctcaaaccatttgagctactccactagagtgagctagccctcaatttttatggaaggtgataaaattataatgtaccagacaaagaaaaaagaaaaaagaaaagaaaaaaagcagttgtacctgtaggtgatacaaaatttcatggtttaatgggagtttctcctcaattacaaggtcaagataacctcgtatctcccgaagtcgtgaatccagacctttcaaggcagtaagttttccagtaacctgcacaagacaaaagaagcctaagttttgagctgtggacaataatagtaagtcagaaatagagcaaaaaagaggtgacagaaaaaaggccaagaaaaaagtactgcacaggaaatgaaaacaaaaaccaaacctccgtagcaagggtgctgatagttgtatcctttacatctcttagcaagtgttccacccctgtcaaagggaaaataatatgtaaacaaagagaccataataacaaactcatattaagacacgctttgccactggaccaacatgaatccatgaaataaaagtcactttcacaagaagaaatgaacgttaatggaagcaaattttgactactaagaagtcaacagcataccaatttcctcgacttcatgggcagcaatttctgaaagcacgtggacgaacaccttctggcttttctgggtggcattctgtaactctaaaaagttagtctccttgttgtagcatctatgatttaaggaataaggtgtgctctataatacaaaaaagattagctgaaagaacttgttcacctacctctttaacctcttcaacagcgcagtaagcttttgtgggaattcccagttccttaggttgtacatcaattatgacaagaacaggattaggaacatagctgtaacatcaaagtgaacaataatataattgattagcgccaagaaaacatactctatgtactggaataaaagttatcatcttattttcttactcgttaaataatccatgaatatctagatcgttttcccgcaattttggaccagtgctgtaccacccaacaacatgctccttagctgaagatacaaataaagaaggcattgatcaattttatcaaaaaaaaaaaacaaggatatgttggaatgacatattatcgaacaaataccatttatccgcttgaacatggaaaacattgcctcatggtagttatgatcaagaaaccatatgcttgggtccttatcatcttcttcaaaaggaactgttaatcaaagtttcgtaagtccaaataaattcatgaaagcaaaagctaacacttacaatttttattcacatagcccagacacattctagagcttgatcaatcaaacaacttcgttagcaaaacatacttatacatgatcacttatgttgccattttggtgcacatttataaagagtcctaggtactaatttgtgaagatggaaatattgataagaaaaaaagcatacgattgtaaaacaaatcacattaaatatatgtacctgagttgaagagaaaaacataaacacacagacgtatgcaaattttttggtttaaaagtatgataaacacaaatacttaacattaaaatcatttcttctttctcattttgagagtaatgccactcgttcttttaaatcactagactataaagtagaaaaacgtttagttctaatactttctaagcatacccggatctctaatactaaaattttcaacacacattactcttcgaacgttcttatttttatgaagtgaagctcagcactttaaaattctcacatgttaaacctaataacaagaacgcatacactgtaattgaaaccctagaaaagtaaaataagcagaattcgaatcttcatagccccaaaatctatgaacacagaaattcagatccaaaaaagagagcacggaaagtgtaaatacgaactggcatagctgttggtaacatcgacggtgcctttgaaggaacttccgagcaaaacaccgacaacgcgcttgcgggtgtccctggcgaccctgttgtagttgtcgacgatgctaagcaacactagaggatgaacgatcaccttctcgatcggtcgagctgaaatttgctgcgtctttatcacatccattttcttttccttcctttcactagaaaaaatcctaaattttctctcgaaaacaaaaaaaaaaaaaggaagtaattcagttgatcctgggtctgaggttttcgctttgttcaactttgcttcttctccaggaaacctcagggagagagagtgtgaaaaccaaccaaggaacttaaacgccgtatttttcgtcgttttattattatcatcagtccttattctgtcgttttattatttattttcaaaaaaaaaaaaaaatcagtccttattctgtcgtttttgagtattgatgtcgttcaacttttttttttctttcctagttaatttcggatgccatttttttttgaattaatcaggagttttattaattaaactcaatcaaaacaatagaacgcacttcagaggaacaatcctccaactgaagcacacaacctatagagaaacaagagtctcttgccaa

SEQ ID NO: 111883 - DNA, 2475 bp, Cannabis sativa
  modified_base (2011)..(2022): a, c, t, g, unknown or other
ataatatatgtatgtattaaaattaatgttgcccaagtgagagaatgttagactttttatttggcttacattaacttttattagttttattaaaatttggataaattagatagttctttgttgtattagtctatattgttggttatcatagttgatggacttagcatttgtgtgtgtaaagtctaagtgaagcaatagtgtgggtttttctagctggttgaagtctttgatgagcaggcccaattcaactagggttataaatatatatctcatcataattgtatacttttgataatcagataactaaaattgtttctggtttagagatttagagaggaagagttagttgatagtattgcactatcaaattgcgataattattattgatcaattaagtacgcatatatctaattattatatattattattgtgttttatattatatatgatcttgaatttatataaatttttttaacaagtgaaatatatataattttaatattagttaaagaggaaagaaagacctaatagaaaaagcaaataaaaagtgattatgaattttggtgatcaaattttaatatttatagaggattttggaattataattttttttttttttttggaggttgtttgtgtaatcacacagaatatttgggtcaactaatttcttttgaccgtcggcattcaaagtaggagtacatttactttctgatgtgtcacgccaattatttaggtaactaaatagtctccttatttgaaaaaaaaaacaaaaaacaaacaaaaacaaacaaaataatctcatataacacatttatacattgagaatggttaagaaaatctcttattactataattaaatagtgagtcttatgatataacttaaagaaaataatttttagagaatatcgctaactaataataaaatactacttataaaagatgttaggaactattagtgtccaataacaacactcttatttattaactatatcatattttaactgtgaatgctgtaattattatgtttcgaattctataatgatgctctagcttcaagtaaacctgcatctacaagttttaatgagactttggttacgactaggctgagattgttattataattataaaaatagaaatgttaaaatgtactagtagtgtctagcatttgctattatcactattaatttaattaagtatcgatcgggtcctatataagtaaatataataatttttaatgagtattgttagtcaatcgtaagacggcatatttagaagtgttaaaaatatatcaatcttaatgcgatcgaggtagactgatatggctatagcatggccatgtctttgttgttctcattattcataaagttttctgttgtatataattaattctggtctgcctgtgttttctctttgtaggaggtccatgcattttcatttggttactgtgctcgaattttagttgcatatcctttacaatagtattgtctcgatgtctcctagcctagcttgcattatttacatatatatgcactttattattagttgttatttcgtattattcaaccgaataaacaatagtgctaaatatagacaatcgaaagaagacatatatgtctaacttaattttaaggtaggtataatatttaattatatatatatatatacttatttcaaacattaaaatgaatatgaaatccataaaaaaatcattatatcatcattttaaagagaaaacatattagataattttttttgaagggtaacatatatagctaccacactgacaaacttagaaaaaaaatattaattatattatttaaaatatataaatttattgatttattttattgtttaataaaattagttaactatatttttttataagtaaatatttaaaattaaattcaattaattttatatattaaaaaaatataattgaatgatattaaatttaatttaactttattattgtatgttattaatactttgtgtatttatatatatatatatnnnnnnnnnnnnatatatatgtgtgtgtgtgtgttggagtgtggtgtggtaccaagctagctaattttaatggaggtccatatatgctagaatgagagttgaaaagtttgattcttttttagccaaatatatgtatacattatttaaccaggtgtcgttttgtagcatgattatgattattattgaggaggtggtttaggaaaaatcaccagaatgtatgaaatatggaaagaaattcagtggccgacaacaactttattttacactacaatctgacctagatatattcgtcctctacgggcatacctactttttacaatcataattgccgcatagtaaaattctgttaacacttaactcttttcatctattttttgctgttaactgccatggtggaatatctacgtgtacacagtgtaccatgtcacaattttattggtcaacataaataaatatttaaaaaaa

SEQ ID NO: 111884 - DNA, 2183 bp, Cannabis sativa
aaattaccccaagagatgaatatatcatggttattatgaagaattgtttatcaagtttggatcttgaattttattttagcaaaattttgtgagagaaaaagatcagttaagatgagagaaaatggtttcttaaaatttttgctaattttatctaaattttataaaattaaagttttattttattttgtttaaatacacatttctcaaatttacctttattaaatccaaaaacaataaaaaattgaattccttggactattggatgaaggagaaaaaaaatctaaacaaaaaaattataattatgataaatatgaattacaaaaatcaaatcaaatcaaatcttttttttaaaaaaaaaatctttattttcttactctttttctcatctaattttattcatctttcttcttaattaagactatgatccaaacttatatagctagagagtcataaaactactaattatacaatactaattatgaaattatgaaatttaaaattataaaaacaaaaatgatgaaaatgttattataggaaccaatcatacctgcatcattgatcttcttttctctatctcttttgtgaacaattttgtaataacaaaataacaaaccaacaataacaagaaaaggaaccaaagctgcaatcataggcacactccatttctttagaatattcttcttctcatcattattttgtgttggaggcgaatggtgaggtggtggcggggcccggtgcctgggcgggggaggcaaaaaaggacaaggaacttttaaaggcttcccacataaacctgaattatggtcaaaacaactttttggaaatcttctaagaacactcgtgtttggaatcagaccagaaagttgattatgtgaaatgttgaaaactgttagggttgactgatcaaaaggcggaattcctccttccaacaaattgtgttggagctcaagagttttgagattcggcaattcagtgaactcgcaagggattgtaccagaaaacttgttgtgcgataaaaccacgatttctaagtgaattaggtttgtgagtatgggaagtggacctttgattgagttgttgtgaaaatttagatttgttaagagagttaggttttgtagaaatgttggaggaagagttcctttgaggtgaattccttgtagagaaaggtgaacaacatgaccatttgaacacgaaatgcctacccatttggtgtcgttttgaatacaaggcggacctgtccattttgtgtgtagatcctcatttgagattagagaatctcttagctcgatcaaagcatctctttcttctggataataatcattaatagtaaccgataaatgagctaatggagatgaagaaagataaagaaaaattaatagaagtattattagatcattgtgatgaagatgaagatgatgaactactaatttcatggttgtatggattattagaaacaaagaaagaataataataatattaatgacatgattgtaattggtgtattttgttttgagacaataattggtgatgataatgataatgatgatttctataataaagtcttcttaccttatttttttgtttattgtttttgtgatagtttgacaaagtcctttaaataacaaatatgccatgattgatagagatttggacaacaaaatggtataatttaagactcttgttatataaaataataactaattaaaataataataacaatcaagattatattatataaacaatgtattaaaaaaataaatagttaaaataagcttaatatataaaattcaaagggtccattttgttttcattaggggatgtattttgtttactttctcataattcttagatgaatattattggaattaccgaacgttaatttgttaattatacaagaaaataagttttatatatgtaaaataaagaacaataaaaaaacaaaactcatcaatttaaagatataccttttttttttgcaatattaaatttacacataaaattctacaatgtactttttaaaagaaatacactgatcatgcatctttatttatttaggtatccgaaataattttttagtcaaattttttcttatgatcatgtacgttagaattatttaagacattttataaaattttaaataattcaaaaaaaaaaaataacacttaaaaaacaaggttcaaaaa

SEQ ID NO: 111885 - DNA, 8803 bp, Cannabis sativa
tgtgggtagatctaagatcctggtaaaataaattccaacacaaacctctgcaaaaactcctgcaagctttcttcttcaagagagaaacaaagggagtgctttatactgtacacattattgtattattaaaacacttgcccaaagggacaatacaattgactcagggagtagggattattaacgccctaaccacataaaaatcacttgtctattatttactattttatttatttttgaagctctgtttatttagtttccaaaactctcagtaaacaatatcatcttgagaaagccagtgtattagcagatgctttgagcaaaaaagttcccaaatagatttttagtactataataatttcacctcagttggctactgatatggttagggctagtatttagttcgtggtagggaaactgcataatttgacacttcagtcaaacatattagaaagaaacagagtggcacaagtagaatactctgagttagttaaaatttgagtggaggtattagctagtcaggataaggatttctcaatcttgaatactggaattttaatttacaaagccagagtttgtgttccaagtagtgatgagctcaagaaaaaaatacttgatgagctcttactacaccttattcattgcacccgggtaccatcaaaataccaagatcggaaacgttattattggtggtgtgaaatgaagaaagatttagtggaatatgtgtttaagtgtctgacatgtcaacagattaaggcagaacatcaaaaaccagcagggttacttcaaccattattaacgcttcttgagtggaagtgggaggatgttaaaattaactttgtggttggtttacgtagaaccacgggaatgtatgatttggtatgggtcatagtggaccgtttcacagagtcaacacactttttgcttgtaaggacaacttacacaatggaccagtatgcggagttatatctaaaagagataattcatcttcatagagctccgaaatccattatttcggatagatatctgaagtttacattgatgttttggataagtaatcagaaggctatggttacaaagctgaagtctagtacagcttttcaccctcaaactgatggacaatctgagaggatgattcagatactagaatatttactacgagcctgtgatatggaacttgatggttcatggagtaagtatttgtctctaataaaattttcctacaacaacagctaccagagtacaatagggacgactccctacaaaatgatgtatggtaggaaatatcgatcactaattcattgggacgagatcagggaaaggaaacatttgtctcctaaattaattcaaaggaccaacgatgaaataagtaagatcaaggctcggatgcttgcttgccaaagccaacaaaaaagttattctgatcctaagtgcaaagacattgaattttatgtaatagaacatgttttcctgcgattttcaacaatgaagggtgtaaggcgctttgaaaagagggggaagttaagccctaggttcatagggccatttgaaatactcaagaaggtcaggcaagtagcgtattggctagccttaccaccaacattattgactatacataatgtattgcatatttcaatgttaagaaaatatgtatcggactcgactcatgtcttgagttacgaagccctagaactaaagttggatgtatcatatgaggaacaaccatttcaaatcctagataggaaagaaaaggttctttggaacaagaccatagcgttgctcaaggtactctagaagaatagtaaggtggaggaagccacctagtaactagaattcggcatgaggactcaatatcaagagttgtttaggttagattttaaggacaaaatccttttaatggggggataattgtaatgaccgcatgattagattatggattagtaggacaattagcattaattattgatattttaggattatgcataattatatttattgtgcgtcccatttttagaaaatagggattagagttataatttctttaggtgtattatttctgctaaatgtgaagtttataatttttatgatttttgctcagtaacgatagaaaatgcgatggagaaccgttaaagtcacatgggttagcttaaaacctttgatttagggggacaaccgtgcatttgatgttaaaataaaggattaggcggggtatggtattagactaatttacccctaagccatttacttacttaagcttaaggaaagggtaattttttctttttactttggaaagaagtggattattcaattaccttctaaacctggccactaatattgagataaacctggtattatcttttgtgttaaggaaaaattaagacaataaacaattagaaagaaaagacaaatcatacctcttgacctttcactctttcttactttggatgaagcaaaaccaagggaaatcagggtgttcttcatcaattttttgtcaattctagctaaattgaaggggtgaagatccaaaggtaagctctagccctagttccctttgtttttagaaagttgtagctaggttgaatcatgcataaaagagaaatagttgttgtttattctcagctagttttgttggtttgatgagaagttgagcaagtttgagtttgaaaactcaagcttggtccaacaatggtggtttaagtttctatgtatatttgatgttgttattacttgattattgttgtttggtgtcattataggtattatggaaagtttagttgagtttcagaatgtcttgagagagatgcgaggtttctagggttttctacaaagaactggttaaccaattctgctagttttatagaactggttaaccgtttatccaggcaggacccgaggaaccagttttccatttagggaatccagtttactagtttgggtagtttctaaagccttagctttgatgtttcctcaatatttagggtattgccacgttatttattaataggaaaacttctagtttttagtttaggtccccgaaaagggttttagcaagctatttacctatttataagattgtgacataggaccttcattcaacgtgtgattttccattcaagtcaacaggcacacttgagtttggaaacgaggtaagactagcatagaatatatatatatgtgtatgtgtattatgcatgttgttattgtgattcatatactactaatactagtacggtagtggtactaagtgcattggtacagtatataatgtttaaagggtacgatacggtgttaccaatactagtacagtttagtacatagtgcaagtgctacaacactcagtagaactcggggtacgattcagccctaccaacactaatacgagatgagtacttagtgcatgtggtacagaggtcgtacttctattaagaacattcttgatcatctatttagccttgtggataggtgtatgggggcctaaatacaagtcggtaatatattatatgttatatacttttcttaccaagtctgttgactcaaagatattgttttcatgcgtatgtaagggaaaggctaaggctgaacagcagtgagtccaaagctcggggatgattgtacatgtcaagatggtgcgatctggagagttcagtctcggaacgactttggcttcattttgtagtcactgtgcaacatgtttgtaaagtttattttgaaaatgaatataagtttaaagtgggatcccaactttttgtatgggtatatgtatatatttataaaagtttaaagataaatcaaaagtttcaatttttcacgtttttcgagaaaaccatttgattagcgaaggtgtgcactgtaatttgaaagtcattgtagcgtgcctaagcattagtgtgttacaccacttctgcgttgtataaaggaaagtgaagcgcagtaagtgttatctgaaatacacaaaggaaaatgtgggaaccatgtagggggttattcgatgtcgagaatgttttcaaataaggatagcactggcctagtttggagaaagatgcaacggcattcacaaaaaaaaatatgacaaatgtcaaagacgcgccatctacagcaagtgccctctagccgaactcacaagcgtgactagcctgcggctcttttccatgtggggaatcgatttaattgggactttaccaacaagtatagtcggggcaaaataagttgtggtggcaatagactattacaccaaatgggtagagggggaggccttggtcagcatcattgctaagcaagttgtatccttcatcgataagtccctgatatcaataattaatgctaattgtcctactaatccataatctaatcatgcagtcattacaattattcacccattaaaagtattttgtcctcgaaatctaacctaaacaactcttgatattgagtcctcatgtcgaactctagttaccaggtggcttcctccaccttactattcttctagagtaccttgagcaacgctgtggtcttgttccaaagaaccttttccttcctatctaggatttgaaatggttgttcctcatatgatatatccaactttagttctaaggcttcgtaactcaagacatgagtcgggtctgatacatattttcttaacattaaaatatgcaatacattatgtatagtcaataatgttggtggtaaggctagccaatacgctacttgcttgaccttcttgagtatttcaaatggccctatgaacctagggcttaacttcccccacttttcaaagcgcctagacccttcattgttgaaactcgcagggaaacatgttctcctacataaaattcaatgtctttgcacttaggatcagaataacttttggttggatgaacagccaaatgtactctgggtgtacaggaccacgccctactccaccacatgtgagactactttctccctggcatatgagtgtgaagttttactccccatcaagatgaagctaaactcgttttgagtgaagaatttcattgaagaagaaaatgaaaaagttatggaaaaaaatttggatctcttggaggagagaagagatgcggcccaaatgaaattggcagtgtatcaataaagggtggcacgatactataattcaagagttgccttcaaggtcggagctttggtgctaaggaaagtcctcccaaacatcagggatctaggagcaggagtgtagggagtcaactgggaaggcccctatcagattgccaaggtcatcccaccaggaacctgcaagttggcccgcatgaatgatacagtaataccaagagcgtggaacgcagcacgcttgaagaagtacaattgttgaaaaggtgagtcagaagtactctttagttatttgagtttttgaaatcaaggagacggcatgtgaggcagcactacaagtttaatgaaacaaacaaattcttccttagaatatataaatattgcattgagatcagtcaatcataccttatcataggtagtcaaagtaatatctttcctccttcaaaaaataataataagggaggaaaatataagaaatgagctatgcacaaaactcaagtgtacatcaccattagttatgttgcatacttgggacgcaatggagagaaagtaaaaaaaaaaatctaagtcgacaaggactagctacccttgtttaacaaaagaaatacgtttttccaagtgaaagtcgcccaaccaaaagaggtcttgaaggatgctcatggcccaatgctgaaacgagatggacgcctctcaaacgttagcaaacactcacaagtgaagaggggatgcagtcaactacaataagcccctcacatctgagtaaaaggatgaataaataataagaggatgagatcactcaaagagtaatactctctcaaatgaaaacttgcttaccacagtggagaaagtcacttggccaaagagtaagtctcagagtcactcggccaacatcagttaaaaatttcactcaaccgcatggtgtctaaggtcactaggtcgtaaaaaatatatagaaaaaaaagggttaaaccaggtgaggagaatttgccactacactaaggtgttgttatgaagtgaaattcaagcaagggaagccccctatatacaatgggcacatcctcaaagaatgcaaagaagataagactcacaccgcagtaaggaaaattccccaattcactcagtcgataagaacacttaaaagaattcttgaagactgggagataagtgtcaaccccaaaaattagctctgataactttcaagattagtcacctcatcacccaaggattaatgagggcgaattcgattcacctacttacttgacgtgcatttctcaaagtcaccagtagtacttgcagacctcaagatatgtccaagtggatctaggccaatcccgtgagttatgtttgcatgtgtgtgtgcgggtcgggggctcgcatgcgagccttgcatgaattgtttgcgagtgcgtcgaggtgtgtgttgtgtgtgtgtgttggggctcatatgcgagtcctgcatacatgcaggtgtgtgtgtgattcatgcatgtgttttttgtgtgtgtgtgtgtgtgttggggctcgtgcgtgagcccatgtgggggtctcgcatccaagtcatgcatgcatgcagggtgtgtgtgtgttggggtctcacatgcgagcccatgtgggggctcgcatgtaagtcgtgcatgcatgcgggtgtgtgagggtgttgcatgaatgtgtgcgtgtgtggggtcttgcatgagagctgtggtgtgtgtgtgtgtaagtgtgcatgtgtgtgttatgagcgtgagttgggggctcatgtgtgagcgcatgtggggggctagcacgcgagaggtgcatgcatgggtgtgtgtacgagtgttgcgtgcgggagtgtgttgtattgcatcaagtgagttgtgcagtgtacgtgtgttgtggatgtaaggtgaaattcaaatacgcattaaagagaatgtcgttggaggaggaatcaaaggatgaggagtgccagagaaaagcgtaccatcatacctcctataagctctgagagtaagaaggtacgagtagtggagggaacgcacctgcaatgtctggggacccgaccaagggcacactgcagccatcacccatgcgatcggggaccacctctacgatcgaggaccacctgacaccagacaaaggtacgagaagcaagagcacctcctgcacctgcagtttgcaacctgaaagcaacatcttgtctatttgggaccactatgtaactcaggctattagagcctataaataccttattctcaagtgtgaggagggggttggaaaatcaatggtgtaactcacatattgaatgcaatagaaagaactcattctcttactcaagaaatctcttattcataaaaacttatatttcttttcatgtttatcttcatcatcatcttttttccgagttttgtttagatttttttggccacaaagttagttgacgagctcttaccatcaatatttatttatatatgttttaatttagtgtagtgtattaggtttaatttttattttcatattttaataaagatttcgtaaaaaaaaaaataaaatgatttaattttattttaagttaatttatttaaaaatatttatttatttagtctaatttaattgtctcatgtgtacgttgtgtctatatggacagtacaatatgtacacatggacagtcaagcatggaacttaacacttaaaataaataaaaatgacacactgctaagagaatatgagttttgattgttttgctgctaaaatttaagtgagagttaattgctagtaaagtgaaaattttaagaattttaccgcaatttactcttaattttgtttagtaaaatagaaaggaataaaagaagtggtattactttattatttataacttaattaaaaatcacaatgttttggactttttgttattgaattacatatatatcctcttagaagatgtataaggtatcataaataaattacatccaagggacaatatttgggaatttttgtttttcattgaattacacatactcttaaattaatatataacttgtatatatatttatatatatattgaagtctgatatgatatactacactatcctaatatttcttcgtaataaatttagaagttattattatttagtataattcgaaaagcagtgattgaaatcaaaattaaaaatcaatagagtaattagttaagaataattttttatatttaatattacaaaaaatttataactaaagaaaagaatatactacattataggtttactaataatattttaatatttgctttcaaaataaatatatttaaatatttcacatattctattacataaataatcttacaaaaaaataagaaaaaaattacaaagtaataaactaagtttaaaagacagttatgtttattctcaataaaaatataaatacatacattatactttttaaaattttcaaaaaaaaatgatttatttaagttttaagttttgtaaaaaaaatcttataaaatcactacaatagtatcgattaacaaaaataaaaacataagtgtagagaatggtaaatagaattatgtattgtattctataaaatagtatatatttatatacaaagctgggagactaaatgggaaactactaaataaaagttaccctaacttttacaactaatatacatttaatattctaacactctccctcaaggtgcagcatagatgttaatcatgttgggttttgtgccctaaataaaaccctttaca

SEQ ID NO: 111886 - DNA, 5229 bp, Cannabis sativa
tcggacttggggacgggttcgagtttgggggatgggggtcgggtggctgatggggatggcgaatgatcggttggagcttctcaaacttttttttttttttttctgaaagccctgaaaccgacgctgaaggaaacaaaatgaagagaagaacctgaggggattgtatagggttttattatagaaaaaaccttttaaaggttataaaaattaaagtgtgttagatcacgtgataggtctattaggggagataatgttgcctctattaactaaaaagtcgctcctaacacttttagggacgatttttttcgcccctaactttacacgaatttaagaaatagaaaagtatatccatttaggggcgacaatacgaggcaacattaagtcgcctctaatttgatcgcccctaaaagttaaatttattgtagtgatacttgacgactcttcaaaaccgacaagtattttcgactatagacgtcggttttaaacatttatttacttttgttagttacggtccttgaaaaaaaaaaacaatttaaggaccgacgggagtagagctttttgtagtaatgtttatcgagtatctgattcaaattcaataactagtctaaaaagatgagctaataaaattgcttctgattcggtgagcaaaacgtcatgcttgtaatcgagttgttcgtgattggtgagcaaaaaataaccacatattgaggggatgttagaggagagtctcacactatctaatgtgtacagaaacacatgatgcatgtactattctttttatatattaccaagtaattttaagataaaaccatatacaccttatcatacactcattttcttgatcatacacttacaaattctaacaatgaagtttagataaggttgagtacaattcgatccaccttttcctaactgatcagaataaataattaatctttacaaatgtataaaggattcctttttgctactactttctctgtttctgatagattctgttcgtgagctcaattatagttaaaaaattagaatccaattattctaagatgtcgtgtatgagtgtctgagatagatgagaacattcatgttgcatatctctcaaaatgaaattaaaacatgctattaataggtaactaaaaactgaaggcagctggaatctgcagatttacggtcacaatttattcttgagcatatttttaatagttgacaaatttttatagaaaaatgctgagaagcaccttatgtgtcaaccaccacaagaacatactattattggtataaatttatataagtctcaccaattttaatttaataaataatatcaaaaccgcatcatttggcgatgaacactctaataaattaatttgtatgtacgggatattatattaaattttatgaataactataaagttgtgttttgttggacaaattaaaatacctttattctttggtttatagattggttgctttgtccaacttgtaatttcttgcacatttttgtcgttttcttcttcaataaatttccataagggtgattcccagccactttaacatgattgatgaacaagctacacgaaaaatcacaactcttcatcgtatcatatatctataattattatgtttaaaatttctctactaaattagtaaagacacataaattttcatcactccatgagtagctcttccaaaaaaaagtctattctcacatagaataaatggtaatatatatatatataaataagaatattaagatgcaactctataataatattcaacaacataaattaattaacaaatttgttagtgtgtgttaagagacggtcaaagtcagttaaatcagttaggcgttgcttatgaaacgagcttgagtttgttatattacctcattaattgattagtagcttgtagaaataccctgttcgaattaacgtttaattcacactgagtaataagattctctttcttcctctctttcaatattttctaagagatttaacaggtgccgctgatcagtatatataataatgttttttaacaaaaccctgcaggttatgaaagttcattatgagcttatgactaactattcattctttaattaattaaaataatgcaaagaaaatgtcttcaacaataatgaaaaagtattaagtagtactccttgtgaaaaagtggaagattaaataacgtttttttggtatataatataagcagtgcaggttgatataaaatagaagaagcaaaaaagtgagtacaataataaagtagttcccctgctactaattccagaaattaagattaataatacatatgtggggttattaattaattacgtgggaagtcataaacattgttacgtcactttattggtttgagtgagattataatgaccaaacaatgatgacataatgaattattctttcaaactactttagccactcggaaatatagaatctagtttatattgatatttataattatatatatatatatctatatattcgtttaaaactataataactattaaatattgggtgcataaaagtaagattaagatgaagtgatgatcatggatttatgttgttgacacttgacacccatatccagagctatctgtgcgttaataattataatacaatatttctaattaatccaatttgtaaggccctacttttaagtgtggacacagtatctatgtgttaattatatataataaggaaagaaaacagaaccatattttaatgatgtatatatatattgtatatcattttattggtagcataggaaagacaaacactacatactacactacaaactttagagtgaaggaaaaaaaaagagacaaagtacagttaactagctatataattagtcatacaatatctatgtataaatgagttcatgcagctggggcataatcataacccccatcatcatcatcatcatcatctccatctccttccataataacatgtgtaactgggtcatgaataaaatcaccagtggactctcctcctgcaagaaactgcttcttgcaccaaactaacgtcccaacatctttctgggaaacgggagacattttcttggctgagagaagaaaaagggttgatttctttggatccaaaagctaatttaagagaaggaagagataattatataattggtgttgttgtaatttgttggtaatcagttgagatattgagtgagaagtagagttactggctttatatagaggaagaaaataagtattgagtgctgaggtgggtgtcaaccacgtgttgagtgtgaatacatgcatgggaaatttgcttcggcccgacgccgagagatggagggtcttatggggtcctgccaacatggacgaatttacacatgagaccccactcgaaattgtaaaaaaaccaaaaatattatttttaagatgaaagaaataaacactaattagttttattttaatttctatacaacacgcctcgaatcttctactttcaatatgcatatatatttcatttccgctaatcaagttttatagcttattaccatatagaaagcattcgaatataatctagtattccctttaattgaaacaatttatttggttaaattaccgaaattggtggcttctgccacatgggacgccaccttggaaaaccacgtggcatttcatcgaacacgtacgctaatttcgtgtcaaataatctgctttggcgagctattggtcctttggattactcttgggtcaaattaaagtgacaacatatatatggctgttgtatatatcaagagtagttaaagtagagctgaatagatttccaaaaaagaaagaactaaagcttaactaataaatctcagaaataatattatatataaaataatttcacaaagaaattttcaataagaagataaatatattttcataaatttaatcacaaaaaatatataattatttgtaacttgtaaattattaatcataaaaaatactacatataaaaaatatgtgcaggttaaaattatttactctgatattattagtcttataaaagaggaatctcttttattttgaaagataaactatatgaaaaaaaaaacctataaagtaattatttgtgaataaaatatacttatcttaattaatgtatctatgtcatcatgtgcatgttattaattccaccttctcttctaaatgcagctagcccttatatatgatattcatcaaactcctcgtcgaagtgtatttgaagaaagtttaatactctccatttggtgatttctgtcctgagacaaaattaattaccaaaagcgtatgtagattattaattaatattaggtaattaaaaaattaattactaaaaaatatattgagaaagctgtatgttacacaaaggcatgggaaaaatcatatagtactagtaaaatatatatagagttatgttaaaaataactataatctcattgtgaataatccatttttagctccttaatcatcacttagctctctaatatttctgttattatataactatgcctaaagtatgttcttgtccattctattactactttattactttattggtttgtgtaaaagagtgtgtgtgtataaggtcatgtcccactaaatggaattcttcttcacttttcttaagttgagttttcacaattttttttttttttgaaaattctcattttggtatcagagcatcctgctcacacttcaatattgtctagtgctagctaaataggacaaggcactcagaacgatgttgttattggtcagcaacctaaaattgatgctcagcagcaacaaactcaaagggtacaaaaccctgatcaaactagctccctttttggtcaaaatggaagttcacagtttggctttcaatctggataagtaagtattactcatactccctttggtaatactctatcacaaccttttacgttcaaacttgatcgcaataattatacactctagaaaataatggtcacacccattatcagaggccatagattagatggctatattaatggaatgaaataagctccacaagagtacgtacctactggagttgcatctgttgatggctaccaagtagggctgtaaaaaaaaaattgtaaaccgcctaaaccgaatagtttgcccaaaccgaatcgaaaaaattgataaaaattacaaaccgaaataacccgaaaaaattacaacccgcacaatctgttaattgggcgggttgaaaatag

SEQ ID NO: 111887 - DNA, 4229 bp, Cannabis sativa
  modified_base (27)..(70): a, c, t, g, unknown or other
tatttttcaaaagcaaaatttttaaannnnnnnnnnnnnnnnnnnnnnnnnnnnnnnnnnnnnnnnnnnnaaaagtgttaccaaacggcaccaataaaggaacttcatctaaacaattaataatgaagatttgacaattttttttttgtaagggaagatttggcaatttagttattttttcttttttcaaaacaaaaataaaaacaaagtaaatattatgttttgtaaaaatgttcaattgagcctctctatttattaaataacaatttagattaatatttttttaaaattatataaaataatacactgagttaaattcttgttggaatataataataacctaacatgtagatattactattagataggttatatatataattttcttttttgcacattggtacttttgattagggatgtggcaattcaggtcataatatgacaacatggcaaattattacgggttaaggtcataaaaaataggcgcggaccgaaattagatcgaacccaaatgacatgattattatttgagttgggttaagatttatgcatgtgacacgaaatcgacacaaattgaccaatttatttccaataaatcattaaaattatagttaaattattatttattttcataaaatatataattagaaaaaaattgatataagataaataatttatatttgatattgaaaattttattataatttgtgataaattatttttataaaaattaaatatgcgataccaatcatgtcaatcaacatttaccacaagtatagttgatacacaaacacgataagttaacacgaaaatacgacagatcagattagagttaggatttcttgacacaaaatatatatgggccggattagtattgaccaatcaaacaacataatacgaacacgaatatgacatgacaacacaaattgccatcccaacttttgacaaagagttataatgttggaaaagaaagattgtatattgtacttaccagtaagttcatttgaaacatctcctccacatttgtgctcttgatcatcttcacaaaaaggtgtttgatcttcttcaataataggtatcacgttttggtcctgcataacaaccaacaatatatcattaattatatattaacttatataattcgtagattgaaaggcaaaccaaaaataaaaatatagctagaattcaattagccattactagtaagaattttttttaacttacgctgtcatttgatggtagtgcttctggctcatgcaagctttcatagtcatcttcctttgaagtattcatggtgtacttgttctcaacttgttctttgagcaaatttggagtcaaatcattcagttgattgtttacggttgatctattagacttgatgattcgtggttctgcttcttctggtctaatgtctctaagtttttcaacctttctagatttgactgcttctttcaaaattgaactctggtgtcttggtggcctggtcaggttgttcaaactcccacttcttctgccaagtacttcattattatgccctctagcaacttttgctttctgtataattggcacatgaacagctttctcatccataactggtggaatgcgaggcttttcttttcttggttcaggttcttgtagttttagagacgaattctgatctgggtttcgattgttgtattccttaacgaaattagattcagccaaatttctttctacccccaccacatcgtctgtattagtaccttttttcaaacctttcttattcaacttttcttggttagactgtggctgctgctgctgctgctgcttctgttgaaaatttgttaaatcacggacaggtttcgatacactctttgccataacttcactactaccagtgctacccttttgttttcttgtctgtaaaacttgttttccattatcttgtgatactaattttccaggcacgaatggttgttgcaactctaaattgttctgtgatttcttttgacagcttgacaactgtttcttcttattattattatccattcgacttgtgttctgtttgtattgaattaccacattctgttgctcatcttttcttgccatggtcttatctgatcttgtcattgctttgctcccttgcaaattctcccatggcgatttttcgtcttccataacaacctcaaagtcgaaaggagaagaaggaataacctttttctctttgttcaccaccacaaatgaagggctgttatgaccaaaagtagtcttgttaacttctaccatcttttgttttctgggttgtacaagattctcagggactttagctttgtgtccaacaatcttaggagtgtctctctcttcttcctgtaccactctccgaaatgactgatctctctcgtctttcggtttggaaatgtagtttctctgtgctgtagaagttggattctcagtttcaggaagcttatctaatcccataagcttagcaatcacactgggaattcttgccttttctgatttagaatcagatgaggccggttgattctttcgttctgataatgtggaaagacttctggcattagaaccagaactgattgatcgattgtggtggtaggaacttgatcttggggcaggcactagctggttttcatggttgaagttactatgttgtgttgagttagtcagagctggtagactctgcttatggccatttcttccaaactcttggatgttttttcttgatggcttgtcgaaagagaatctaggaacctctagtttccattcctcagctatattcacactactttcgtcttcgtcttcctctccttcctcgagcaatttgattcggtttgtcttctttttcttctgtgcactactacttaccatgaactcagaagcttcctgcaagttgacaagcatcttcagtgagttctccaaatctatggctcctttcagtagttccttcccaatttcaatagagtaactatcaaagttaaggccattggagcaagctttaaggatttggttcaacttcattgccccttttgatatctcatcaatttgtacagaagaaaaggcagggaattggctagttgaaggcctgtgcctatcagcattgctaatagagcttcttcccatctgttgtagaaatccaagcattgaacttcttgtggatgaatctgttcttccaagttttccagcattttctattgcgaaactcaaagccattgaaagatctccaaattgctctgacccttggcctcttccataagacaccaactgttgttttcctgattctccactcaaggatgatctactacctccactagactttaatcgagtatttccagctctagaaccaacctatacaaaataattaaacattttttaagtttcacttcatttcgtctgttgaaattcaaccaataaatcagtaattgctttaccatttcgtttgttcttacatctttgtatcctttatagttttgcttggcataagaataggcatctgtaatgattcaccaataaacatatcaattaactgcaccatttacataatgaagcttttaattattatttatgtaattatctttcattttttttttatttagtaagtcagagtataaaaataaactaattccatatcctaattatagcaataaatactcaaagaacataatgttaatttattgcatgcactaaaaaataccattattccatatgaactaattctattcaaacatttttattataataaaaacttatacaatgcaatatgaatactaaacttaactacttacctataatagccattgaattagaacggtttgagctctgtgatgaagcagacattcgctcctttcggagacgaagatcatccaaaagcttctgagcaaaatctgacctcttggccataatggtcaccgtctgatcaactacaccaccttcaatatgggcacatttatgttttgtcagtcggcatttttcttaatacaggtaaaaaaaaaaatgtaacaagaaaaataagaagaagaagagatgaatactctgttttcttttgttggtagagtgattctttcaggagttgggtgaggtggtaagtccattccaaagtaataaatggtgaaatattatttatttatttaaattaaattgtgactagtttgacgtgaacgttagctttcttctatctgacatctgaggttgctgactttttttgtaatctaagcaataccaacgatttcaatggc

SEQ ID NO: 111888 - DNA, 5306 bp, Cannabis sativa
ccaaaagtatagattaatttcattcaaaaaaaaaaggtatgtatgaattaagaaattttaagggatatcttaatgtgctacacactacaaaaattaacatactattattagtacaatttaatattaatattttaatttaataaataatataaaaaattacaaaccacttggtccaataacaatacaaatgaattaaaggataaaaaataaattgtaatattccttccacattaaggaaaaaaagaagaagaggtgtaataagataaggattaaggcatcggaatagtatattctaattagggaaaataaaaataaataaagaaatgaaaaagaaaaaggcaacttaacttaaccagggttgaaatacgagagctaaatagaacgaacaacggtccagattaatcctcgtcaactcatccaacgactcatggtagctcatagtagaacataggttagggctatttctctccggtacagagaccccatggatctctgggtacgaccaatctgaatcactgaatcaaaatctaaaattagggtttggtctacgtgatggagatggactacttgacagaatttcccctctctcacatagatcgtcgtccaaggaagaaggctaggtttgcttgggatgttacccaatctaatgcaaaggtaccccaattttttcctttccttcaaagcttctcgaatcgatactcctatgcgctttttgtactctccatttgcttattttaattgaattttcttacaattgagtttcaatatcatgtaaatctcactgctttgggggagtaatcaaaattgcactgtttatttagaatatgactctattcctttatagctttggtaaattataaattaatgatctatctatgtttattcacggttccagataattgaaatcttagttgaagatctaaaaagttgaaaattttagatcaggagggagcattatgttggggaattgttaaatataaagcatcaaactttgtttagattatcattgacataaaagatatgcaaaacttgttttctatatcttgaccccttctcagtgtaataattggttgtcgttaaaccgtgtttgattttatagacatgtgaggattagaaatttggaaaaacttcttaatctattgtcatacctttggttaattctagtacttttggtttgctacctgcgttgccttttctgcttgcttgatttgataaaaagatgaggatttttttattaaggtagttgatggtagagggataagttttcttataagtatatgtttagtagagtatgaacaaatggttgtgtgtaggctcagtcagacttgttttgtggacaagatggtggaaatgggacaagctttggaccttcaagggtactcccagaccatcctagtctttttgttaagggattgactcaaagaagctctcccccatggcgagaagacgacaaagatgggcattacatgtttgcgctcggagagaatttaacttctcgctgtaattaaattcaaccaccattgaagagtttatttgcatttattatgttcttcttgttgctattgaagatttactaaccacattcccagtgcattttgatttttggtcactttctcaatggttttctatgtttggtgaaattataaggttttagttgttaggggttgggaaaccttaagcactatccaatgcctgcaggattcacaaacgtttgaatatgtttagtcatttattctgataagctatgtatgtcagattctgttatcttatttctcttgtgtgactagaaatttatatgtgaaattgttaaatatctctcacaatatggcaataatattcctctcatccctgaagaagacacaaaatgaattgagtagcaaagtatatctatactttaatcaagaacatgcctacagtctgtcattatttgctacttgttttaatctaaacttgatggcttttatttcttaagtactatatttgtttgaagcttttatgtctatgcttaaacttacactcttggttatgtatgtgcagataaaatccacagaaaaatcggtgaaggtgagctgcttgttgctgaatttagatttctcttttggagtattgtaaggatgtgtatttgattttttattttctcctcacatcatagattccttctataggtacatttggtcaggttttggaatgctgggatagggagacaaaggagatggtggcaataaaagttgtgagaagtattaaaaaatatcgtgaagcagcaatgattgaaattgatgttttacatttgcttggaaaatatgatagaactggcactcggtatgttaagtttattgaatgagtatatctgaggcttttaatcaaaatgaaatttatgttaattgttatgtgggtttattctttgcagatgtgttcaaatacggaactggtttgactatcgcaaccatatatgtattgtaagtatataatgattttaattgacttgattacccagctttacaattatcattttttgggttttaagagtttttgttgaatgtaaatgatcttgacaggtatttgagatgcttggaccaagtttatatgattttctgaggaaaaataattatcgcccatttccagttgatcttgtccgtgagcttggtcgacaactgttggaatgtgtagcatgtgagtagttgttacttccaatgttcctattatctttttctaatttcttttgttgtattataacggaatattaagcttttgtttcaaaaaaattataagtttgcgtactgctgtactttctgaagaattttatgataaaattgtgtagtgctataagtacttacgtttagctctgatttataaatcttgcagtcatgcatgatatgcggctcattcatactgacttgaaaccagagaacatactctttgtgtcttcagaatatgtgaaagtgcctgactacaaggtatgtttccctatagctgatttttttcccccaatctaattagctttcacttattcttaaatttaaaaaacagaagtcctttagtttgatattagtcatgcaactctttggttgacattattccaaattttaattttgttatttctttgtatgtaaaaatcagtgaataagctctttacgtattatttcaggtctcttctcgatcacccaaggaaggaatcttccataaaaggttgccaagatctagcgctattaaggttattgattttggtagcacagcctatgaacatcaagaacacaactatattgtctctactaggcactatcgtgctcctgaggtgattcttggtatgaactgctgcgttgttttcttgttcaatctaccctttttcatctttgttatcatatttacgccatgcttttcaggacttggatggaattacccatgtgatatatggagtgttggttgtatcttggtagaattatgctcggtaagcataatattatggagtcttgtgaatgttcatctatcaactatatgctagatataaattaccataggaaagaacttaaaagaaatattataatcgattgcagggagaagcattgtttcagacacatgagaacttagaacatctagcaatgatggagagggcattaggcccgttaccacagcatatgcttaaaagagcagagtatgtgccatttagatatctctactgatgttttaagaaaacctggagttcatcttttctaatgaatttctttgtatctctgttacataatatcgctacttggtcagtcatcatgccaataagtatgtgaaaaagggtagattggactggccagaaggagcaacctctcgtgaaagtatcaaagccgtcctgaagttaccccgtcttcaggtttgtctctatacacaccattgttttacatttcttgtatccgagtttggagtcttaaatgttcaagtttttggcattggcagaatctaataatgcagcatgtagaccactcggccggggaactcatcgacctcttgcaaggtctgcttagatatgaccctattcacaggctaacagctcgtgaagcccttaggcatccattctttaccagggatcattacaggagattctagttgaaagaggttgatcatatacattctcctcagattattgttacaatggcttaaagagtgttatacccgagttgtggtctggcttattattattttgagccaaagaaaagaaaaaagaaaaagtattgccttgaagtcgtaaatgcctttgacacttggcatagtgcacggatcaagattggctggtagagagtataattattatttcttattatctctgttgttgtgctattgtaaataatctcgttgggagagagtattaatggtcaattttgtaacttcatacaaaaagatatatgtgtaatgtaatgtcaccagcttctcatcttatatacgtatcggcatcccattcattgtaaacatgtgtggagttcacaacaagtttgcctctgttttttggattattactttgtatgtattgaaccaaaatgtctaaacattgaactagaccattcaataccttaaaaataattttttatgacattttggtcctattatttatttatttttcctccaattataaggcatcacgctgtgctgatttctttagtaatctttcggttttagacaatttcaaaaactaagtatcagatgtaggagacttataactttttttttttaatttttgattgggtcatcggtagatgtagatgagaattgaccgcaacaatgaactaatctttcaaagaactaaacataattccaaaaaaaattgaacaagaacaaggcatgtaatctaagtgactattatgatacatataagcaatgaataaggcatgtaatctaagtgactcatgactacctcaaaaaatgagagatcaaatattgaacaagaatcaaatcaaatttaaaataaaaaaaaaaagaagtagaaaaaccagagaattgaactcaaagaagctttctagtgtagttttttgttgtgtgattatttatattgtaacttctcaattatacaaggttaatgtatagcattgacaatagtttctggattgtactctatgactaaaacttaacaatgcccatgttgttgaatttaactgttatgcaattgttactaaaggagagataatctttttcaatgattcagaggatataacaatattgttgtctagtttggatttagatttttaggactatacaatacaacatcttgattattattattattataaggggagttatatttgcaccccataaaattataaatacac

SEQ ID NO: 111889 - DNA, 3709 bp, Cannabis sativa
ctctctctctctctctctaacaatgaagaatccgaacttactcttttctccttctattactattcttaaaatcaagacaaaaatgtagctaccaaacataattttgtaagagaaaaaagcatcaaagtcagccttattttattttatttattttgagaaaaaagttaagggagtcgactatatgagtacatagacctaaaagctgtatgccaactgaataaaatgtactaccattaataatattatttttcctgctccctgtacggcagatgttgccatcacctcacccgcagtccctaacattattgccatatattgcaggtcccgatttgaatcctagaacactgtctgatatcatagacaacatacgtgaatgttactatgttgctggtgggaatctcgatatcagccactttcttaaattcctcgttactttgcaagcagaatttagggtttctcctggtatttcatatcattatctttttccatatttctagttaaattattagagaaggctgtattttttttttccagcttcacatttccatgcattagtttctattgtctgtggtaagcagctaattaaataatttatgcagttacattgtggttctttttttaaggcatggatggttacacattctacttgtttcttagtctgcacattttcagttctgaactgggattaacatcatatttcatagctgtcatttgattattttctaaatgaaggcttttctttttcttgcagagaatatttttcctttcagatggaatgattccaactcgcgcagtacttttaagttagtctgcagcaagactttatcttacataaaggcattgggtgataattctattcttctttggatagtcgaggatgtaatacttgagaagatggtaggattctaattcttggtattgtggttaatatggggcgaatatcatattttaagatgtcattaaagtttgtcatgtacttcagttttaaattttctctgatccaccgtttttgtttatatatctcagtcagctaagcctcccctttataacttctgtgctatgctctggcttctagtagaattgatgaacttggagaccactaaacgtaatgtaccggcaaaacttagccctcatattgttacatcactaggcaatttgcttccaggatatcttatggatctcgcccatgtaagcatatttaattctttgtcactataatactattgatgtacttagttattgcgagtcttgtagatataaattgacttagattctgatttttaacaccataacttgctttggggattattataacctctaatcaacatatcaagcataagcttgtaaacaaaacaaaacaaatgccaacaaaaaaacagttaatttacttcgttctctcgaccaaaataatgcatttcagttgcattcctaaccaaaattgtttaagtcataattacagacaaaacactaagactgcctctcaatgtttaaaaaacaaactcaatcctttgtcaaggactcaataaattaccagaataaagagaaagacacgagtttaagtttgtctaaagaaaacaagttcgatgagccttggttttttttagcagttttagctaacttcttactacctgacttaaccttccatatagcaattggtaattaacaggaacctctccactcaaaagaaagttggctcaaattgtaagatatgtttgacagtttgtagtgtttaggtgcgtaggagttttgtttcaaaataaataaatagtaagaatttctccactttacacagtgaaatttaaagttaaagctagcacgattgcgacttgtttcactatggttatctctaaagcttgtagtacttacaatgtaatcttctgttttttgacagtgtatcccaaaacacgatgatgagaactccatgactgtgaacacatggcggcattttatcagcccttgcatttccttgttttgtagaaatcaaaatcttttacatcataccttgacaacattagcttcattgataaccgagacttgtcaaccgcatacttcacttgatcggatgcagtatgcaacagaagtttcaaatacagtagatgaagttgtctctattcttcatgtaatgcatgtgtgccatacatttcagaagattctttcttcattcaaggaagatgttaaccacattttgcaaaagattgtttgtttacaggtatagataataatatcgaggtgtgtttgaactgtagtagtacttgtggaactcattcttactaatctgttttacttcttgttattcagtcatcgaaggaaatcgacctttcactcgagggaaagcagaaagtacaatctgcaatccatcaagttgaggaaatattaagttcattgaactagaaagagacatgtagaataatattatgtaaatgtgagaaagaaaagataagaacaggagtttaatttggattcattttagtactttggtttttctttttcttttttagtttagtttattagcatttttgtctcctaagtggaaaaaagtgtattgattattgaatacactgtattcaatcaagttcattttatttaattattttatagtttttaactttcaaatctcaaatggtattgttatatgtgtactgaaacaattaaatagtgtactgtgttttacataatttagtttaaattgatttaaaatataaatatgcgggatctgatatttgtgtataggcaattgttttagtatttctcaatctcatatgtttatagaagtctaagaatattcaaaattactttctatttgtgtggcattaatctggattagggttagggatgcttaaaaaaatctaattgtgtaatagatacatttttatttgtttgaaataaaagaaaaattctgaagagtataataagattgatgaattgtcaaaattctaactaaatttgatctattttattttagagagcttcactaggaggaaaatgttctaaactttaatgaattctattttgtatgttatgtcctcattctaatttaaataaattaatttaatattcattaaatatttgtattttacaaatgaatattgttataggacatcaatggtgcttaacacaacacaatatggtattttagaattagtaaagtctattttataatagttattaaattagaatatgtagtacttatacttaatactaaattacattaataatatgacttgtgatgttagacattattagtgtcatttagtaattttctttgcaaaataaattaaattaatactctaagttcaattttggtcaaataaactcttaacaggactaaattcaaaattattgtttggtctagatttgaagttaccatgaaaaattgagcagatatattaatttgttgaaaatttatttaactgtattaatttaatcaattttggataataaatgatctaaattgtcatttaactaaacattgagcctaattattatttccatttttaaaagactatatttttgtttaatcttacaaaaaaatccacaaaatgggtaaaaattatattatattgttttaaattttgctattattttttttctcttaacaatacaataatattcgatacttttgtaactaaaattttggtccaaagggaaattttaattttttatgatttttaaagtataagtttgtaaagagatgttttttttttttttt

SEQ ID NO: 111890 - DNA, 2997 bp, Cannabis sativa
gcaattcccctttgtgttccactatcaagaatcattctctcatctctcatcgctctttgattttctatttttgatttgtggttattatttttggggagatttgcggaaaaagtctccaatgttaactttgatctagattattctccaacctcaagaaatagcggcaatagtcctcaaagtcgcattttttgtaagcctgttagtcctgaatttaattggcctgtttatttattcaaaactaccacatgttgaagctttattgatcaaaataataatttaaaattaaaaaaaaatatatattttaaaatcccaaaaaatattttttctccttcgtcttcttcaatagaaatgcctcatctcctctctcgttcaccgcaaaaaccagacgactgagcacgccctgcaactaatggaacccattgaccctgaaaccctttctccgcccttagtaactttctgctctcgcttgccttaagtcatctcgtcttcatctcaatgtcatcgcttgattccctctctcttgcctttgtgactggcatcttcaccaatggcttcacctccaacaagaaaaaatccacagtaagttctattttcttgtctttttcttatctctctctttctcggctccacctccctttttcatttgttttttattattttttttattttgtatacagatttggtttgtggtgaaagaaaatattgtgggtttaattggatttttattaacttcgtggtagcggatgtaactatgttaccctaaatagtgtcatattcgtggtggtgaggctagatcttaacggcgatgaatgacaaagggagcttcaagaaccttgggactcagggtttgaaccccgacaaaggccatggtggcctacctacgacggggaggtccgtggtggcctctatttttgatggcaatattttgtcgttggcggaacaacatccttggctcgagagagagatttggggcttaggggttgggggttggggcttagagatttgatgcctttacacacttcttcttccaagttcaatgaccatgtgaggattgagaaaaaagaaaaaagaagtgatgaagagtgggggttgggtgtggttggtggaagaagatgaaggagaaaaaaatgaaaaaaaaaaaaaaagtagtttttaagattttaaaatatatttcttagttttttttttaatttaaattatttttaattaaaattattatttagaacaataaggtctcaacacgtagaaatcttgaataagtgaacaaatcgatcaaattcaggattaacaaacttacaaaaaagtgaccatgaagactattgtttttatttctcgaggttgggaactaatctacattaaattgaatcttttggagactattgtttcaaaatgcccttatttatgattgtacactattttgaatcaaacaatatgtatttatttttctttttggatttgattttagataagaatatatgtgttttgattggggatgacaatattagatattgtactaggatttgattattatgggtttgttatctcagacatggtttggacggagtgattcatgtctgggcagatttgatttttttttggtagtgtcagtctaggttcaacagataaagtattagcgacaatttgaattggtcatctattctctctcctttttgttgttggttatggacagttggggatgctcaatattgattgtttgtaactagcgcctatgctatcctgttttgcgtcgatggcgtaagtgtcagtttgaggaactgacggtaatacaatattagactcttaaaaattgtggcctaaaccactttttttagtcgtgaccataaaaagagcctcaatttctatgacattgttgctatcagtttttatattgaccgaagtgattgacgttagaaagtacatactagaatcttattattttcatgaaaaattacatattattacaaatataacatataaatacacctaaaatatgtttctaattaatttaaacataaacatcttttagtattacttacaatatgcaacaaaataaattgactcattccttcagtttctatctcttgtatcctttatgttgagcacaatcaagagaatgaaatgttctacctttttctttatagacttccacaaagacctttgattacctaagttagtgtacgaaaatattctcaacacatgaaattaataaatatgtagagagagcgctttgaatttcaccatacagtgagagaaattttgtaagttcattgtgtgtcttacaacactaaggttacatctcattatatagtcattttgctacatgtttgtttcttttcctttcattatttaattaaataaaaaattaaattaaagggagaaactcccttgtggccgaaccaagatgaattttaaaaatcaaagattgatatgatagtatacttggaactaaaatgaatcttagaaaaaacaatattaattgatcattgatgctgattcaatattcacatccttggctaagtctaaaatcattcaaaaaaaattgaagcaaaggaggaaaattttatccaaaacaactaccaaccgaagcaaccaagctactaaaacatcagccagaagaaaactcaaaaagagttaattaaagcaattacatcagcctcccttctcttaaatttagtaaaattcaaacacttaactctagcttgtatttctcttttaacactattactaacaataacagttgaattacacgatagctcaaaaacacatctattacgattacactaaataaaatagaacacaacaacaacaatggcatttaacatagtatccaccagcccttgccgagcactacaaaaaatagctacttttagtgataattttttagtcacaacataaacttcacatttagtcacaacaaaaaactacttgtgactaaaatataatatttagacataagttgtcactaatttatttttagtcagaacaagtattgtgact

SEQ ID NO: 111891 - DNA, 15168 bp, Cannabis sativa
atgaaaatatatgaataggaatggaattagatttaatatgcatataaaaagtagatatacatatataaatatatatatattttatattcattttgcattggaatgacctttctacccattttaaaagggaatagtcattccactaaaacagtggagaagtcattccattggaattatattccattactttaaaatgcaatcacacataggaaatgaatgaaatttgattcttttctatttcattaacccaacaaaacgcacccctaatgttgaggtagctcctaacatcccttcattgacgttagtgaccaaaacaaagacattttgtattttgattatcaaaaaaaaaaaaaaaaaaaccctttacggtttaatgtttttggcaataaaattagacttcagatatagtcacacacacacacacaagaaataaagagcaaattgaacttacctttgatgaacttttcagtcgtttaataagcgcttccaattccctagtctgataaaccaacatttcacttctgttaattacttattaagataatgtaacttagatacaatttctggagaagatcaagttaccttgtgcttccttaaacgggttgctgcatgccattcactagaagaaagtctttcctcgtaactcctaaaaagagcatctgcatagtgtgcgagatgaaaatgagtttggccctgtctttctacagacttcttgtttgtagtgttctcaatttcagcaagtgctactgcaggttttaaatacttttcgagaatagttcttgagctgaattgtcatcaccaacataatattcaagaaaaggaaatacaaaacaaagatatcagcattatgatgtggcattggaaatgattcactaaatacttcaaagttcaaattacctgctagatctagtttctgccaaccacttcccaaccaagcgatatacatctgaagattcttcattacactggtaattttgagagatatattttgcaaggctgatagccatctcgtgctgtccttggctacgcaaaagctttgcttcttcaagctgaaattaaacattgttttgaaatagaacaaattagaagaagaaaaaatacaaaagagtgacaagtctttgccttgtgcagacagcccaaacataataagaagtaaattatcacatttttacaaaaatattgcacaagatataatacaagttaggcattgtaccctttacatatttactaccctttagtttgcttcagtaaaatttacaaagcataccccttttatttatttaatatcaaaacactactttttatatgacatatcaacataaaaacatccttgagcataattttggttaaatttaatttcaatatgatcaaaatatctctatttatatggcataatgtatctaataaataatcaaatttcaatattacttttttaagaattagaattcaagtttgaaagtaaaaaataattaaataatttgaattaattaaaaacctaaaatcacaaaaagctattggtttcaaattaaataaagaactaagaagaaaatatatagtactatataattaaaataaaataaaaattggttacattgataataaatttgatcaaaagatttttcaaatacatgacagtgtcttgttaaggtatttaactaatgagagaagtgtaaattggtatttaagcaaacaaaaaaaaaagagaggaaagatataaagtggtaggctttttgtgtggcaagtcccccacacaattcgacaaattggtccccaaacttctcttttggcgaattggctccctaactttaatttcttggtagtgttaagggtagaggattattgctgtcaagaaaatcaaagttggggaccaatttggcaaaagaaaattttgggaattaacttgccaaaaatatattaacttatttgttgagatattggttccccaacttaaaaagttaacttgtaaaactataatacagaaaaaattaaaaaaagaaaaaaaaaaagtaaaaggccatataaggagatattctcttcagaaaaacaattaaatatcaaaaatgttttatatatttatttattttttataaaatgttagatacactaattatagaattataacaatgaagatacaacaaattatataatgggaaaattcatttcaagacttgcaggaaattaagaaaactctcaatctcaaacttttcacaaagcagaagaaaaatattacaccaattgcatacaacatggaagtacaatattagggaaattagctttctttgtgggtttgacgcaactatttcactgcaacaacacaaaacaaaagggaaaagggaagaaataatacaaatacacaaagttcgtttattaagatgcaatcgactatgcaatgtctacaaagagaggggaagaaaacctggccccaagaattccaggaatcatacaggtcataaagttcaaatcagtaaccctaaaaagatatagaaagagaagagtttttgtacccgtccaagccaatataaggttgaatattgctctcgtgattccacactgaggagcttgtgctcgtgcaagaatgcagtagcttgagaaaatctagaaccctatcaaaagaacaggagcacaagcttatttaggcatcataaactggggttcagatcagtttccctaacattgaaatgcttccataccttacgaagagtagatgctgattgcaaaagatgttccatcatagagtctttacagcttaatatttgaagtagaactcgtctgaatgctataaatggttctatcaaattcatatgtaggtgtgctttttccaaaatggagctccaatctctgttcagccacgacaactaattgaattttcaaagcatatgttgttagtcaataatgtgataccataaatttttctgctaagattgcagcatagaaccatgtcacatcataaatatacctaaaaagacactgacttaaattctactagaattcgaactatttacgaaagttaactaagtttgcctatccattaactatgcaggtatataattaaactaaaaaatttcagtccacaccagaaaacaaaaggcaagaacatcttcacctaaagaatttttgtttgcagaatttgttcaagtaacctctataggtaaataaaataataatgagacacagttctatttccatttatcacaattatatattcccatattaaaatcccacatttctaagtgattctcatacaaagatggaagcactaggcatgcgctacgagaaattgacttataaaaactttattacctggtccaccgttggaatcacaggttctgaaatccctttttgcttttctgaagagaattttaatccttcagatggagatcctctccatcgtagatcccaagcaataccaagatgataaagaatctgcaatcattacagaataagagcgttgcaacaaaaccataaacaatatattgtggatctgagtaaaaagtatagtacttaagaacaagaaacctaggatatgacaagaaattttagtattttccattgggatgtaatataacatgggatattagttctcatggaatttcatggcttcagaaaattagataaataacgaagttgaatcacggatagagaaaagtgacttagtagtagcttagtaactagaaaatttgagttttcttatccaaatatgataacctaacaatgatttctggatatgttgcagccactgttcataattgctacaataatctatctatccaaatagaatcaaaatatagaatctattatcactaatgagagcatattaggattctaattattttttaaaagaagcataatgcacgggaagttgtaacgaatgcatacttcaaaagttaatttgtcatattggaagtagtgttcatcttaagaagtaaggcaaactagtacctgaagtttaataactgatgagtagatgtgttcagtgctctcctcacttgcatgagaaacagaccacacgagttcctaatcatttaaggcataagtaaacttctaggtaatcaaaattccagcaaaaagcgacaaaagcaacacaaaaagcacctgctttgattctcttagctttctatggaaatcactagagcctccctcttgcaatgctgtcaaacagctgtttcaagaagtattaaagcaaagacatcgtaagatacagagtcaatgaattacgtgcaaggtatttctccttaaaactgatgttctgaaactatcttttaaacttaggaaccataaatagtaggcaaccatgtgttcaggcatggtattgatgtaggtaaatcaagtatggtgaaccatagttctaaagcggggttcatcaactagattgtagcaaatgccacatcttgacaattgttcatttcaaatggcataacaccaatgtatcataaagcttcccccttccctcttaaaaaaaaaaagaagataaacagctagtttaattgaccaacaaaatccccaatattctttactagaaatatctctcttaacaacaaaaagccgccacaagtcagtgtttgtggtgtggtttttagctaattttttgaacctcactgcatagacctcaaaaccacacaaactgcatcacaagaatgcagtggcggtttgcactaattgccgactaatttaacaattaaacattgtaataaaatttcatcatataattcatagacaaaactcataactaaaaatgttcaaacaaaacaataaaataatagtaaactaagatattaaatacataaataagtcaataaataatacagtacaaactatattttattatttatttatcttttttcgaaaaagagacaaaggtcacttgtcttagactgagattctcccaagtttattagggagctgacaggaaatgctgccaaattaaagttacagtagcataaaatagagaaaaatagaagagacaatgctgaaaatggtactggtatattaatatcagggacttcaagagccttgttctctccctagctattacaagcttaaaccaatttccccacacccacaaaagactcactatatttattttattatatccaactgaatgcactgaaaccagccacaacctaacatagctcacataacaaactaaatgccagcccaccaaaaacgctatccactcaaggcactagtaacctttccttgtttgggcctaagggaatacacatgtaactggaggcctttcaggagcctcacttatggcggaggaaagccgtagtaacatgataaacatgaaaaattaaaagcataaaatacagaataagctcaaaacccgatacatttaggcctatgtctatatcctcataccaaggcactaatacgaaatagaaccccattccctagtcaagtcttgaaaaggtacaccctaaaagcttttgtctttaagacccatgttgcagtccagactttaaccttctcccaaaggacatcaacttcgtacaaactattatatattatgtgcatattttttttttgaaaaaaaaaataaaatcatatacttacataaagtattaattaatctataaaatatgctcccttttagggttctattaatacaaatgtatataaacatagtgtctaaactaattcatatttctaaggttgaccaaaccaaactaaaagtcaaataaaagtataaattatattaaaaaaaattagtatttctggaagagtgcactgcggtgtggattagattgctcaaagagtttggtgttccatggtgtaggcccattcgtgtagagtgatgttgttgtgtaaacctaaggggatagttctagattatggacagtagccattctggctattccttaggttgtttggcttgagagaaatcaaagaatctttgatggtattaagaatgatgtaggaaacctttgggagaatgttaaattctgggtagcaacttaggtttacaaaacaaaaggcattaagagctttacttttcaagatcttcttagagaattgggacttaattttcactaatttttcaaaccattacggttttagatagttttaatgtctaggagcttattctgttagcgttatgttcatagttttgtgttttatttttctattgtgtaactatgtttttcctctgccataaatgaccccgttataaacttgggacgggtcagtctaagacatttgacctgtctcttttacaaaaaaaaatccaaaccgcattgcacctaatagggttcacaaccgcatcatttagtgtggtgtgggcaatttgtgtggtgtgagcattttgatgaacactccttaatctatgccctataagcaggggcgaaacaagaaataaaattgaggtgggacgattacatatttttatatcatgtctgagacttcagaattttaataagaattataaaattagatataataaaatatttattaatcatgttaaagtgagttttatggaatgacattttatattttcaccttacacaattgttaggtagttcaaatctcaacaataatattttagttctttttcaaaaaaaaaagaaaaatgaagatgtgaagtgttgaacttgtaacctccttaaattttttttaaaaataaatatttaccaccacaccgaacaaacttacttaatattatttgagcagagaagtatttgtataaaggcccaagaaaaaatttatttacacctaagctccacatagcttaagacggtcccataatttcagctgggacgaccgccacacctagtctacacctagcttcacccctgcctataagttctactaggtacaattatactgaagaaaagaaaataaaacacattgatggctcattgtacctgtgcagattttcattgaaatgaccacttttagtttgctgactcaatgaattatctcccatgtaaagcaaggaaaaattccagtttcctgcacgccaagcagcctcatactgcagataattgatggccaaaacgaaagatgatgaatacaccaccaactaaagaaaaaaaaattaaaatttcaaagacaagggaaaagattaatattaagttaggaaacctgcaattcagtaaactctagatcatgctgaaaatgaccctgccttgaagtcagcccttggcaatacaaatccagcatgtgcatacaaccaatttgttgcaaagacctaataagacctttataaggctttctcatctgatcttccaaagcagaagttgctggattctgtgttggcaaagtttgttctagtagtggctttttagaacggtaatccatctgcactgaggcagctgatcgcacttgtaggtcataagattcaagagcctttccccaatttccctcatgctcaaaggtagttatttgagaggtcaactgataatgccatcaccccaaagaaaaaagaaaaaaaaaagaacaaccatgagcacatgcttatttcatgaatttataacagcagaaaaatcacagttgcaaaaggcttgagcaaagcagactttcactctttcatagatgtccatcagaattcaggtgataaagttctaacttttcacatgaccttggcaaatggaacatacaaggacaattaagacctattatttggggttccaatttaaaaccgatctcctaaaatattgtaatagattaggatatcattattgttatcgtttccggtttaagggatagaatcaggtaagatattaacctagccgttagaatatcccacatctatagtgtctggaaacttaagaccatttatatgagtatgagctacttcactcattcctaattggttttgagatgaactgcatatttcttgccataaacctcattctacttcctaaaccacattggcgattgagtcatcaaagattggtgagcaaaaatagtcgccatcttgagggatgttagagagtctgacattgatagtgtttggaaacttataaccaattataagagtgtgggatactacactcatcaccaattagttttgagatggaactcacgcttcttaccacgcacctcattctactttgcaaaccatttttccacattctaacatgctagcatacaaaacatcatgcaatcaactaatcaagagatgaatgaataagaaaaactacaattgacatgtgtttctctcctaactttactacaaagaatcgttaactagcttcttttctctgctcatgttggcttaagctgatatagatgttctgtactagaacacttgtaatttgtttattagcttcacaaacttcaaaaggtacagcagtgtgaaaaagtactaagatatacgtaatagtatctctctatttatatatgtgtctcacagccaccataacgctgcggctctggcattctgaaaaaattaaaagcctgcaatctggcactttgatagactagtgatgacatggcattcttcaaaacctctctctacccactaaattataacaaccaatctggatggttaaaacaatcaaagcaaagcttgtttagtgtattacttacctttaactacattcaaagataagttgacatgtattgcttaccttgtgggactgaatgattccatataagctgtcaggttcattgatatgagtgactgctgagacaagtatctcaatatgttgaggtagctgaaccaaaaagaccaaataatacagattagagaaatggtattaaaccagataatatctcaagctaaacatacatagatatacaaacataaaatacacacataaaggaagaaccatattccctgtatttatttttgtttacttctggtttggtggaattctttacttgtatttccccaattaattatacaagcagttttgtttttttagaaaagaagtgatgcaccagtttttaaacaacatattctcaacatcatctgaaactcaataagaaacgtatgacatgttatcttttagcaactaaccatttcaatgtcagaaaaatctggactgcccagtgttaggctcttgaaatgctcctcacaccattgttccacatacatcacagaagtaaagtacaagccacaaatctatacacatgttaattgaaattaacaaatgcaggtcaaaaggtcaccagaagtacaaaaaaagaaatattcaactagagtaggaaagcagcggaactcacaactgcggacttagcaacagcaagatagtcaatagaaagccaaaacacctgggaacataaacttgttagcaaatgagatagaaagcaacaaagtatcacaaaacaagcacaagactcaaaaactgaatgtgtttttagtagtttctgtacatagataattgttccgaattgtgaatatgcctaagtttcctgatgttgtattctttatttgtttgtgtctatagcccctgttcactaagaaccagagtatacctatattttctgaattaagacaactaaagttaacaaaaatacaaataagtggtcaaaaatacaaaagaaaaagaatctactaaaagtcttcaactccacataggaaaaaccaaggatgaaggatgtataaagtaacagaaactaatagccaggtcatgaacttgaaatattaatgcattaaacaaaacataaggccaaattatttctgtagccagttccagcgaaaaaagcaaaagccaaccaaaataatgtgttgcatgcatacttgcatgaaaaattaccttatcccataaagaagtcgacaatgtcattgtagcctttccagaagtggaacgtgatttagagccatagctagaagtcttggcacattaagacagaaagatgtatgcattgtgagaagaacccttgaaaagaaaaaaaaaacctctgtaaaacaatataatatggtaaaccttagtacttccttgcttggatggtagacaataagatctttccgtgacataacataatcgaagttcattcagggcattcagcaagacttgaattgacttcattaatctattagactctgtaaaaatatgttcttgcacctgcatataaagcaaagacaaaatattcaattcatttccatctaataatgtgcagatatgtagaagaatgcagcaagagactagtaaagtttcaccccaaatatcagttgaacaatataggttgagaaaattaatgaatttctgttcctgctccagaagtagacaaggcaaatccaacttttgccaaagtctataaactagattattttattaataaaaccacttatacgcataacaaaaaagagattttatatagactgttgactgataacattttttctttctgtgaaagattcgactcttcaatagttattttgtcttctagaaatcagaacttaagttgtttagagttatctgtttcctagcattaaatttaatacaaaggttacttcttttaaaaaacttacaattccttttggaaaaaaaaattacaacaaccattcagcaatattatagctacatgaaatattagaacaagaaatatgctaatgaaaagaaatgaaacaaaaacaaaaaaaaaaaacctgtaaggatatcaattgttgaagattgatatttaagtctctcctcccggcgagatttacaaaaatacttggtaacagaagctctgcaacttcaacttttaaaaacacaatctcttggcataatctgaaagccggaaatacaatctaataaatttgttgtggtattcaaataaaaagctaaacaaattgtatgatcaaatgctttctaataaattataataataaatctagatagaccacacaaacttcagaagaacatataataccttagaattacatctgtacagtagccacaaagcaaatgggcaagcggacaaatccatgtctcaaaagttttaccatgtgtcgcccataaagttgaagttcccacagaaattgcttccgctgatgagaaatttaaggaatcactaattgtgtatcgaacaaacatataaaatgaaagacaaactaataacagcatagagagcagaaaagaatgacagataaaagcacagatacatgactttgatttttctctagcattaattttatttttttcatcaagtcattagaagttgactaataccagtaaaagcaaaagaaaataactttggttagatagaagcaggagaatcttggaagtagtttaaaatgaattttattggcacagaattaatgtagtgaaagctaacactcaaaaattctttaaataggacttttatcctcatatattgcaaccttcacttcaatcatggcaattccaatcatcacattaagcaacagtacgtagctcttaaaacatacgaaaaacttaccttcaaattttctttctaaatctgaaaggcacttctctaccatctcaagacttatacccttagaatggacctgcattttaattatacaaactaatttccatcaggatggcctcaataaaatggttagaaggaacaaacgcagcagaactaaatttgtaagtcatcgttgaccctttggccaatgacctgtgagattgttcactcactcaatcaaaaggctgaaaggcaacagaattaagtaacaggtatgatttatatatatgtgcatgtatatttatattcccttcatataaccagacaaaagatgtataaacagccacctcaacaagagatctctcgtaatcatcaaatgacttcagagttctctgacccctttcagtagaaagtattccctgattaagaaaatcaagtatgggatcagttaataattacatcccgaaatcaccaaaaataaaaaaaaaataaaaagaaatagaactacaaatatgcaccagaccagacaaataaatattttatttgtacaactattttgataattgggacagccaaacacaaagattctcattgcttttgttttaccaattattgaaaccttgctattgattctgacacttttagcaaataaatcattccgcaaattgactgacaatcctggtactctgaatgtgataaagagaggcaactgtttccaaatgataagcctcctatttagttcacataggaagctctagactattatcatgttacttatattttctttgtatttcttatggcaaggatagtttgaggttttgcttctattatcaacaaggcagtgggattggagagactgttgatctattagtgcagtgtgtgtgagctaaggaaattattctggaatattgtaattgagaactgctcttggatagttttctagcctcttgaatggtatatttgttttgtccagattcaatacaaagtaatcagaggttaattcatttactgttgtgtatatcatctaacagataaggggaagaagaaaacataactcacccgaagagcttgagatgcagtatcgactattttaacagaatcatccagcagatacttctttaaaagttttagaagtgtaaccatgagaccttcagacatgccagtatccataggaaaacctacttctggcgaaaagttatgattagtagtagttctgcaggaatggagctccccatagcttgcaggtagatggaagacaacagaatatgggtcaccaataccagcctgaactcgagttgaagaacaagagagcatgtcttaaaaaatatggaagtacaataataaacagatactcatacacacacattaagaaaaattattgaaaatatatattgagaaaaaatcattaatattttttcaaaaaaaaaatcattaatagaaattatggaattgctttagaactcaatggagaataacaaagtaaaccggaaaaaataataaattataataataaacagatatacaagcgtatataaattatatcattaccctagaaataaaatcagaaaccaatgctccagctgtacttccatcctctgagccacaaatgcgcactagtgtccagatagcataaacaatgtcattgtcaatgtgccaccgtccacctttcattagatcttcagtgttcttctcacattgaaatgagtcctcagaaagtaacttcttgtgcagtgcttgtagactacaagaatataacagtgtaatagtgaataatgaaaagttgaatcatttaaattacagcaaacaattgctcattcttaacggtgaccctatattacttcccacctataacttcaagcttgttaatgaccgacggaagagacataaaaaggacaaactaccttgacaaaagtaaccttggcggaagttggcaagatctcttcaccaactaaattagagaaatagtatagcagaaaattcattagagaaaattttaaaatagcacctgaattaccccaaaggaaaaaactaataataaaaaaattcaacaacatcaatataacataccttcaacaagtgatcttttggagagtaattttggcttatttccttaagaaaccttctaaccttatcaaagatatctatttcaggaaacggttccaattcctgccaaaaaaaataaaaaacaacaaagattaaggagcatgattcttctgatgtacataagattgattgcaggaattatatatgtatcaaatagagctacactgatgtaatcatgaagagatggatcagaatccacagtcagctggaggagcagaggtaaaacttgagatgatttagctccagattgctctccattagctttagagggaatgcaacaagccaccaactttgatactaaaaactgtaacaaatggcataatcagatgagagcaaatgacaagttgggaggaggtcagtccatgaattgacctttgtctctttttcaaaaagaaaaatgagaccaaatgatgctagagaagaacagcagaaccaaaaaaaaaacttattgaatggataggagatacttgcctgaagttgctcgcccaacacagttatcatttctttggatgggttatagttgattgtatttagcaatgcagatatgatgtgaaagcactgatcttgtaaggcatcacaaccaatgaattgcccaaccaaatttaaaagataactgcatgaacaatcatttcacaagaatcaaatatagcaatgagcatagtaggaaaattcaacttgacattaataaagaaaataacacaactgccgataaagttgaggctgaaatagcacatggattaatatgattaataggtaaaatcaaatcactaaacattagtaaaaaaaagtttgagcatgcattttgctaaataaaaaatgaaaatattgtacactcacttgaaagtgcttgacaaagcaactctgtgaccaagtatatcgataagcacctgaatgcctgccaatcgatggcatttatgcctataatgcactgcggcagtaattttatagtgcagctctagaataaactgcataattaagaaagtaaatcattttacaaacagcatttgctgcaagaactgaaagagagaagtgaactgagaaggatctcaaacaaacaacataaatgcattatcaccatgaaaactctatccccgcggaaaatattaatcttgtctataacaccagcgcgtgtaggacaatcgtccctgcacacggccaaaccaaacattgcaacagaatttatagatagatgagaaagaaatactaaaagagttaaaaaaaaaaataaaaaaaaatactgacatctccaggaaaccatcaacaacagttcgaattgctcgttccactatatccagagaaaagaatgggacagcaggttctgaagcacttgatgcaagggacaaaatatggctgacgatggatacctgacaaagaagcagaaatgttgaaaaaaaaaatcaagagtaattttgacaacacctacttagttatgaagaacaattcctgacagatcaaagaagactgcattttgtagaccattagtcaggcatattatcagctggtttaagagagaaaacaaatcttttattccatgataatcaaactctgattacatcaaaacctgctttacagggattgtccacctcatataatatgataaataaattcaaagatagaaaggtgaaactctaaatcagataaaagacctcctttaatccattaagtctaggtgccgtttggtaacacttttgtttttaaattttttaatcaaaaaacgaaagtaaaatttttgtttttaaaaaatttatttttgaaaaacaa

SEQ ID NO: 111892 - DNA, 3727 bp, Cannabis sativa
caaatgcgtattggcttggactcttagcccacctacaagcctcttctgttccaaggaaggtacaatagggggactctctcaagatcagcctagctaacttcccttggaattaagtgttacgctagttgtgtgtgatttcattgtcttatttgaattttggtgcaggacatatcgtgcatcaaagatctgactttgttatatgaagctgctggaattgaggatgtatacctctcatatgatcagctgaaagtagatgaggattctttatattcatgcatcgggatagccggggcacatgatgatggggagatcgtcgttgagtcaatagaagagggaggatcgtcagatgaaggctttcagggagttggtccagtgggtcgtggtttatcaacaatgacaaggcctaccacatgagggagcttcctctccctcatcctaagatgagagctttattctccaagtaaagcgattaactacgatgcacgtatgaataattatcataattacgttaaagatgatttgataggttcataatttcatgacgagaccagtggcatggaggtgctggtatttgtgctaattttatgaatcgattttcaggtttgaaggagtggtatggcttgacatggccttgctggaagaatccagaatatggcattgccatggagcaaccctgctctacacaccacccaggcaacctgaaaccagcttctttgcaaactcactgatgcagattttttgcatcctcactatattgttgttgtacaaaaagaaaggcttattttgcctataggtgaccaatcataataattattctctaaatttttttgattgtaggatgaaattttgtacaccaacaccatatcctattattattgtacttgagatattgcgcaagaaaatatagacaatgttgcaaaaaagtgcaattctagtaactagtaaacatgctgttttttctttataaattttttaagttatatatatatatatattatgaatattaatattaattgaacaataaaattatattaaataattttaaaatatattttttttttgaaaatgtatttatcaaaagaaataataaatgagaaatttagtttagcatgtttaaatataaagcatgattgtttcaaaaaaaaaaaaaaatataaagcatgatcttttaatataccatcctatttaaagtaagatacttatacgttaaatatttttttctcttaaaaatatctttacattctgaaaacactctctttctctctctctgtcttgttgtttttaacctgaagttccaaaatctttgagctcaaccacctcgaaacttctgaaatctctatccattgttagatttctcaacttgcttgttttgtatttttttcttttgtttttgacaatatcgcaaaatatcgttgaatattactatattgcgaactatcgttaaatgtctctaattcacaatatcgttaaatgtcacaaaattactcaaattttcacaataattaacgatgtttagcgatgtgttgtgcattttttagtctcatatcacaaatacttcctcaatcattgctaaatacgcaaaatattaccaaatatcgctaaactttatccctaatctaatatttggtctattattgtaaatacatcgcaaaaaattgcaaaaaactagaaaaccaaaagaaaaaatataaaaaaacaagagaggccatgagagaaaacgacggcggggcttgcgaccgttctaggttgtatatccatatgtcaaaagacatttgaacatatcatccaagtggttatctggcacgtgttctctttgtagagaagcatcttgtcaaaatcgctatgagcaagacaaagttccatagataatctataatcgttggtcttttgttgtatatgattcctaggcctagttacaataagatttttctgaatagtacaagtagatacgcggtctcagaatataaactcgctttccatacattaatacatagtttgctctagaaatggatattaaaatctgtgaaaagttaaacttagtgtttatgaaattgggaaactaaaatgtgatttctaataaaatttggaaataatttccaaattacaattgagttattattctagctctgactgacactaaaaactattacaattcctagttcagttattttgtatctcattgtaagaaggagattcaattttatttcctgaaaattgaggatagttatcatttttagatagaatatctagaatatgtttatttgtgctactcattttcttagaagaaaatagagcaacatcataagtagatgtttataaactttcttgtcgaatgatgtattatctttagaaaattcctaatgaaaaaactaaagagaaaaattaaagggcaatttcgagaaaataacaacacaacgatgtcccagtaggcgagagccaaagttattattattttataagcttcttcattgtttcgacattgtaaaccctagtccaagttttcatcatagggatgagacaactagatttcacatttgcaaaatacttatcttttgagatttaacactgttagattgtctaacagatgaccatccgtaaggggacgatatttagcgccttgaggtcctattaaaaacaacaactaagttagaccaaaaagtgagatctcaagaaacgataaatgtcattgcctcacgatcacgctgaaaggagccgtgtataagtagtttaagaggcaagatctgggaactgtcacatcttggaagtagttttcggaagatttcctccaacaatgtcaagctacatgtgattacatcatgcacatcacaagcatcacttatatgaaacaaggcaagcaagaaagtctatgaaactatatactcgctcaatgtccaaagatgaacacaaaattgctatagctgtaggaatactcacggagcagattctagggaaacatattgaaaagagaattgagcaatctggatgatttttatgaaagagcagagaagtatattcgtgtggaagaagtaatggaggcttaaagaaaggcataagtgggtactcatcagataactcgtatgacccctgcaaggtctgttaaacaacataccttgatacctacgagctgccacacctagaggtgcctttttccttcaaccccaaaactaaagcatctaagaaatcctactaacagagaagattctctagttggcctcatgaagcaatagcgaatctacctcacttattttactatgttgtatgtaatcaaagaggacacctaaatttggcatccagtaatgacaagtgtaccatggtatttacttgtgagtttatctctatcaatgaaatgttggattcccatcttacatgtgatgtcggtcatgcttcatccatccattcaacttttttactatacttgacaaatgaaattgccaaaaataaacaaaatgatgggacgataaaagatgcttaatgttattcgcgcttccagaagagtgacacatggcacttccgacttaagatcagtccgtaatagcctgacccaaaatctctatcgaaaggacagatccaactaggggtggacatttaatccaatccaatatttttttcctcattcgatccaatccaatcaataattagatttgaaaaatcattatccgatccaatctaattagtagttggatttgaaaaatcatcatccgatccaatccaattaaacctcaaaatc

SEQ ID NO: 111893 - DNA, 3708 bp, Cannabis sativa
gggttttgaaaaaaaaggtatagtttttttatggtttaagtttttggtataataataaatttttttaattttttaagtatataaaatcaaaattcccatagtaattcaatgatttaaaaaaaatgtaaccattgaaatctcttccatatatatactataaatgaaaataaaacaattcttttatgcctttcattatcccaaaattaatattattgatttttaattgtgtgattgctctatttgcttgaatggatgtccaaataagtgtaaaaaaagatattagattcatttcatatattctttgttagtaaagatatatcttttttgaaatattttaaccttaattttcttaatagaatgattaaaccacgggaagcacgaattagttttctaattcaatataagattaacaacaaaaaagtaaaagtcaattaacactcaaaattgaaattagaaagaatgttatcaattttctcaagagaaaaaaaaagaaagaatgttattaagagagagaaaaaataggaaggtgcttgagagggggccaccaacttcaattattatattattgcgtttataatatttattacgtcggacacacggcgacaactagtaagtatataataaataattatattcacaaatccaacgcaataaaacgacgttggagcatgttttctggctttttgtttgtgtggctatcggcctatactaccccaaatcccaccaccttcaccaccccttcagtctcctctttttctctctcctcaaaacgacaacatgacaaccagcaagactcccaatacgacatcatcacactcaatccaacaagagtgttgcatgtgcggcgattacggtttctcttatgagctttttcagtgcaaagtttgccaattcagatcccagcacaggtaattaaataaatttaatttctatgtatttttgtatatttttttttctgattaaatttttgttgataggatttacagtttattgatcattataaatcttatgttgtgagttcatatgtgcaggtactgtagtaatttgtacccaaacatgcctgtctcttgccgaacctgcaattggtgcctcatgattcaaaacgaagacaaaacccaacactcatccaactccaattcatcttcctcctgtaaaaccgaagacaaaacgacatcgcctacgaccaagatcaacaacagcgatcatcataatcaggtgggttccctcattttaaggcgccagggaattcgcccaatgaacctccaacaactcagcgggcctatcaagaaacagaaatcggtcgagatcgtggtgcctccaccgtctccatcgccttcgccggtggcgaagtcgccgtcgatccggaaaagggtcttgacgaatggggcaaaagaggagaggctgagacgaaccaggtctgccgagatttcaaacgctccaagtccaactggaaatgggatcagttccaaacaggtctttaggagtaaggtcaggaggtacaagcttttagatgaagtttctagctaataaacataataatttgacaacttttttttttaagtgtgcaaagggaatagacttttagtttcttacataagtagatagttatggaatggctttggttcgatgtgggactgtttttggtcccaatttccatctatagctccatcgggtataatgaattatggagttttgttcaatatatgtacaggaggaggagaaatattatttactagttaaattaaataattcatatagcaatatccaatatctctttttttttttttttctttttttggatcaaaaaacaataggatcgagtaagtcaggcaaaagtttagttagagttttggtttcgaaattatcaattcaattgttggaaaatgataacggataatgttgagtgtggaactaaagtctcccattaattaagaatggacaatatttctattgataggaacgaacaatatcataccaaaatgaaaatacagtgttcgaggtcctaacatatagagttataaactcaaatctcattgtataactgaagagctatttaggagttaggaccatatccaatggttactgctgatagtttgatttaatattaagcactatatgattgagatatctggtttcattgttttactcatatacacgtacatggatgaacggagaactaaatgttattattttgtgttctcaataactaatcacatcacatgcttgcatgtgtatggtttgtgattattttcaattatttagagtacagtttcactattattggtttggggggtacgagtattgattacaaaggcgctttggccaaactgttatattatattttagtgattttttgttgagatcaaatatttatgaagtgtgagtacctacctacaagtccttcatgctttttcttttttaatcaggagtgcctatattagattccaaagtagccaagttgcactaagaacattttgaatgggaaagcttctcagattcctaggaaataaagataagaaaatcatctaatccagtcccatataaatgaagaatatgttgacttggtaaaaagcattaaacatatactagtagtatagtgcctcttcttcatcccaaaaaaccaagtatagctaattggaacccattacttccacgggtattatattctttcggcgtaacgatagccagaaaatatttgtatttaagaaaataaatacaattgaaaaaaatataatttcaccaatttcttgcttctcttctagcgtatagcatgggctaatgggccttagggtatgtatgtattttatggggataagttgaaaaatatctctttttttatctattaatcaaaaatacttttatattatatttttttaaaatatgcttacttttttgagtgagttgcccaatatactctcattctttacttaacatataatttgcattaacctaagatgtttaatgaggatatcatctataaagtgggtatatcttaaagaatatgaaaataaatgtaaaaattaaaacaaagtatagtgaatataccatataattttctctattttatgggggctgagctgagtttgagaatcagatacttttgcttaggtcaacaaatattttgttggtggaggctttaattcaacaaatgttttaggtggagattagagacctaagtcaaaacatcagctgaagtgttcaattagtgtgtaaaacgcgtacaaccaaaaccaaaattaggagattgtttggtaacttcttaaatttcattccaaaaagaagccacccactcacttcatattcatacttgcattgtaccatgtagttgtaaaattctagctgtatcatctatatatctatataatttccttactaatgaagatgacatggcaacttaaccatccaggattctaatttttctttttcctaacttttttgattttattttatttttgtactctaaaacattctatttacactatgaattaataatttaccattaatttcaaagatgaaaagtcacacattaatttaccaacttaatgacatgcattagtaaaaaaaattcattacgactaaaaatcactctttaatttaccacgttcagatgcattagtaactcaaaagactaattcatttaattaaaaaaaaaaaagcatattatttcatgtaatatcaataaccccaaaatccttttaataataataa

SEQ ID NO: 111894 - DNA, 1851 bp, Cannabis sativa
cttaattaatattataatctgtatttttcttagagcattaaaattgtatggtcattatggtgaattgggaatttggattattattatttattatttattatttaagtaaaactttgtcagataaagattaaaaatgtaacattgttacataaaattggagagattttttttccacccaataaaattcatggtctatcttataaagacatccttagccaatatattcatacacttaatcaacaaaattatatatatatatatatatatatatataaaaatctagatagattagtatctcaaatatatttaataaattttttaaaattctcatattagaaaaaataactcgaaagctttctcctctcttccatgacgaagaagaagagaattgttcaaaagccagtaactcagaagcttgatcatgatgatgacacatgtacgaaggatgaattggagattacgggtaacacaaaaatttgcgtaggactcaatctaattgcagaagctgtgatagaggagaaaacgagtcaggttagggattatatgggtctcgatctgaactcagaaactcaactccagcaaaatctaaaactaggcaaaaaaaaaagtggaagattatgtctatgttagattaggccaagatcagtttcatgaatcgacaagaaatcactggattcatttgctaaacataacacaatttatcatgatcctatattgacatacacagaacctcttgttaagaacgacatgaggattgctcaagttgatctagaggaggttaacgaacaagctgcgaattggaatacaacagtaatatgtatggtttttggggccgatcccctaatggttgtttttgaaggattcatcaaaacaatttagggatatcttgggatagctcaaattgccaaaatgataatgggtagaatatgctcaaaaattagtcatgcttttttttaatgaagaatggtgtgatatgtttcctaattcaatagctcactttggttaggaaatcatctcagatcactatttctgtgtcattacttcaaaagctttagtgaacattggtgtcaaaccctttttgttctttattttttaggctaaccacccagattttaagagcccgattttaacaagctagagaaaacatgttgctgccacaggattaaaaagtgtaaatctgaagctcatgagagtgaaacactgccttaagaagttcaacaaagaaacaattggagatatgggtagatcttataaaaaataagagaaaaatactcgaaagctaaatatttggcacaagataatcagagagacactaatcatcaagagcaagagaaagcagttgttgataactttagttgtcattagaaaatcttttaaaagttcttaaggcaatgatgtaaaatcaagtggcttcacaatggagatgataatacttctttcttttatgccttcctaaagaagagagaaatagaaaacaaaattgtttcttttgttactgaacagggttcaatcaatgataattttttagatgtagtgggtcacttcttaagccatttcagaggtcttatgggtacaaagaatagaggttccaacaatgttagtcctgactattttaaccagaaaactagactcaatttagaccagcaacttatgctattgaagcccttttctcataaggaaatcaagagacccatgttcaatattttagacaataaatctcctgtactcgattgctttgggtacggtctttttaaggcaatctagtctgaaattagatcagaagtatgttctgttggaaattattttaccaggatcttagatctattcacaagtatgttcattaacatccta

SEQ ID NO: 111895 - DNA, 3446 bp, Cannabis sativa
aaaagttattttgggcgtgtaacagtataaaagaaaaaaaaataggaaaatacagtaatctgtgtaaatttccccaacaatactaatgatatagtattttataattggtatgtatagtaatttttggtattatttattaaattaaaatacatcaataataatatatacatctagcaaaaaaataaaggtagaaattaaaataaaaagaaaacttggaaaagagagagatgaagattctttacatatcatgatcagcagacataaagtatcaaactttttcaatttctcaattcaaaacttagtcaacaaatttaattaataagattaaactgtgctctcaattatatgtcactatagtaaataaattaattaaactttgaaattattattaatcgacggagtgaatattgttataatacatgtccacaaatcatatgaaatttggataaaatatctttaacttacgtacgtggaagactgaacttagtcaaagtcaagcaaataataatttccactcatgtgaatgaaccacacatccatctatcccatttgggttcgttataaatattacaaacgcataacataataatcattacgtcatcccaagtacgtttgctgcatatgtaatcaataatagggtcaataggataccactattttaaattttgagtttgtaagtcatataaatttaatgattatttttagcgacataagtatttaatgtttttaaaattgtaatttttttttaatttcgtcaataaagactccgttttgaatttattaaaagaatatttgaaagtaactgatactgcatatttgtctagacccaataatctagaatttgagcattaattatatgtgtcatgtttaagacaataagagagtctgttcaagtgtaaaactctattcaaattttggtaattctcattgttaagcaaaaaattcacatttaaaatataaaaataaatacaaaatacaatttcacttatgtcaaattcatagcataagagtttattaatttaaagttcgactcatcgaagattataagaataacaacttaattaaaatcctattatttaaaggaaacactttttattttcaattatgatgatattataaataaattgaaacaatttggggaaaattagagtgaattttgaattgtatctgaactcagtacaatttaattaacatctacctatatacatttttttatgaaggatcaatccacttgtagttcagaatatggtattttaggatttgaatataagatatttggtatatgagcattttcaagaattatttactttttaaacatttttaataatttctaagtgaatgatcttttgtgaaattttaggatttgtactttataccattttgtggtattcgcgatgcacttaatcttagcaattaagttacctatgtatccttttatagtaattaaaaaaaggtagttcaataggtgatagtttgtctactaattttatatctttgagaactttgtgaagaattaacatactttgatattttgaaataaatgatcttagatgagattttaattgttaaggtgaagatctcatttggaaattgaggtagaagacctcacttgagtttttttgaggtaaaagatctcacttagaatttttgaggtgaatgacaacctctttagaaatttttattggtttgtgatcgtacctaatcttagcaattaggttgtctacttttgaaagaaatcaaattattgctgcttgaaaatttagaaaaagttcgagataaatgaccttttatgaaattttgatattttgtgaggttgatgacctctttaaaattctgaaattaattttaataaactcatttaaaattttataccgtttttgaatagttttaaaattttatctttttgtaacaaattgtttcttgaaaaccctttatttatttttttttttataaaaatttgtctcaaataaaaagattatttgactgattaattactccataatttaaagaaaaataatatgtgtatatgtataacaccatttgtttttcagtatgcattgttcatctcttttgctttgagatttggtttctatattttgagtacacttttctcacatatcattattattaattattgtctattattcttatcactttaattgactcagtgtcgttggctgaaagtattagtcacaaaaattataatttgttgtgactaaatataaattagtgacaatttgtatctaattattatgttttagtcacaagtaactttttgttgtgactaaaaatcatttttaattataaaaaatttatgttgtgactaaaaaatgtcaccaaacttaatttttgtttgtagtgaattatgtgatttgggtaaattttttttttttcatttaacaaaaatattattattttctcttatacatatgaatgtctaaagtccccaattgggatgggctgaaataagaaaatgtttcaacttttaattttgaaaacttacaaaaatgccctgaatatttttttatttctaccaacatcagattcttttgtatataacattaatacaacttcttaaattaaaaatacattcatttcccaaagaaaaaaaaaatacattttttgttgatcatttacgaaattaattttaaaataaaattatatatattttttaaactaacattaacgaacaaatttgttaactgtagataaatatttatgaaagtaaaacaactaaatatgcaactaaagagttggaggaaattacatagtatattcattttattttatttattttaatttttatctccacttttatattctttaagatatactcacttttatagatgatattcccattagaccccttaggttaatataaattatatgctagacttaaatagagagtgatggtatattgggtaacccactcaaaaagtaagtatattttaataaaatataatatgagggtatttttgattaatgaatacaaaaaaaaaagtatttttcaatttatcccaaagagtacttggggggctagagtcagggtcagttattagttaagtgaagccaaagacaaatttaactattttttttgtatttttgtatataaaattaaaattttacaaatttaggagattttttgtgtgtaaaatggatgatatttttcaaaatttggtgcctcatttaatgggccttatataggcacatgagttttggtacgtagcagcattgaaatgctgaaagtcatctcttcattattatagctccaaatccaatgatcatagagatttttacaaaaatattggattttgaataaaaatttacaattttactgttacatagattttctacaaaaatactgtctttttataaacaaccgtaaaacaacaaaacagaacaattaaaataacagtggaacaattaaaaaacaaccgtggaacaac

SEQ ID NO: 111896 - DNA, 2814 bp, Cannabis sativa
  modified_base (1369)..(1371): a, c, t, g, unknown or other
  modified_base (1953)..(1973): a, c, t, g, unknown or other
gtatctattcccccgcccccgtcccgtttccgactcgagtatgaagagttatatgtcgcgatgcaaaagaccatccagcagcaaggtgatcaaatttgagagctgagggagcagctagctcagcctgctccaaatcctaatcctgatctttcggcatctctggtagtgccacaagaagtgggaaatcgattggaaccattgtatgagcggttcaggaagcagaatctaccagtgttcgagggtggtaatgatccactcaaggcagaacaatggatgagtatgataacatccatatttgacttaatgatcgggtgaggtgtgccatttacatgttgcgtgaggatgcccgcatttggtaggaaattttatcacaggttcatgatttgaataacatgaccttggatgtttttcggaccctgctctacgagaaatactacaatgaatccatttgagctgcaaaggcagaagaatttatatggttgacccagggcaatatgacggcgatagagtatgccaccaagtttgaccgactggcaaagttggcctcagatgaagtagccactaaggctgccagaaaagctaaattcattcgggtgttggaggaacacatcgctcgagacgtgattgttgctgccaaacaacctaggtttgttcgaacctatactcaaatagttgagttggcctttgttgcagatggtgtagaagaccagattcgaaaaagaaacagtgcaagaaaagatttgtggaagcaaacacctagtgctggtttcggtaagggtactgaccttaatgaccgtaagaaaaggcccaatgaaccattagctataggaccgaacaagagattctaaagtaatcaaggttttcgacgtgttggaaacaagaattggcaaacttatccagagtgtccgaggtgcaagagacgccatcagggcgaatgtcaagctagagcctgcttccagtgtggggtagtgggccacctaaaaagaaaccgcccacaactactacgacaagaacagaagaaagatgacactcttgttcctgcctaggtatttgcccttacccaagtagaggccgatgttggcccttccaccgtgacaggtcagatttttgttgatggtaccttattgactgttttaattgattccggtgcaatgcactcctatatttcaaatagagtgattggaaattgcttagacctagtgatattttaccgcgtggctttagtatattatattattaacaaataaagtatgcaccttttttttttaaaaaaaaatactaaaataaaatacattcctctaaacttaaatcttaggtccacacatatatgtacactacaacaaaatttcatttttagtcacaataaaannngtgactaaaagtgaaaaaattgtagctaattataaatattaatttttatgttgtgatttaaaaatttgcggctaaaggtattagtcaaaaaaatcataatttggtgtgactaaatgtgtttttagtcacaatacttgttgtaattaaaactaaattagtgacaacttatatcaaaatactatgttttagttacaagtaactttttttttttactaaaaattacatttaattacaaaaattgtatattgtaactaaaaagttatcactaaaaataatttttttagtggtaatataatgtaatatcataaaatgaaattaattagtcaacaaaactaattataatattgagcattattataaaggggcgcctattggtccacaaactagcttcatttcattatgatccattgattacacaaactatagagatctctctctttttctttttcctattaaaaaataaaacaaaaactagagatctcttcaagatatgaattccatttaagaattagagctagaagttgtggatcaagtactatatatctatatggtattttaatattattaaataataataataannnnnnnnnnnnnnnnnnnnntaataataataataatagatttttcatacagataataataacagattagtacaggcaaatcacgacagagtgaggtcaaagaaattcctaattaactctacaatgtgcataaaaaagtcaactgtttcacttggtgctctcaaaatatataatgtatataatgtttttgttttcagtaaacaaaaccattaacgaaattgtggggatgttaattgtttaatatacatgtgaagtactacaaatttattatgatatatgacattcttttttggtactagaaagatcattaaaaaaataaacaagttttttaaagaatagatgtatatatggtgatataatattacattatcaatataatttatatgtatggatcaatcaaatggtagcttcacatgacagtttccacagatcaagtcatccagaccctacaatttaattaattaattattaataataagaaatgtaatggaaagcaaacatggtataattttaattataatcgcataactgtggcattaattaccttataatcaaattatataatataataattatatccagctttgtacgtagggtctcttttttgatgatcagaaggatgaatgtgtgtggatcaatgtttatgtctctcttacatattatattatgttataccttattatatatgtaggtaatatatagtcaaatattggtaaaatggtaaaatatttcaagtaaatattattttaaaatttatgtttttgtaaagattatgggatattggcggctaaaccccccaaacttttgggtttgtgacagttaaccaccaaaactcaatttttggcggctaaactacctgaac

SEQ ID NO: 111897 - DNA, 1829 bp, Cannabis sativa
tttttttttttttttgataactgttcctagaaatttcttagtatagtgtggttcgacttcgaactgcaatttgatcttgatatgttggtcaaaaatattattttgtggaactagtcttcatatatactagtcttgcaaatgatttttgatgtgaaataactagtgaccaccatccgtgtgtgcctgtggtcggtactagaaattatgctaaccaccgattaaattttcccattttttcatattcaagacaaattaaggttcaaatttggtgtcatcaaattctcatgagagtctcctttcgataaaagaaaatatatatctaaggagaatacaaactggactttacaacatattccttcgaaacaaagattttttttctttttagagtaataattaagtaatagaagattcatgtaatttcattatagttttaactttttatgccatttgaatataagattctaataataacttttgtttaatttttcttgttattaagttttggactttttttgagagagaagttattagtttggacttgatattaattagtttgaacatggctatgattatgttatgtaggggaactctcaataatatattctcgatgacacacacctaatttataaaggataagttttttttatatttacattagttacaatatgaagaaaaacaaatactcttttgtactttgagcacaagctcattagccaaatggtgactattagaccaaaaaaggctcgatcaaagaaatctgacctatgcaatgtgcaaagaaattagaaaagctggcaagcacatggaaaagttggcaaaatacatgggaaagctgacaaacacatgaaaaggctgacaagtacatagaaagttggcaagcacattccgggctacaggagcagtacctggccaaccataagagtacataggccggccaagccctaaaaaataaggctggccggttaacttctgcataaaactctgaacaactgagcaaagttgcgagacgggcccaacagttgagcaaagctgcaaactagtgtaactaatgtactaaaatcatgaacaaattaaagattatttatgttcatatatattttgtaagggaattgaatcagtgataaaatctcctattcattatcttttataacatttaacctctctatcccttcttatgttcaaaattttatttctatattttcaattgttttcctctgttttgctctgttagggctaggattgtaatctcaacttcaagctaatgctatggcaggtcgagatcggccatgtaagaattctacataagaaattgcaaagagtactgataaaaaggaaaagaaatgtggtccagcctctgatgatccaattctgaagatcaagttgatggggaaattactgggtacttaagctatttatatttcagatttcgaagaagaaaaaattgaatccctggacactctctgtttccaatggtatatggatgcgaagtaatggtcccagttgaaagtactattcctttccacagaaggaccaactacgatctagtcaccaatcaatcattattacaagaattcttgaatcttgtagaagagctctaggaagagtcgcaaattcgtctagctgcgtacctaaggaaagtggaaaaacacttcaattttaaagtgaaaaatagaaaattttccataggagacctggtcctaagaaggttctttccagtctcacaagactacggagtgaacaggaaaaccatgaagagcatgtcaatgaagaagtagatgaacaagaagatcgtggtgagaatattgattatgatgttcatgatgatggtg

SEQ ID NO: 111898 - DNA, 1606 bp, Cannabis sativa
cagaaaacaataattttacttgggttttcataaatgcatcaaataaacttcattctggtaaaagaagaaaagaaactccatggtaaagatatgaattatatttttgactttgaacacattttcaaaccaatagttcaatattcgttgggtctcataaacaatgagaaaaagttagttatagctatatttgaacaaattcatataaaagctaccttccaggctttatgataccgctaacatcgttaaataagctgatcttagctttagctgaacctaaacctggaatctttgtaaacccctgtaataatatattaacatatttagtgtagaagatcatatggataaggacttaatcataataataaaccatgtacttttatataattgaaatcaatcaatcaatcaatgactcacaaaaatcatgctcttaaaagaattccatagagttggcagaggctttccatggacaacctcacactctgcatcaattctaagatttttatacctcacctctacagtaggcaatttcacaccaaccctgcatattccattccaacttaaatatttttctgtttccaactacggaaatgaaaaaatgtacagtaaacttcctgaaatttatcactaatttggttctcttttaggaaaatctacgatagtgttcaaaatgaaagagagaagaagaagaaattgttaagtaaagtaagccttacttgtcaattctatttctgattctcgtcaagagctggagattatcgttctcaacgtgtttgataattttctcaatgaaacaatgtcgttcttgagctccaagcttggcaacatcaccaccataatgatgaactgtttctttatcaccattatcgtccttctggtctccattatcatcctctttcgatcttaacctttcaaacttcagagccattctctctgtttcgtcgtcattggctgaagatcccaagctccttattccaacctcggccaactcgattctcagtgactctgactcattgtcgtctgtccctaccattgacgccatttttggctactcaacaaagctaatcaaatctaaaagctatagttgctgtagttacagttactacagaaacacaaacaccatatatatatatatatatgtgtgtatatatataagagttggaccattttaatataagtaaagcttattaagattttgaaataagtgattatatgttaattgaagccatatcaaaatgaatcttttgaacatttttattaattattccacactattttcacatgaactataattaatattaatggatttaaattgatgaattgtgagaatattctttctcataatcacaatattgtttggaatttaattaaaacacatatttatgtaaattaactaatatatagttaagtagtatgtactatgcttgagatcgatgacagaagcatgcatgacttaaattaccatgatgcaccaaaaattaaattataattaataaatgggcatataaatgtatacattttttttaaataattacaaatgggcattttagataaatgtatacattttttttaaataattacaaaaaatgtgcaaaaaaatacaatttta

SEQ ID NO: 111899 - DNA, 2055 bp, Cannabis sativa
gtttgagtacttacatagtaagctcaagctgtcaaatatgtgatttgttctaataaaattagagatttgagtttgagcatatttagatatttacagaatatgatattaagttctttgaacttgtgtgattttcattattattatagcttttgtagagacaattgtaatgtgttatggattggattggaagtttgaacttgcttaggttgaaagagaggaacttttgtagcaaatgattgatttgttgtgttattgcttctaaactgattaaatgatatagtatgctccaaccgtccgatatgtgatttgctatgataaagtttgagttttgagcatctttagaatatgtttgagtacttacatagtaagcttgaaaatgatggaatggaagtttggatagaatttatgatgtttgaacttgtttagatgattgatttgtgttcttggttctaaatcgatatgtgatttactctgataaagtttgagttttgtgcatccctagatacatagcaattgatgtaagttctttacaactttgatgattttctttttcataatagcgatcggttattggtttgctatcgaaaactttgatagttaggtattttcttctgtgttcttacatagcaattggtatttctttgttatgatcaaaagaagtagctcaaatggttgattatgtgagttacatagcaatttatttagtgttgaaaatgtgtctatagagaatccttacacaatttcaatttgagcatttcttgatacttgcataaacaagtgtggtggtaatttggatgatgtgttgtatatggttttttctcttcttcccttttttgcaatgttgatatgagaattgattattattcaagaattttcttggttcttcatgagtatatgaatatgtgtgtgcatagttcttcatgagctcatccaattttctctatcaaacaatatcttttctttaagttttaattggttttaggtatcaaaagaatggtaaaagtattaagaaaaatgttcccacttttcatttagataattgttggcatttgtgtgtccaccaccacaagatgtcatacgactgtaatttaatatcaagtcttacatattttaatttaataactaacatataaaattgttaactacttattaggccatctcctcatagtgcactagtgtctaacatcaatactctttcattcatttacctaagtatgagatatgatcaaaactcacaaaaaaactaagtcaaagcactatttttactttagtaaaatgattcataagattggatgagactaaaccatttgaaaattttcagtcccttcccttttcttcttacaatcccctcaaaaaccccttttgcaacattgcaatgtatttgatttgttaataaaatcacatgataacattttattctatccaattctactatttaaacatgagcttactcacaacaagttcactagtgttaactttatctgaaattggtttatatgagcattgtatttatctataaattctaaattcaaatgtttaaattataataaattggagtagaccatgttccccatttattgtaatctaattgaatgtagttgagttgtaccaaaaccaagctaagaatccaagggctccatgaccatgttcctcttaagttttcttgttctcttcctcatgtgtggtctcaaactaagtagccaaaatagtacaagaccatgttctcttgtatagtttcaaccaagggctaaatggtcattttcctctttctataattttgttctttggattggtaaaattacctaacataacaacaaccagcttcataaaagtagccatggtttcttggtcatctatgaaagttggcttaacttgtgcttgaaatgtctaatagttgttctcttcgtaaatgtgcgagaacaacggtatttcgatgtttaagtcagtttgaaaaccgctaaaattgaaaagaaaaattttatttacattctaaaaatttctaaagacactctattttaataatttttattttatataaaatatatatatttaatt

SEQ ID NO: 111900 - DNA, 4584 bp, Cannabis sativa
ttacataaaaatattgcataaaatacaatttaatacaatacaatacaatacaatacgacttaatacgtcattccaaacgagccctgagtgacctttttatcacccaataaaactccacactttatttcaatgaaaaccacaaacctctcaaacatatctatctcttcctataaagtggtacgcatatttatatccatatgacaactttaatttcctttcaaatatctttcctaacataataatttcaacctttttccaacaattaataaatatataatttccaccttctataaattctttctttttcttaagttttttaaattacaaaaatctttctatttgaataaaaaattaaaaaaatatattttgaacttttaagaagctattttaaaaataaaataataaaaaaaaaagtgtcttgataaatctatattttaatctttttttttaagaaaaaactctcacttatttaattattagtgcttggatattcttatacataaaatatgagattatttagaaactagtttattatatctaagttggcactacttagcaaatggtcaacaactttgtgtaaatatcttgagaattgctaaaccctagctagtaatacaacatatgtttaatatatatatacaatctaccaatctcaatatatattaatatttttgtcctcgacttataattattaattactacttggttgtgtgttttcaattttcaggttgttttgaaattttttgaaatattacagctcagtacaaattgtatgttcaaaatttaaaggtaataattataatagtttgaaaaacacaatttaatagtttagatgtaaaacttgagaagtccaaaatatttgagtacaaaatttgtagcgataattttttttttttttttttttgaaagcatgcaatagcgatgatatattgaaaatttgaaataattatgtcaattatttctaagcatgtcacgtcaaacaaagagacacaatttaataataacattaataatttaaaaagattaattttaaaaaaatatgaaaagttcatgagacaagatcattaagtataatatataattccaggtaataaatatgttatttatttattcatactaatatatatatataaataatatacatatagtttttaaagattaaaatggcaccgcttttaaaaagttaaaagctacttcctgaaaaaactgtaataaaaatgtgtttggtaagtagttaaaaaataatttttaaagaatttttggagaagctacatctaaaaattaaagttgctccaacctaacctttagaaaaaattattttgattaaaagactataataattttttttactaaaactatatttactaatttattatatattaaaaaaataaaaaatatttaaaataaataattattaaatctattattttcttaaaaaaataataatttatattttattttaatattaacaaacaatatcaatctagaatttttcttatatacttgagtttctaattttttttttatttgataaaatataatatagaaatactataaattatttttatcaaatgcatataaatttatacttgcgaaaaattaaaaatatataaaaaaataaaatattatataaaataaatttttacaaattataataaattagattataacattattaatatcattataatagatcttaacaactcaataaagtactttgaaatttataatttatcaaacactcagcttagtttttttctataattctgttgtagctactttttctcacaccacaagtacaactactttttctcacaataccaaactggctccaaattaaattttaaaaaataaaattataataaagaaaggcatatatccctctttttttagctttattctttattcttaataaaatagaatatttatatatatctaatatatatatgtatttattataaatttcctatataaatttctggtgactttttcagtgacttttccgataacagtaatttttccggcaatgatgacttttccgacgaattttccaacaacttttttggtgacaataacttttccagtgacatttttaacaccgacgacttttccggcgaaacttattattgttttacaaatatgagatttctacttttttttacaaaaatatgacataaaaaaataaaagaaaaaacccataaccccatggtattatttatttatatatgccataaaaaaataaactcttacaattttaatttttaattataaatattttacttattttttttaaaaaaaaattactttcccgtaataataacatcaaaatagcattgttatgaaacaacagttaaaataaaattatggctaattagaatttttaagctctgaactttgatttattccaaatgataccctttgactttttctagtcgttaaaaattctccttgaattgattgtttgatttataaggatttttgtctaatttcattcaattttactaatttgatgattgtccatgtactatattatgcttcccatactttgatatttactaaattatggccctcaaactttgacatgtagtaaatcatgcatctagacttcaactcgtgttagactttccttactaaaattggacgaaaattcttaaatccaacaatttcaataattcaaggagaatttttaacaactttaaaaattcaaaaagcatgatttgatacatgtaaaaaatttctaattactctaaaatcatattgcttttacggttacgattctttaaaaacaaacataaaagtagaacgttccatagttttatatatatataaaaaaaagattaaattggtaaaaatgttaaaaaaaaaaaactaccacttttgtattatttataaaataatcacacatatatattcacgcgtacattttatgtatgtatgtacgtaagaccattatatttatatttatggaagcatataaattattgttgcatgggttgtttagctagatatatatactatttaatggaaaatggaatatatctatatatacacatatacgtgttacgcatattataaattagtgaaatgaatagtaaaatttgttggaaattaattttatataattttgatgagtacgtacctacgtaacacttgccaaaattaacttcattctgtgagattttattttttgcgatttgagaaaaaagtaatattaataaacaaataattaaaataaaaagtgtgatgaataggaataataaattatgggaatatgggtccacttccagttcactacttcactttactttacagtttgtccgaggaatactacaactactaactaataatacataaaacactttccaacattaatttcattacgtccaatttgttggtgacacaaatataatttttttttaatcttttttatattaaaattttattatttagctttccgagcacatttatttttcatgttaatcctaacgttaatatattgtaattaagaatgtatacttttcccataaagataattctcatctaaatagagaacgggattgggacggaaatgacactcccccacctcaatgaggatccgtttaatttattaactatctttttattaatattttatgttttataatatgtgtttgtattttttcagtatataattaatagtgttatttttatatttttttaagttgtgttatattaaataataaataatgtgtaatattttaatttttatgtagtttaataattttatatatttaaatatttaaaattaataaattttatttttacattcagggatttccctccccatccccaatgtgaaataagtggggtggggcagggatgggaattaaaattattaaaggggatggagacaggagtaggactccccgcaaatttcttgcctcgtgagcatccctagttgcgacccatagattacaataagtttttttaaatagaaagaatctcttcactttgtctctcgatgtttttttctctaacttataatgtttaacgttaatatatattacaattattaaattaaaatataaaaacaactcatgaaaataattaatttactaaaaaatcatcaataatatatatttattagtgtcataatatatatattagatctcgatatagatcattgattttgttaaatgataatttaaattttatattttttaaaatgatatatctcaaagccaaccctaaatatagtattttttaaataagatcttgtttaaaaaaaatatagtattttttaaaattagtaaaaaaaaattaaaatttttttaaaaaaaaattatgaatctttaagttaagtgagccctaagcataaacttaacatacttatcaccaggttggacctgattatactctaagcttatttttacatatattaaaatacataataataataactagatctatgaccaaactttcaagctataaattaatttaaggaataattatgtatagataagttagttatattaaaaaaataatatatatagggacacgattttgtcccgtgttgtacttttacggaatgtattccgtggtaca

SEQ ID NO: 111901 - DNA, 1914 bp, Cannabis sativa
  modified_base (51)..(53): a, c, t, g, unknown or other
taattacaatatagaggttattcttatttataactggcccaaattgggacnnnatatttttataacaaattagaggtcattcttgaatagagtattcttaaatagaggttctattgaaaatttttaataaaatataatatgagaatatttttgattaatgaatacaaaaaaaaaaagtatttttcaacttatctccaattaaaaagtattatcacgcaagtctgtagtattttggtgtaaaaaaatgtgtgaacatattctaaaaaaaaaattaaataaataatataataggttaagaaaatataatttaaaaaaaagaagaaaatatataaaatattgaactactttataaaaggaataacaaaactatattaatacaaccaaaagaaaatataaatcttaacggcattgccaactgtaaaatcaaaagtatttagacatgtggaacacatttctaaatttaacgagcatcaaaaaccaaaaacccaaaaaataaaaatgaaaaacgatatggaatagcagtgaatgacaagagtgaaaaactaatgagacctcacgaaagcatggggaaacagtcttggcagaattgtatatttggcttttataatcagtgcatacaatccataacaaggtatgtgaatcaaagccaagcaaaaatacctgttcaatgtacaaacaaataattgctttagattccttattcccacacaccacataaataaataaaacaattaatatgagttttgaggagtttaccacaaaggagcccatggtgtatcgagctcaagaaaaggatatggccacctaaaagacaccaaaaactatatgatgaccaaatcatataattaatcaaaatgagtcaaaaatatgtaaggttttggttggtaccatgagaagccacaggcgtggatgatccactggaaaatgacatacacacaactccaaaggacaaaataggccagccgaaaccaaggaaatggctgaagagaccaagagattagatagttagtatatacatagaccattaattaaggctatgagttatgttattaatatttctctaattaattggcaaatctagctaggcataagaaaatagatggtataataatactacttacaaggatattcagtatggtgtctaccagaagaaaaaatgcattcaaagtatgcatgcaacccatcaactgccaagtataaagatcagtcagttatatacatataaaatatatatacacattatacatatatatttgtaaggatacctaactaaaaagaaatacagcataaacaagaagcttccaaatttatcatttttatatacattaaaggaaaaaaaaaaccactcaaatttaaaaagttatgtatgaaggcttatctcagggctggctctctttataaagatttaaatatatatatatatatatatatttatatgtctgatgtatctatatgtatatagttcttaaattgtagagtgtaggtctcaccaaagttagtccaagatgtgaattcgattcaaatggaagaatgatacaccaaaatacaatatctgtgagaataacagcacctgcacaagtctgcatgttgtatgtaataataaggtaatgataagatcaagcatcattagctcaggattgtactatgtataaatatataaatatagaatattattgagtcccaacaaatcaacttacctggaaagctatttgcattatatagccccaaaacccagctctttcatgaatctcttgttgagccttattattgtgcctttgcatcatttcaccctttaattcttctgccttttcttctaaatcactttggccaggatgctttgataacaaccaacatccatatgcagatacaatgctccctatctacattaaatcaacaattttttttttttttttt

SEQ ID NO: 111902 - DNA, 3178 bp, Cannabis sativa
acaatgtctagcaaaaacaaaacgcgttcatgaatcataattatgaattaattaatcaaacttccatttcaaaaccaaaaaaacacccctatattcaattcaataacaacaaagtttaccatatatttctcctcaatttacccaaatgtattttaaatgcataattaaatagctgttagataatgacacccttaaaatcacagcttgcatatcaagctctccactagtggccaagttggtgttggaaacgtgtgaatgtgactatgaagaaaataaaacaataatgtacacaataaagtacaaaacagtataataataataccagataagaacgtttgaccatacgcggtcttgctttttgtactaaccatatatataatattggatcatcacaacaataaaaatcagaactttaactgattttcttttgtgttttgttgtttttgatcatcaatggtactcttggtagcaaaaatcagtaagctttattccaagctggaaaatcttcaccatcatagccaaacagaggctttgttagcttcttttgaagggtttgaatcccaagtgtccaatcacttgataaagtttcaatctttagggttaaagatcttatctttttcatggattcatcaactctttgagcttatttctttggtcaacaaagcttttgctaggcttgttgttgagattgaataccctgcaagtaaatgggaatcttcatctattgatgagtatctcaaatatagtttgaatttgcttgattttttcaactcaattagttcatctctttctcatcttgctcaagctaagctctctttatctcatggtgtgagtttagaagagaaatcatcatctttgggtttgaagaatttgaagccaattcagccatttaagcccaacaacaagaagaaagatttggtcaaagaaaaagtcaaagatggttcttctttgtcttgtaaagaagaggtaattcaccatgctttgatggttatggaaagtttgagttattgggtatgtggggttgtgttgtgtggtttgtctagtgatgatgagatttactttgaggtgagaaaattggcaattgggtatgtgaaagtttcttcctttactagattagagtcaagtgtttatgaatttgtggtggagaaaaagaatggtgttaaggaagtgaaagaggttaatgattcattggctaagcttgtggatgcaatttctgatgagaaaagctatgatgatgaagctgaggatttgaggaagaaattgggtgtttttgaggctatgttggaagggtttggaaaagaagttgatcatctttttaatgaggttttgagtggaagaaatcaattgattaatggatttagacactaaaattaatatgatgtgtaaatcagcacaagttgtaatgttttataaagcttcttatttaagaagaagttttgaatcttttgtgtattttatctcgattgattgtaatatgtatgtcttgggattaagaagaaatctatgtacagaaaagctcaaatttaattattcattttctcaatatgttctttatttacttgttgtgttcttatcatttcataataggtgtttcaaaatctcataaatcattgtttggaattggtgatgttacaaagtacctaatagtaatataaattatttttttcatctgttgaaggaaagtacctcatcaagagcaccagagatgtaaatgtaattaatcttacactatgtttggtagagggatacatggattgatggattccttatttggcaagagggagaagattgatggagggagactctttcactccatatatacaatttctatacaatttctaaaggaggagggagggagagggatagagggattgatgaattttcttgtttggcaagagggagaagggaagggagaggattgatggagggagaaccttttcctccaaatgcacaatttctaatccctcaaaaaatgggggaattgaagaaaaaaagacaaaaatattacataaaatgactttttcacccttcaaaataaaatatataatcatattaaaaataataaaatattaattttattctccgtttttttaactttattctaataccaaacagcacaaaagagactaattatcctctctatctctcttacttcccatcatttcaaaactctttatctatcctactcttcttccttcctactaaacataaagaaatgctaaaagagcactttaaggtgtcaagcatcacaagaattgacgtactgctgttgatgtattttaatatcgagtctcacacatttaataaataatacagtaaaccagtagctaattataaaatatcatatcagtataatattagacccttaaaacaccaaataacaatattctaccggcctacttgttcttaaggtaccacatcattaatattagatattgtgctaaatatcatataaacttataccacttcaaaacttaatacatagtaaaagtcttttttttttcttaaatttttttagaaagctttgtcatacattctaacttctcaaaccttaacagagccaaaataaaatactcaagcatcaaaaccaatttttctttcttgaagagaaagaagaactagggtatataccttgagttgactaacaaaattcttctcaaaacttagttgaatccttgtaaaattgataatgaaaatgattcttttggtacaaaatgtgtgcacaaaattagtcttttagggctcgtttggtacgccgtataaatgtcgtattgtattaaataataaataatactattttcagattaagcaatgtattgtattaattattacgactaaattttttaatacaatatatgttgtattatttaatacataataaattgtccgtattagcttgtattataatatttacaaaggatttggggtcaacaccaatctccgacccaaacccagacccggacctggactcggacccaaacctggacccggacccagaccctggacccgggacccggacctggacccaagacccagacccggacccgagacccaaacccgggacccgagacccggacccgtaatttgggatcgagtgcattaaaaatatattataactttacataatcaattaatacaagtcaataccaaacattgtattgtattaaataatattaat

SEQ ID NO: 111903 - DNA, 2544 bp, Cannabis sativa
cttgtgtcttaattacaacaaaaactctttaagggagagctcaagtaggactcaaattgagatctgaatcacgataattgcttgttctcttaacttccttttctattttctacatttgttattcatttcagtttatgttttttttttgatatcatattagattaaccttgatttctcaagtcttgtatgtagaagaattactatagtggtatcagaattggattctaaagttagtcatgtgaatgaatcttgagaatgtaaaacaaatgagatgagcctcgttaatctcacgatgagatctatggatgtgctcagttagacatgtgatgtgctttttggaggagttggcttgagaaagagtaagaactcttgagatagtggtagtactccatgcaaggtgtgtgctttaacgtatttgaaggaagtacactaattggtggagagtggacagatggaagatcatttaaggggaggcgaggtggtcttttatttgaggatgattattggatggacaactaaagtcatacaatggctagtaattttgtgaggacttaaacttaaagcagacaatatcataccaatgtagaaataaatagtgtctaacatctcaataaaacttttaaaaaagacatgaaattaaaataataactattttaaaaatcctatatatttataatatataatatgttatattaaaaatgatataactttctgttttttttagggaaaaaatgatgtaattacctaaacaataatattaatacagatgccgaacggctacgaaaccttaatacagtttagttagttatatattaatgttgacattatttatttatttatttattttgtatggatgttgacataattatttataatcatatatatattgaaaagatcaaacactcaattaataataagcaaaaaaaaaaattgttatttaatttgtggattaagtaaatattacattggctgacacagattgggcaacgttaaatataatatataataatatgtaaataaatgaaatcatctatatatcaacttgttaaagaacaattaattgttttgtcatttctaagcaataatatctataagaatatatcattttctatatgattgcttgaaaatgaattaaacatataaccattaataattaattactttgcggtaaccattattagtacttttacatacacatatatatttggaaaatatgagtgacttcataccctatcatgccacacatatctagctatatatagcttattatataatatttaagctacgactttatatattaatattgacataaataaaaatatattatgtttgtctagtaaataattattttttggttgaaaataaatttataattaatattataattagaagggtgatgaaactaattaaggagataatgaaagacgacgaccaaaaaccaaaatcattaatgtataggcaacctgctggccttgttttttgtcaccttttggatggcttgtgagagacaccattagtcagcaccatgtgagagagacacacacagagagttcttgggagagaaggaagggaatcacactactatatgtatacatatatatctatatatatatatcatcatatgtgtatatatatactgtatacatgaacagtactcctatatatgtactagtgtcttgggggaatgtatttataagctaatcatgtattttgtttcttatttgtgtaatttttataaaattgttcaaattataattgtaataatttaattttaataagaatttaaataataaaattattaagttaattatgatataattaaaagggatatgttaatttaagtctattgagcttaagttacggtggaaaaatcactttgacctaatacttagtgttattccgccatacaagtgattttacatatttaatttagttaattaattatttagtagttatttaactatggtcaaatcaaaaagatattttaatttaagtttactgtgtgattataaatatatctattcagtctctttttatactttatcgattagaaacatgattctagcactaatataatttgaacttttagtaacactatttagtgacccgcacaaattctcaatattcagtgttagcctcatgtaaagtgcgtcattaaaaacataaagagtcactaaagagtaaaatccatttttttaataatttttattaatttgaaaaatgttggtttatagtgacgcgccagacgcgattggctaaatatctcccggcccacctgtcgtgtcactgtatcataatcctaaattttaaaaaaatacacatttgtaattatactttaataaataaaaaaatataaaaatatatataattagggtttacatgagaaatcctagctgacgcacatattcttctccctcttctcgcctctcttcttctccctcttctccctgctgactaccatctccaaaaaacagcggccaagaggctccacgatgaccagccctccttcacccagatatgcatttattctctctctctctctct

SEQ ID NO: 111904 - DNA, 3946 bp, Cannabis sativa
acagtccagctactactcttctggctaacattaccaccactcagtcttcttgggatccaaactagtaccctgattgtggagccaccaatcattgtactcctgatcctcagaatctcatgaatggagctgagtatcaagttcaagaacaaatgtttgtggataatgattcatgtttgtccatcaagcatattgtccatttatttattaatcacccttctaaacttcttgtgctgaataatttgcttcatgtgactgagataactaagaatctgatcagtatgtctacatttgctagagataatcaagtcttttttgaatttcatgttgacgaatgttttgtaacagatcatgtgcaccatactattctgctaaagtagagacaccagaatgacctatatacttttgactcatcgcaactttcacttcttcctaagattccacctccagttgttgctgcttttactaatgaaattaagcacatatgtgtttacttctataaattcttttgttgtcagcaacgtacatctccacattttattaattgtaataaatctgactatgagatatggcataattgacttggtcacctctcatctagagttgtgtcctctatactcaatgcttgtaatattttcataagtaataaatcaactcattatgtgtgtgacatcgtgttatcttggtaaaatgcataagttaccatttcctcatttttcttaaaatggttatactaaaaactttacaattagttatatcagatctttgaggatcctcacacacattgggacataatggatataaatattacattcactttgtggatgcttactctcgatttacctgattgtgtttactcaagaacaaatttaattccttgaaagtttttctacagttcaaggcagaagttgaattgcaactagtaaaaaaaaatcaaggtcttacaaactaattggggtgggtagtacatatcattttctgagctaactagaatggaggggattcttcatagatatccttgtcctaccctcacataaacaaaatagcctagctaaaagaaaacataggcataattttgaaaatagtctaacccttttagctcatgcctctatgcctctgaaattttgtgttgaagcttttagagtagcattatatcttcacaataagcttcccttgcctgtgattcaaaattaaaattgactataggttctctttaattccaaacctaattattcaatatttagaatatttgagtgcacatgctatcctaatataagaccatacaataagcataaactagagtttaggtcctctccatgcacattcttaggttatagtataagtgccttgatttatcaggaagactacacatctctagagatgtaatttttgaagaacccacattttaatatgctaagcacaaggatttgattgctactcctcaagtctatgtgaatgagttcttttccttcagctactattacttgttcttcaactattcttcctcaactatgtactcctggtgttaatcttgttcctacttgtctcatccctcacactgttgagtcacctagtctaaggcttaatgtgcatcctatgcatcccaactctagtgtgcaacatagaagctcaactttaccatccatctctagtgtacaacataatcctgacacagctagacaagctactacaattggatcttcaactgtagtagcactcccatattctatcattagaggtccatctgaagttcattcatctcttccaatataggttcctactagagactcaccagtagctcccactgtgagtgaacctcctcagcatcaagtttcacaagttgtgccaactcactctgtgcacactagatctaaattaggtattcaaaaactaaatacttttagtgtatccaaggagcatgctactatccaagatgattagaaagtgctgagtggaataatgacatgtctgaaaagatctcgactcttgccagaaattccacctacaccgtggttcctctacctaaagggaggactgtaataggatgtaaatggattaataaagtttaaaaaaacaagattgcatagttaacaaatataaagctctattggttgcaaaaggtattcacaaaaaaacaggttttaacttcactgagacttttcgtctcccagtcaaacttcaaactattcatgttgtcctatctttggctttatcaaaaggatggatggtgagataattggatgtgaacaatgcatcttccaatggtacactctaagaagaagtgttcatggttcaacccctacttttaaggtaccagactctttacatcttgtgtgcgaactgcgaaaggatctttatggcctgtagcaagctttaagggcctagtttgagatattgcagcagtgtttgattgactttgggtttgtatcatccaaatttgatcactcactgtttgtccagcacataactctatctactacatttgtgttactgtatgtagatgatatccttgtaactggtagtgactcctctattgttgcaagacttatctcagcattgaattctctattctctctaaaggatcttgaagattttagttatttcatggggattgaagtcaaatatactagtgaatggatgaatctgtcccagactaagtatatgaaagatatgttatgcaaggcaaaaatgtagggtgctaaaccctcttccacaccaatgacaagtggttgaggctatcaacttttgatagtgaaccagttgagactatgcaattgtacaggtctattatttgagcattatgatacttttacaatcacaagacctgagatatcctatatggtaaacaaagtgtgccaatatatgcacaatcctcttcaaacacactggttaacaataaagatgatactaaggtatataagtggaactctcaaccatggccttcatatcaacaggtcctcacaccatgagtttgtagccttttgtgatgctgattgggtatctcacccttatgatagaaggtcaacctcaagtttatcatctactttgggtccaatcttgttggatggtctccaagctgagtacagaggtagaatacaaaagttaggctaatgtggttacaaaactaacttggtttcactcattattctttgagttgcacataactctattcctaagcctcctatagtgtggtatgacaaatctgtccacagttcttctcatagccaatcgagttcttcatgcaagaaataaacatattgagttggacctctacattgttagagagaagattattcagagcatggttgaaatcaagcacattgccactcttgcttagattgtagatgcttcgacaaaagctatatccaacaaacgctttatggatttcaagaccaaacttcacattgaatatgcttctcagtttgagggagagtgttaggacaactgttacttaactgacagagttagtttgagttatttatacactgttaattctgttaggattacagctgtatcgaacttgagctgactaactcttttgaattgtatatattctgtttgttgattcattactgaataattataagaaatatcttccattcactaagtctttctccatcttatttttctctgtatttattcatttcgttttctaccatggctaagagattgaacaatttttgtgtaagatgatgattttatatactaacaaatcaatcatccaagctatgtgaaattaattattgttccaatgactttatcccgacaaccacatcaatgagagtaacaaactaataataataaggtatctattatgtgagttggacctggaggagatgaattagagggtgtttgaattaaaaaataagggaattactctatatattattcttttaattttttttttctaaatttattgtttggatttttaaagtggtttctccggtag

SEQ ID NO: 111905 - DNA, 1444 bp, Cannabis sativa
  modified_base (1104)..(1111): a, c, t, g, unknown or other
gagatcaaacctattaacatcgttaaatttaacagaatattcttttatttttaaggtatattttgttaaaccaagaaatgtcgttagatagacacttttaatatataaagatatcttttttgggaatgtatatattgtggcacgaattttgcactatattggtgcaatctgcgagtggttgcacgtgacaaatcataatgcgacattatggtatggcttcccgcaccagaagtcccttctttttctttaaaaaattaaaaatatcacttcagtctgtcagttgggtcagaatatgtcagttgggttagaaaagttgcatgggttttagggtcgtatgcaacagattctaaaggttagggtagtatggagtcttaggacattggtagagatataatgtactatgaaaactgttgtattgttaggagctgtgggatatttatttcctaattaaaagtgagtggtaggtgtatacatacttgaagtttttattggacctttacacctacagagttatggctcttatacacaaggtgtatcactttggttatttttttggaatgacgactgaccctataaactaatacgggtgttttcaattacctgttgacttagagtaaccggtaagttacagttaacctaattcatcacttcacaatgtcaagcagtgttggctttaatggatatgcattgtgtttttgattttacatagttctcgtagatccatttatttttttttaaaaaaataataaactaagaaaaacctaaaagttgtggggttatgaaatcttatccaccctattctccaactgtacaactttacgggttaccttatttcctaaacatacatggcacagttacctggttacttagaattgccacatttcatcgctttacaagggcgaaggtagcgtgattagatgtgccttctgtgtgacgatgttacacttcgtgaattcgtggatgggcttgtaaaaatgagctcaatggaggtagtacccgatgacgtaaagtaacctggtgagttatagttaatacaattcatcacttcacaatgataaacattgagggctcgtttggtacgtcgtattgtaatgtattgtattnnnnnnnnttggattgtgttgtattgtattgtattagtatcatttaatacaatacaatgtttggtattgacttgtattaattaattgtgtaaagttataatatatttttaatacactcgattccaacaccaactacgagttcgggtgccaggtccgagtcctgggccacgtcctgagtccgggttcaggtctgggtccgagtccgagtccgagtctgagttcgggtccgggtccgggtccgggtctaggtctgggtccgggtccgggtccatgttcgggtccgggtccgggtatcggtccggtttgggtccgagtctaggtccgggtccgggtccaagttt

SEQ ID NO: 111906 - DNA, 6891 bp, Cannabis sativa
tggtagtggcgggaagaagataaagagcattatagaagagacaggagtagatggtattgacacagaagaggatgggactgtaagatcagaaggaaaccttttctgcaactggtttttaattccagatatcattttaacaaacaaattcattgcatttcaggtgaaaatcactgcaagggatttgttaagtttggaaaaagctacagccattataagcaatttgacaatggttccaagtgtaggcgatatttatcggtatatgattgtgtcctctgatttttttttttggttattgtttattttctctgtgtttatatgatgtgaagcatcctaattgcttgtactctcatcttgttcatctaaaatagaatttttttatgcactttttgactttgttgattgattatgaagttgttaagtggataaaatttctggcctttgaactttcagggactgtgagatcaagtcaataacaaattatggagcttttgttgagatagcacctggacgagaggtacagctcgttctgctttcttttctttccccgatatctagtcttcctaaagatgggatgtgaacttgtgaagtgataatgctctctcattcttccttttcagggactttgccatgttagtgagttgagttcaaattatatagcaaagccagaagacgtaagctgatttttttattttttaccttttcacttgtcaaattctataggggcagataaagtgaaattcgttttcctgtcattgttctgtttcaggcttttaaagtcggagaccgtgttgatgttaaacttattgaggtattgctctactatttcttatttatgcacacagtttgttgaatgttttctaccaaacttatcagtgcttttatattacatgcatatgacatgacacataaaattcttttatatttgtatgttctcatataaatggtagttagattgggagatcggtttttgttctgttccttaaagacctgcatgtcctaattgttcgtagttttttctttcactgaatttttcttctttcatactgcttccttttttatcggaaaacatctgatgtgacatggcatattgtacaggtaaatgaaaagggccaacttcggcttagtcgccgagctctacttcccgacacagaaaattccagtgactcaaaagatagtgcaaaggaaaatgtaggagatcaaaagaccgaacagtccaaggataataaggctagcacaccaaaaggaaggagttccagcaaaagtagcttatcagaaaattctccacagaagaagtttattcggaaattagttgcccctaacaaagataactcagaaacaaacaaagagaaggagaaaaagagtggtagtaaaccacttagtagcatttcgagtaaggatggaaatagtttagtcaatggagaggcaaacattggataatgagtttcatttttgttgattgatatgatgagggaatgaatttcttctcttctcttctcttcatggtgagaatgacatggcggaaggacagctcccgtacgaaaagcaaaaatggtaactaattctatagtctatacatgtacgttcttctttcatatttatttcaataaagacttcaattagaattaacgtaaacattgtttcttaatgttagtaggaaaaatgataaggagatctgttaccttgaagtgaaggctgttgattgagattataaattataatatgatgagataattgaaatttcagagcatactgcagagtgtagttttcaagaagaattggttgttgttggtttttgattttgagatatgctgtattgtatgttattagtttctactgattcaatgaatgaaaagccttcattggtttttcttttattgggtccaaccaaaccaaatgtatcatttatcacttagtaattaattattcattgtttagggttgccatttttgaggacagttaacttgcaatttctgttgttgatttttgtaaaagaaaaagctctgacagaaactctcccaaatcccattttattagtatatatttttgatgaaaagtgggtgtcaaaactcaaaagacaccaattgattaactaacaaaacagattacaaacatgaagggaaaaaagaaaccaaatagaagacaagtacaaaaagttgaaacaaagtaatggccaatgctctagttgttaattgcattacattgcaaaagaaagacatcaataatatataaatggtgtcaacaacattttcaatatccccaactttaccaaaattcctgaacttgttttcaacaaacaaacacaatcttagttgcaacaacgatcgtgtcagattgatcatcttctataacatgaatcatttcccagggaaccgagctcttgaaatctatattcaaagtcctgaatcgcaacaaacagttagatgctgcaatagctctatgaaaccttttcttttctccaaaacaaaagctctagccttcgagctcgaaacctttgctctatgccttgcatttctttttatatgtacaaaagtagttagtttcacatgagtgaagatcagatcaatcagatcccccaactcctaactccaaattcaataattttcatacaaacccaaccttgcattgcaatgtctaccaaacaatgaggcaaattccaacaaaatacaaacaacaatactcaaaaactataaaaaaaattaagatgttatcactcttcatcttcataatgatattaacaaaaatcaaaataattttacaaaagatcaaagatttagcaaagtttaactaaaatccacaaccaaagttacctaataacaagttgcaatcacatgctatataaatcaactctataactgaactgaacttaattgaactcatctcagctaaccaccagccaatttgttaatgaattcttaataaaaacaaacaccgtataaaataaaggttctgagagagagagagagtgttagtgattgacctcagatatcggaagcatcttttgccggcgaggccaaaagctaagcttgaaaatgagttgatttgcatataaacttggaatttcgtattattttatggtatttttgtaaaatacattggaattatatgattattgaaaatacatgtttgtttattttgtcttttatcctaaatttaatcataatcaagtatttttttaattattaattgattacaagagaggtattgacaatgagagttggggtagcaaagttttattttagaaatactaaaaaacaataaaaaattcattcaaaagaaaaaaagcaataaaaaatttacgtttttctttttatatttttatggatttttttttcttcttaaagaccattgtttttaagttgtacgtgttcacgttgtgaagatatagtataatattgcggtaatataaaaataacattaaaaaaaacataaattggtaaaaatgtcattttttatatattttttaataattttacaatttaaaatttttaattataaaagtattcttgtaaaattttaaaattataaaaaataaattttactcggtaaaaatttaaaaaacaacaactaaaaattaacttcgacataactataaaacaactaaaaaaataaactgagaattataaataaactataaaacaactaaaaaaaatagtttaatatttttattgaaatatattttgtaaataaaaagagtttaaagcataaaaatgaaaatttttctttattgatgtatttttataattaatttaaaattttaaattattaagtaatttttttcttaaaaaaatcataaaaaataaaaaaaattctatttttttaagtatattgtgtaaatttctgcaagtgacaaaaacgtgtataaatgcaaaactagatttgtatttgggctgaaactgtaggcccaacaatcaaggcccatctttcataaaaaccctagctaccattgtcatctcctctcttctccttttataataaaagtttgtttcagtcggcactctaaaccctacctctcctccatcaacatccatatctggtaagcaatcaatccattgccattcgtcaattcaaattcaacttgtactatcaaatcttaatctttcttctttactttttctttgcagagtactattttctccgagagagaaagtatgaggtaatatgtctaatcttcttgttgttcttgtagatttgatatttgtttttgtattttttttgatcttagaagaatgttttttgtttgtatatagtaagctgagtagtgatgctgtgagagagggcatagctcagattgttatcaactcgaaagagaagaatcgtaagtttactgaaaccattgagcttcaaatcggtttgaagaactatgacccccaaaaagacaagcgtttcagtggctctgttaagcttcctcacattcctcgtcctaagatgaagatttgcatgttgggggatgctcaacacgtggaagaggtacaacttttatcattcattcattaattaaagttggattggattgttggcttcttattcttattcttattattattattcaggctgtgaaaataggattggactatatggatgtggagggattgaaaaagcttaacaagaacaagaaacttgtgaagaagcttgccaagaagtttcatgcttttttggcttctgaagctgttattaagcaaattcctcgtcttctgggtcctggactcaacaaggcaggcaagtaactcttccaattagttttgtaaattacaccatagatttacactgtgatggtcgcatagagtaaattaagtgaggttattttgtaaattttagaatttcaattgtgtggcaaatttcacaaaatcacatttgggtctttctcttggtttgtagtttcttttgtctactggctaaaatatgtctagtctaaatccttctaacatgtatattttagaaaccggttccagttttcgttgatttgacttgttaaatgttgatcttattattgctttctgctggagttttttgttgaattgctattgcaataaagttttctatgttaattgtctaacaatttctactaaatgaatcaggtaagtttccaacattggttacccatcaggagtctttggaggcaaaggtcaatgaaaccaaagccatggtgaagttccaacttaagaaggtgctttgtatgggagttgctgttggaaatttatccatggaggagaagcagatctttcagaatgtgcaaatgagtgtcaattttctagtgtcactattgaagaagaattggcaaaatgtaagtgaaatgtctttatttaaactttcaataccctttaacatgccaatcatgtgtttatgttgttgtgtcttttgtttgtgttgaaataggtgaggtgcttgtatttgaagagtaccatgggaagtgcaatccgtatcttttaagttaacgtatgcaaactaaaatttaattaagcaagacatttttgttttgagattattgcttcattaaagttgcaattttgtttttgttggattcattcgtccagtttgtaattttgacattaagattttgtggcttctaaaggagaattagcttatctttctttatttcatttcacaccaacttagccattatttgagctgagatgatgagtttatggatcatgcttaacttaattactgagttcatatttgtcgaaaccgaaccctttatgtagtagaattttgaaagggctttagttcactgatcattcactcttacaagctaagctagttatggccctaaagcctcattcatatagagtggagaggcttgatgtggggcaaagtatccattcttaaaggatattgttggattatcggagttgggaatgatgtccatgaccctttgctgctaaggccaatgagttttagaatttttttttctcttgtttggagaaacttcaatagtgaagatgcatacttggttttgcaaatcccttataaattcttctctctttatttcaacaatggataatatattgtcaagagtgtttgccatactgattccactagtttgagacatcttgttttgtgaaatattactattaggatgcactacaaaatggctagatgtcagtagtcacttactaaaataatattgtgattaaaaatatagaaaatttctacaatagagatgcttgttttgtccctatggtaaagacaatttattatcccttgattaatgatctaagggtggtaagaatgttggatacatgataacaaaatggagtctagtacacactatttctggtaattacatatcatatatgctaatcatttctaacttttatttatatttcatgcatttttatgtctctcctcttgtttgttttttaagtaatcatattcatataaaaaaaaatttgttggcactgtcaaaaataaaacctaccattatcaacattatcatgttcttcataaatataaaatctggacattcctctctaaatatttaatttctgaattcccaaaccccactatgatacccaaatcacatacctactcaaactattaattaaaactttttctgacaaactcattactcttttcatgaataacattcccaactcatcaaatcatcaaaaaaataaataaacaccctcaaatccttcattcgaaaaaagcaccatgaagacccatcttcttctttgagtctgtgaccgttcgtcttgtcctgtcctccttcccattgttcgtacttgttatcaaattgcagattcgttgcaaaagcacagaagaggaagaagaagaagagaggaaaaataaaaggatctactgattgtattttgtatttttgtttcttaattaatttttaatattagtttattcaatacattcaagtatatattagtttttttttttttt

SEQ ID NO: 111907 - DNA, 4733 bp, Cannabis sativa
  modified_base (4707)..(4707): a, c, t, g, unknown or other
aataccatgtagtaattatgtacgctaccacctttttgaaagaagcgagccactgaataagcaacatcctctgctggtctatgaggatcaggggacccaaatgttttaaacctgcagataattaactcacttttaaatgcataaatactttgacacctatttctgtttctgtggcagaatggtcgactagaccttttgaagaataattaattataggtgttatcccagaatttggactatacacgtggcagttgcaagacacgccagttggcaagagatccccatcctcgcggattcccagcttaaataacttaaagctcagtttaataacttttttaaaaaacaaaaaatgcccattagctccaaaaagatgcaaaagaagtgcgtgacatggagacttggatgagaggatattgacggtgacaatgagggtgataatgataaggaaattttactttaacaattcgtcaatgatgaattagatgatgatttctaaatcatcatgccattactgctgaagtttgttctaagatagaagaatctaggattctagttttagaaacaaaagttatccttttgttttagtttgagttcaatgacatattttatggtatgcttgaattctaaaagacattattcatctttgatatttttaggtgttctgaaaatagcttttcaattaaatatttgaggcgtacccctgaggcttaccccttgaggcttcctctcctcaaaaaaaaaacccacaaggcttaaaacctttattttaaacactggtttagtttatgaagtattggttacctaaataaatatttattaatagtcaagctcccagtatgtggtatttgcaaacaatagtaagggattagacagatgaaagaaagcctgcattttgcaggcactatcttcatcattagaaaggttgataagcagaaatgaataaaaatattaatttatagttcagttgaccatggttctccatgtttcctgactgtatctttgctttcttgtttgcatatcttttggttgcactctgcttaacttctacaggttaaatgaatggaagagaaaatatatatacataattttctccttcctgttattgaagttagaggtgtatacaaactctgaattttaggggaaaaacaatattttttcacccttagcctcacaaaaataaaggttccatgcggagctttagactccagaaggactttggttcttcttttaaaaacttcacatggttattaaacaattaaaaaaaaaaatagaaaactaaattaccatccaggccaattctctgtccaaattttgggcttgtccgggtatatgggtgtaaattggtcacagtagaatgaattacatgtattaatctgccaaaaagaaaaacaacatttgagctgaatattgtcattttttttcattgtatataacatttaaaataaagaattcgtctagaagtgtcgtttctaaaagccaaaaaaatataagaatcatctagaagtgcatgtctaatctgtagttagtaatatgcacaaaatgttgagcctacctacctagtcttgggataaagtacaataataccagctgacaagagattgaaatttgctatgtcaaaattcttaccacagaactcggagcatcaaattgttggcacattatccaagggatacctatattttgagatacagccatgctagcagcccacatggcatatcgtttaccaccttctccgtatgctccttcatagtacccatactcattttctatctgcaataagaagaggattcaaaacaaaattataagattttttagcaaatgtttagaagaatatacagcagaaaagtatttccttagaagattcaaatcccaaaaatagtcccattcaccaagggattgttaaacaaagactatgatcatctcttgtagtaagcacaaaaaaaaagaatatatttatatatatatgtacagcacctatacctgaatttactaagcacagcagctcttataacatccagaattactattgtgcaacaatagaaacttgaaaacagacaaccaatagcttaaaacatcataaatcactagaaccctttcaaggtttttttaatttctcatgaaagctacactgcattctctaagaagagaactcagttggataatatcaaataatttccatacttgaaaatgatacttgcctgggctaagataatgggacccccttgaggtgccaaaagcttctcctgcttcattaggttcacaatcaaagttgtgaagttcttcatatgattctgattaccagcaagttatagaagtccattagaagacagcagcaacacacttcattctaaatacgaaacaattgcattactagatagaatatgacactagctaagctgagcagctttctaagactccacattagtaccttaaacggttcgttatcagttcggaatgtggtaccaggcacataatgcagccaaacaggaatcccgctgttatacataatcaaatcagagaaagtgcaacagagaactgaaaactttaggcatctgcccaagtaactcttacttcacaagaaaaggaactgctgtgataatctggaacgtagagacttacccaaagttccattctgccgcaacaaatggccctattcgaagaatcaataacatgccagcctcctggacaatcttcacaaacttgaccagatcatatcgtcctccaaaataatactaatgccaagaagaagaagaagaagaagaagaagaaaaacaagtcaatttaattattatgataaattcctttcagatccaacctactgaaactttgaatcttcatacatacattgccaggggaaggttcatgaccattccaaaacacataggtttcgataacatcaacccctccttccttcgcagtttgaacaagcccaggccacatctaacataaaacacaatcatttcatagtcagtgtcatcgctacattgttaagatattagtgagaaactcaattgttcattcttgtgagaagagggcaaaattcggaccacacatttactaagtaattgtgtatagtgagaaaagaacccattacacgaaaatcaactgaaaaaaaaaataggatgaaatatatgaacgccaagtgacattctaattctgaacgcaagaaagctagtgtcctaggtctcattagagccatttgaacataagagataatgaatgttgaagtatttctcttcttttcttcgacattatgaattaacaaacaatcaacaaaatttcaggtagaaagaagagagaatgaaataattgcaataatgactcaccgctggaacgctgcgcgggtagtgaatggcagcagagatgagtagcttccgctggccattgatgagtagagagcgacggtcgtaggtgacattggttgcgagacacgaagtgattgagcacaaggcgaagaggcatagcagaagtagcagagtcgagattcggttggtgatggaggaggagacctccatagcctctttcttcttgttcagacagttattagagtagagttaagaagagtgagtgtgcattggataaagagagggagagcagcgtacgtatttatggggagcgattagaagcgtgttgaggtcagcaataacaataataattaaagagagtgaaactgcaagacccaaccaaggtccagagacataagtcagacacatcacaaagatatcagatacggttgtcttttgtttattttattatacagcggtgataataaaatttaataaaagaaaattatcaataaaataatgggaattttacaattacttacgattttggaataatgcaacgtgaattttacacaccgacgctctcaacatcaaaattactacgacaacatattaataatattatctctgattctcaaagtttattttctacagtaataatatcccacagaacagaacagaacagagttttataaatgaaatgaagtttttgcttctttctatttctagtaccgttcaagcagcaaacgcacatgaccgtaagaaaaataaggttccgaaacagttgcctttgttttcgggatttataaaactggtaagagtattatttggtgctgctacttgtccttaaactatttaacttttaagttatataatttgtttctttaaatgaacatatatcattacaataataataagagtacaataatgataagcgtataaaataaaacatacgggatcgtttggaacattgtattatattttattgtattaaataaattgtgtttgattgtattgtattgatattatttaatacaatactatgtttagtattgactttaccataaacttgaccctaaccctgaccccgaccttgaacctggattccatcttggccccagtccacaaacctccggccgaacctacactactagaaaatcaagttttagtgacacacattgagtaactctaaaagtgtatagtgacacttcaacgcgcgtcactaatgagggtgactggaaagataattttcagtgacacttcacacgtgtcactgaaatcttttgcatttattttttgcgtgtcaaattttgtcatactaaaaagttaacaaccacacacataaagtgtcactatatgctcttttttttcttttttattaatatttttagagatatagtgacacacaaaaagtgccactatnttaaatatttttctaaaaaaataata

SEQ ID NO: 111908 - DNA, 6204 bp, Cannabis sativa
  modified_base (29)..(64): a, c, t, g, unknown or other
aaataatgtgaattatttccatcttagtnnnnnnnnnnnnnnnnnnnnnnnnnnnnnnnnnnnntaagttgtttcaaaattaatttcattttaaccctttttttttatacttgtagtgaatattatactctgtatgagacatcggtgatccgaatactggcctacactcagctcctacttgtggattatggaatctttgaatactgacgacagtgcccaaatggtaactccttctgaagaagtccctacggtggacgtgactacagatatggaagaacagactaatggggaaacgaatattcaagcaaatgaatcaggcgaaatggatgatatgcgggaacaattcttagatactatgtccttagaattggaaccagattttgaactcaatgcagaagttgttagcaaaggagtccttgcaactaccttcggcagaagaactattgctagagggcgtcttaaagacattctatcaaagatatggttactctcagggaaatggcgtttgaagacattgaagcctgggttatggggcttcttctttgacctggaagctgataaaaaagaagtcctgagaaaacgtccctggattgttaacggtcttctcctcaacattagagattggctcgaagatggaagatgggaggaggttaatatgtccaaagccagactttgggtggaagctcatggccttccaaccccctacctcacctgggaaaacacgagggtaatcgccaaaaaagttggtgagtacatagattttgatagagccaccagagagaatatcgctcggagggggttcctgaaattccaagtcgacatccttctcagccaaaagctggttgcgggcttctatcttaacatttcaagagatagaaaagagtgggtgcaattcaaatatcacaagctcccagccatctgtttcaactgtggatacctagctccttcctattctaaatgtaacagacccaccgaatttgcttacccccctattggaaaggcagtccccctgggcttggattaaagtcggagtccccattaaaaactgcttcgatctgagaatcccaaagctgaagatacatgacgcctccacctccggtgtctccggcgatagagttcaaacagcaaaagacgataagggcaaatcggtcactagtacatgtgacaacgactcttctgcggcttcggtacagggtacaacggccttggttcagggtacaaagggtcttttgaacgttaggaaggagaacgctactatgggtaatacgggtggattgctttccttgccatccaggtcttcccctcctgtctcctccattttaggtaatggcagtaaagcacgccttcactatgccaaaagaaagaaaacccaccctatgaaccttattgataaccgtggtagagacaaggggatcattgctagccttaaggctgatattgggcccactagggaccaattagtggaaagacctcatgaagagatatgcaaatccagagtgcctaaccaacaccctgagccaacatatgtaacgtggcccactgataagtccttagatgaagtggtaaatgaaatagtggacccaagccatgtttatgaaggcccagcccaaacaattgtcactcatgacataactattttctctgatatgggccaacctttctctggttctaaaaagagaaaagcccctttgtcaattatacctgtcatcactcctgacgaaaatatcatcaacctgggcaacaagtcgggttcttcatctgcgaccctgcttcctcctctcgaagttaataccttcactccaggcagcagtggcaccaaaaatgattcatcaactcgaaggaaaagcaagagaagattgcgtaaagaccaccagaaacacgagactcccacacctttggcgccggcaacagtctcggaaagtgggaacttagagcaaaatttgtttgaagtggctatccaagaaattcaacattttcaagtgggcgaggaggcggcccttatcatgccccccaactcgccatgaaactcttatcctggaattgtcagggtattcgtagaaccccggcaacccaagcactccaagcttgggttagaattgatcaaccggagtgcgtgtttttaatggagactaaaactaattctgctgaaggagaagccctatcgaaaactttcaggttccccaactctatgagcttacccgcagaaggcctggcgggtggtttttctctcctttggactcatgatattaaactccaggttagtaattcctccaatggtacgttcatggctgtcgttactgataaaattaatggttttagttggatgctttattctatctatgggagaccttatgagaatgagaagaagcagttttgggaaaacttgtccacaaaaattaatcactcccagttaccttggcttttagtgggtgatctcaatctcattgcccatccttgggaaaagaggggtgggaggaaggttcggcctggtgatactgctattctgcagaatgtattgatgaccacgggaggggtggatcttggttacaagggttgccaatttacgtggcaaaataacagattcaatggggacctaactagagaaagacgagacagagccttggcctccgctgactggatcacctccttcccaaatgcaacggttacaaactcccctatttcagcctcggaccatggttttatcttggttgataccaatgatggggataacagaggatacaaaccgttccgtttcttcgaggcctggactgctgatccttcatgcctgcagacgattgagaaggcctggagtagcaatggtcaactcacgaagacactctccgtaaagttgagtgatattcgaaaagccttgcaagtttggaaaaaagaggtgttcggtgactgtgataaattgattaaagatgccgagtctcgtctctcctggattcagaatcaacccataacttcggtcctctctgcggaagaggctacaattcaaaaactcatctctgatctgtggctccgcaaagagagtatatggcggcaaaagtcaagagaaacgtggctcaaattaggcgatcagaattctatgtttttccatgcctcaacaattatcaggcgtcggagaaacaaaattactgccatcaaagatagaaatggagagtggttcgaaatgctccaagaattggtagaatctttaatgatttcttcattgacctctttgacagcagcaatccgttcattggtgatgatttctctgcactcttcactcatttgatcacgagcagagaaaatgatttgataaagcaagttcccctgcgcaatgagataatcactactgtcgccctccatgcaccctttgaaggccccggggcccgacggcatgccgggttgtttctacagaaaatattggaacgttgttggagaggaagtgatctctatggtgcaatctttcttctcggagggatttctggataagcaaatgaattataccttcatttgtttgatcccgaaagaagaaaatgcttccacggtggataagtttaggcctattagcctttgtaactttgcctacaagatcatatcgaaaattcttgccactagactcagaagtgttatgaacaagctaatttcccctcttcaatccgctttcatccccgggaggtggattgtggaatcctctattctaacacaagagctagttcacactataaaggcaaagaaaggcaaaggcggccttttggctctaaaacttgatatgcacaaggcctttgatcgaatcgaatggtccttccttgagaaagtcctcctttgcaatggttttgacaaccaagtttgtgggttaatcatgacatgtgtctccacagtctcttattcggtcctcctcaatggaatcccccaaaagaagatcttcccaaagcgtggccttcgccaaggggaccccctgtcacccttcctttttctcatgtgtcacgaggtcctctccaagctcctccttcgacaacaagacctcgggaagcttcatggggtctcaatctcgagatcctcgcaggccattagtcacctcatgttcgccgatgatactatcctcttcgcccgagcgaacacacgaaatgttgatgcaatcttggattgtatctctacctatgaagggtggtcgggtcagaaatgtagtcttgctaagtctagcattcttttctccaagaacaccttggtctctacccatcatgatatcatctcaatgctgaaagtgaaagaatgtacgggaaatgaaaagcatctcgggaacccctttgtgttcaaaagaagtaagaggcaggaattccactttctgaaagacaaggttctccaacgaattaatggatggaaatcaaagctcctctcttttgcaggtcgcactaccttagtaaaagcagtggcctccaccatccctatctacaccatgtcaaccggcagacttccggtatcaacttgtaaagagttagacagcttaattcgaaagttttggtggacgggaagcaatgacaaagaacgcttcatggctttgataggctgggaaaatatttgtaggcctcttgataaaggagggctgggatttagaagaatggaagacattaacaaagccctcttagcgaaattagcttggcagttcgcttcaaacaaagaagctccctgggttaattgtttcagagctaaatactgtcggggaaaatctttttgaatgctgagataaaagggactgattcttgggtctggaagggaatcctcaattccaaaaatatcttaagaatgggtagtcatactctggtgggtaaaggagacacaattgatatctgggaacaacccttgataccgtggctcgattatgaagacttcaaggcacttatgaataatattcgacttcaccatccgctccttacatcagtcgctgacttaatcaattatgatggagaatggaattacaatcttgtgttgcagatttttggtaatgacttgggcaagaaaatctgtagtatacggagattacctgataaccatcaagatactctggtctggaaaccctccaccgatggatgcttctctgttaaagcggcgcacaacataattgctaagtcccacggccagtcctggaatccgactctctggcgttccgtttggaaaaaagacatccacccacgacattccatcatggtctggagagttgtgatggggtgccttcccactaaggacaaattgccttttgtctccgacaaaaattgtcctctctgtgactcgtgctctgagtgcatcactcacctgttctgggactgcccgttagttcgtgctctctagtttgggggtcctttccctttaaccatagctattacaaatggtctttctatggctgacagggtttcagcgacaatccattgcatccccccagacttgaagtctaatttcttcaccttcttgggatgtcttttcgaaagtgtgtggaaagcaagaaatgaatcaatctttagaggccaaattccaaagattgatcacattagaagaagttttctttgcagatatgaggaggccattacggtgagcagacgggaatcagaggacaaaccccttcgctgccccctgcaataaccttcctctgaggtccttagcgcttctgcaatttgtttggtggacgcttcttggaaggatggccaggcaggcattggcgtaatcctccttgaccaagcttcaaacaattggaaatggttcgctaagttcacttatgctgcctctgctgccgaagctaagatgttggccatcctctgggcccttcaacttggtgaggaaaggcatttcgactccattgctatcatgtctgatgctctcttgctggtcaatgctcttcagaagagacaatgtccacccctctgggaagtaaaacctttagctctttcggttattaagttaagttttaaattcaatgtctgtctttttcattatatccctaggctagaaaactctactgcggattttattgccaagaaggctagaactgatgttggttactcagttggccactgtatcagggaggggtcccctattgtgatgtccaattttctattgcaatgaactagttttgttcttccaaaaaaaaaattaatttaaattaatttacaattcaaatttaattttctataaatatatattgcattttcgaaaatactttaaaataaa

SEQ ID NO: 111909 - DNA, 4514 bp, Cannabis sativa
acttgaccttccccaggcagtgtgagattgcacagcttattcggtatttctccttacggatcacgggctactgactgtcacattttgcctaacaatagtctatgagagtaatatgcagacagagaggcaagtactttggcaaaggttaatttgtttatccatgccagttaaaccttgggtcctttgtgggaacatcaactcaattttcaactatggggatcaaataagtggaaagtgtgttagctctgggaaatttgggaggcaaataaatgccttaatttaggcctagcaggtgaaatgaggaaaagtggatctcattacagctgaactaataatcaagacaatgggtgagaatttacaggaagatagattaggttttgaaaaatgaagaatggttagatcttcatccaaatactgaagcttactttcagtgggaggatgactctaatcattgttatggtttgattaagcatctgagtttggggaacttgagatacctgtcatttaagttttttagtatgtggagcttacatagtgattttgaggacactgttcttactagctggaggaaagaagctaagaggagtaatctagctaccttgtgttttaagttgaaaaggcttcaaggtgtgctactgaaattcaatgtaaatcatgtcggagatgtcaaagtcgattataagatggcttgggattattacaattaagctcatcataatcttcaataggaccctcattctttgttgctctgataggaattaaaccaagctcgagaaaatatggttgattgcagcatgctttttgaaagaaaaaagaaaagtggattggctaaagtttggagatgaaaattcagcttacttgcatgcttgtattaagaaaaataggagtctaatcagattttctctttccttgatgatcaaggacaggttttagatcagtatccaaaggtgttcaatcattttatctcacattttaaaagcttcatggggaaaacaaacataacttcagacactatctatccccagtgcatagatgaggggcctcggttatccttggaacacgaagtgacattgattcgaccttttactgtactagatgtgaaaaaatctatgttctctattccagatttaaaaattctaggtccagatgggtatagatcaagagcatgtggaaggaattaggccaagaaattgcctctgctaatctgaaattttttcatgatggcttgattctgaggcaattaaataaaactatttctatgctcattccaaaagtggagaatccatccaaggctaccaactaatagatttctgcaacaccttatacaaattcatctcaatgatgattttctcaagactgtctgaagtgctaccggggttggtgagtgataatcaaggtgctttcattaaaaaacgaccccttccacataatgtacttattttacaagatgttttgaagggttatcaaaaggaaaactatcactcctcgacgcttgatgaaaattgatttaagcaaggcttatgacgcaatttcttgggacttcttggaaagtttattaaaagcctactattttcagagacaatttgtgggctggataatggtttgtgttagaaattctagttacttatttgtgatgaatgggaaagtccaaggtcaattcaaatgtgctaaaggtctaaggtaaggggaccctgcatgtcctttacttttgttttgattatggagtatatatctcggacactcaagtggaaggccagagataaaactttttcttatcatcctttgtgtagaagtttatagctcataaccttttctctgaagatgatttaattctattatgcaaaggaaacactgatttagttagatgcattgctgaaactttttcttattttagtagatgctatggtccaaaggcgaataatgagaaatcaaacatctactttgttggattgagtgaaactacaaaacaagcaattcaacaattgggttctttcaagataggttattttcctttgaaatatcttggagttctccttagagcaacaaaataaaagcagaaagactgtgagattattctgaagaaactaaagctaaaattgcacacttgggcaagcaggcacctatctttggtaggtagagctcttctcattaactctctcctcattggaatatgaggttattggatgagcatttttcaattacctcaaaaagttttcgaagagatagacatgatttgtaggaatttactttggggtgagaatggaaatgcaagcaagttgtatatggcttcttggaagatggtgtgcaagtcgaggtagcttggagggttgtggtttagagaggaccctaaatggaacaaagcttctttggccaagtacctttaagctatgactttgaaacaagatgtcctttaggtaaaatgggtgaataatctatacttgaaagatcaagaggtgtggtctcttgagttaaagtctgatatcacctggtattgaaggaagctcttgagacttagagaaacattctcttaggagaatatcatacaacgaggttgtagtgataagcttgtgattgggtaggtctatgacaagctcataaatttatctcggtatggatatttgtaagcaacttggtgtaagctctcggatccgaaacatagattcatcatgtggcaagcattacacaataacctccttacaagagataatcttgtttagaaacacatccctatggccactggtgtatgtccagtttgtgagtgggacactgagacccatgcgcatctattctttgattgtccttactcttggagagtgttacaacatattaaaagttaggttggatgtcaactttgacctagctcctttgaggaactattgtgatggatgagtttaaagaggctgagaagactcatttttgacatttttatgatgtgttagctggtactatatatagcatttggctaaaccaaaatttgtgtattattatcaaaatttttgcactatgatgtgggatccatctaggtgacacgtgtaacatatttcataacctttatagatgattctatgcctagtagactgtacagattgttatgatgcttgaagtcatgaatagaagacaggatgaccggacaactcatgtatagactctgaccagaacccgtcacatagatagctcgcatgcacagaccaaatgatgtgagttaacaatttttgagatatacctcatatatttccaagcttgcgagtcacggtgcaatccctacattcatgggatagattcgtatcttcagaaaacaaaggaaatcagtctaagttttcccttttcttcattgtaattatggaaataaactaattttttattttatttcttatttcttaaggaaaaccaatttcatgtaattaatccccataaataatgggttcatctcactattcaggacatgaaattattcaaagagagaacactcaagagagaaattttgatctaagagtaaattgctcagagatcattgtaagaacttacgagagagaataagtcattcttattcattttctcacaagtcaatacaaccaaaaggggagtaggctattaccaactataaggggttaaacctctataaaatctagtgttctgttactttgtattatttactttctgttattttattattcttaatctctttaatttgactcactgttgttggctaaaagcgagatcaacattttggtgctttcattgagagtaaaaatatgcaagtttttgtgttaactaactttctgttatgttagttagttagttggtgttggttttgcacctatgttctagctgtgagttgtacctataaataggctattctttccacttttgtaaagagagaatgaagagagagtttagagagtgagtgcttagttttttaagctgtgaaaccatgttcttgaaggggtcaaaaacagagggtgtacttgggtaggaattgagaaactgagactgtttctctagtttgttattcgagtgttgcagagctatgttgctcttgaattggtgcttgtattactgttctcttattctccatgttaacgaaagaattggtgatgttttctcagctagagtatggccagggatcgaattgatctctaggaccagaaccaggataaatcttgttgtctccttctagttcaattctattttgttactttgtgttgttaactggtttatttgtgtatgttattgatgttcaagtttttgatttaatgcaagtttttgatagaattcttggtgttattgtagctcaatttacaacaaaatcagagctgcgggttcaagatccaataaagggaagtaaagaatcatgattcaatcaagactcatctgcaaccaatcatgacaggagcagcaagattcgaacttgagatgttcaatgggacaggggattttgacctgtggagagaaagcttaaaaggaatacttgttcatcaaaaagttgccaaagctttgaaacccaaggaagaact

SEQ ID NO: 111910 - DNA, 2138 bp, Cannabis sativa
atatgacacctcataatagtattagatacgataggtactctttagcattactcttataaattatagaattgttatgggatatcttaattaagatgccaagtactacaagatgtgtatatattgttatggtacattttaatatcggtcccacacatttattttgtattattttaagttttttttttgaatgaaaatacgtattatattaaatcaggcattcataatacaataaccatttaaggggagaaacattttctcccaccaagaacaagtagaattaagttgtattaacatgccgtgttatgaattgtcagccctactactttattattattaaatcggtgtacaatcacagtatctagatagaggctagtagtactgtcgaaattccttccagctggctcatgatatatactagctacatgatctcataattaagtgattattattaaactggtcgactataattaagttaatgattatcagcaccaacacacacacatcccatttctgttttttacatatagtttgaattttatttttagtactagtatattatactatttaatttttttaaaaaagttacatgtaatcataaataattataatatatataatcaacaatcgtcgtcaaaataaactggactaaaaaagctatcgtggatgttaaaacaaatagaggaatactataacactcatttagaggggttgcttttttctaaaagtactatttgttgtaaagttgtgcaccataaattattattgaatttatagttgtattccttaaactatttgaattattaaacattccctcaaattttaagtagaggaggacgatacaacaagtgttaataatttgagataacgtagtgtggtgtagtggtaggaaaatttttactgtctcctcctttacttgtgagggattacgtttggtccttataggttgacttattgtatagtgggctatctttgggatctttgggatgcactataaaaaattattatctttggtgataattttgtagtcacaacataattttttttgtgattaaatattataatttttagtcacaacaaaatcttatttgtgactaaaacatagtatttagatacaagttgtaactaatttaattttagttacaataagtattgtgactaaaaatacatttagtcacagcaaattgtgatttttgtgactaatatctttagctacgaatcttttagttacaatataagaatgataatttataattaatgataatttttttactttagttacaagttttgttgtcactaaaaataagattttttatagcgataagaaccttcacggtgtgtaagagatagaatgaggtataaagtccttctaactagacacgtagttttataattgccttaaaacggggatggaatttgcactacatgatagggaaaagaaaataataaaagcaaaaattaaagtgggtatatagaatagagtaatatgcatgcatgattttggtgggacaaaacatgagtatacatgggtctaatcattgcctgttgcatgcttcttcatggttcctctctttctcataataatagactgtgttgcccacttccccactttccttttccttttccttttccttttggccttttctattccatgcgctctctttgtctctatttcagacagataagaattaatgtgcacgggggcaaggataagattttattatcaacctttacccttcaattcttctcttcccttatttatttatattttttttttgaaagtaatgactaaatttattgataatataataatgttatacattaaaaaaaacaagaataaaatagaaagtcatttagtggagtaagtagtttaatatacttgttaaattctctaacaatgcttctagatcattgaaaaaaaaaaatatctcctaacaaaagtacacaactgtttaagagtcaaaatcaatacatatatacaataaattttcaaatgaaaatcatatccaacatcacaaaaattgccacattctacttgaatattactgaaaagttcctgttatattattttataatataataagtgtagattaaaatgtggtcatatatattattatgtgaataatatatattaagtgttt

SEQ ID NO: 111911 - DNA, 5278 bp, Cannabis sativa
  modified_base (2204)..(2205): a, c, t, g, unknown or other
  modified_base (5175)..(5194): a, c, t, g, unknown or other
  modified_base (5252)..(5253): a, c, t, g, unknown or other
aaaaaaaaattatatttcaaatattatataaaaaaaattaaaataaaaaattatgtgaaattttattacaaaaaataaaaaaaattatacacgatcttaaaaaaaattatgaaaataaaattaaataaatattaaaattaatacaaaataatatgatttttttaaaaaaaaaaaatatcaaaagtaatttttaaaaattattttaagcttaattttttaaaaaaatattaagctctactcataattttgcgaggtgtaaatagaatttcccttaaattattaaaatatatattaattttcttaaaatagcaaatatttgagtggcgctaggcggacccatatatgtcctttgagaaaaaaaaatgtaaaaaatataaatgtatttttagttagtgacaacatatatatttatacatgaaagtaatatttataaaattaatgcaagctttagcataatgattatttatatagtacattaatcaacttttttattattgttattattttttttattttaaattatatttaataatgtgaaaaatacaagttttaacatgttatattatgtagaagaaaaagaatatgctctcctcacaaaaaaagaaaaagtacgtacccctcaacttaaatcctaagtgccttctcttgtccacagaaaggtctgccactaatgcatagatacaaataacacatacttattacacgtaataatttaatactagctattataagttggattatagtaattgtaagtgtaatttgagtatgtttattaaaacaaataatatacaaaagaaaacaaaatggttgacaacttaattatttattttttcttaatgtactactttggtgattaaacttcagttttagtcaagtatataggtacaaagaatattgactaatgatgtcgtatagttcgaacaaatatgttgttacgtcactggtcaatgatgaactactactttaaacttaatataaattatttcgttctctacatagaaagaaaaggtacgaattattagagttattataacagttgtattaaagataattaagcaaagtgatatgctaaacgtggatatatagtatatatatatcattaattaattaatgtatattgcataaatgtttttcagctctcgctaatgatgtaattataattatgttatatatatcatcaatcaaattttttacacacacaagaaatatatataatttgtaataagtaaatgaattttattatattactacttaattcgtggttagataggttaatctttatattttttttttaattatacaattattaagtgtttaattacggaatattttggaaaaaaattatcttaaattaattatatatgtattttatatttatataccataatacaagggtggtataaaactataaaattaaaaccatctcattttcacttctagaaaacatcatcgagagctgaaataatttccaaattttgttatagttcctaattacactattaggacgatttattaatagtctaattaattgagtggcttactaattaaatcattaatggttgacacatcttgctttctgttttggttattagtgaaagaaagattgtcgctgttaaattattgcggagtttcgacacaacatcgttagtgagcagttggcctatatattttatattaataaccatcaaataaggacggcttttggtacccttgtaactttacgttgaaagttggtgacctaaagctcatcactgaacatgttgctttacctaagctacccaaatcagttgaaatgaaaaactcaacatttatttataattttatctaaaaaaaaaagaaagaaaaaatttaggtagacgcaacccctttatacgggaacccccacatcacaaccttgactaaaatattgatatattaagttattaactcataagtggacgattctgattggccatagacttattatattatactcctttttatcgtatttaaatacgtataaaccaaagttttagttcaaatttcaaacatatggaaatgtaacaactatttagaagttgtcatatgtcaaagtttgaaaatcatttcatcaagctctactaatttgctcatatcacgctgaattatatttgcccatgtaaccattttgagttgtacaatctttactagtatatatattcttttattaatatatatatatatanntttttttttaaaaaaaaaacttcttacagcactccaatatccaatttttattttttattttgaaaaaaatgcagttattccagcaaccttcatcgaaatcccataatttttctcgtttgaaaggcttagctattctatcatcttctttactggtactctatttcctcctttcattagttttcgtaaacaccaattatttaagcacatatacttcatcccaatacctggtttcgccgccgacctcactggatcacatcgtgttcggaatcgcatcgaacaagaggtcgtgggcaaagaggaaggactacattaagctatggtggaagccaacacagatgagaggctgcgtctttctagaagaacgacaacaggattcagaaaacgacaccgcatctctacctcctatttgcatatccggtgacacttcccgcttccgctacacttaccgaggcggttaccggtcagctattcgggtggcacgtgtggtttcggagactgtggctctgaatcacccggacgtgaggtggtacgtgtttggtgacgatgacactgttttcttccctgagaatttggtcaagactctttccaagtatgatcatgggctttggtactacataggtaccaattctgagatttatgaacaaaatgccttttttggatttggaatggcttttggtggggcgggttttgctattagttatcctttagctaaagtcttggctaaggttttcgattcatgcattgagagatatcctcatctttatggtagtgatgccagaatctactcttgcatgacagagcttggcattaggctaactcacgaacccggttttcatcaggtgaataaacaattaatcttagaatattaccttaattaattacattagtcgactaaaaatttaaatgttgaatacttgtatttttgatagatggatatacgaggggatatatttggtctactggcatcgcatccagttactccattggtatccctacaccacttggattttacaaatcccatctttccaaacatgtcgactcctcaagctctaaaccacttgttgaaggctgcaaatgttgattctcagaggattttacagcaaacggtttgctacgacagacggtcttcctggaccgtcgtagtgtcatggggttatgccgttcaagtctttcctggccacgtggcactgccggacgtactccacgtgcaggggacttttcgaccttggaaaatcaggggagccactctgctttcggggctttacagtttcaccactagagtgcctcacccggacacgtgtcgtagacccaccatcttctttctcgatgacgtgtcaactctaccaactgaaacaaccacgaccacctaccgaaaatcttttgtcaattgctcgtacgacgccgcttcacccagaagattgagtggggtcagggtgttttcgcagaagttgaaccttgatatcaaacaggtatttatttatcaaatcgaaaataataaatatttttgtttcattgttgtgatttttactctttctattcaatctcagatgcaggctccgagaaggcattgttgtgacgtggcaccctcttcaggtggtgaagtaatggatgtggctataagagaatgcaaagaagatgagttgatacacatgcattcttgaacagaggaggtcagaataacattaatttattaattatacaatattgtattgtacgatacgggatactacgattaattgtaaaatggcacaataatattaataattcactagttttcttgtaaatcgagtttatttcaaaattggattggttggaatatttgaaaaactacacaaaagtttagaaatctaggcttcaaatgaatctgtacattttgtttttttttcttcacttatctttattaatagtttatttggctaacgctttttaagccaaaagaaaaaaaaaataataaaggagcaaagctattatataaaaaagaaaagaggattagtatgttgagatttggttttggttaacggtggttaacggttttttatatttttatattttttatattatttattaaatcaaatttgaaatgactatatgcaaacatcttgtgtaggaacaagaacaatctgcctttgaacaatagctctttctttctttatttattggaagaaacactctctcctttctttttccttttggttacagccatgagatttgaaagaaagcgctttaataagagcaaatctttgggtatccaagttgcattggcaggagaaagttgagtaagagaacaacaaaacactttattcgttttgtgggtaaaaccaccgttaagagagagagagctagaaaataaatatttgagggggtgttaattataatattttatttcttaatatttgagtttaaaaatatatattcaaatatttttactatctaattatagtttcatcattatttttttgtaaaattttgaaattattttaataatttataatgtcaaaaataagtttatattttctcaacaggcttcataaactgtaatatcaaaatatctattgttgatactataattaaattattcaatattttttaaagagttaaaagtttgatattataataataacaaacattgacataaaaaaaataggtatatgttattttggatcatgtgttttgttaaagttatcaattagactctctgttttgttaaatgacaaaatggactatgtattttccaaaatagtacaaataggaccatgaactgattttttgtcaaaataaaatttagtaataattcgatctaaaagaccgtaatgagggaaacatcatctagtcttataaaggaacttcagccagagaatctcgtgcttagggacaccgcacttgcacccactttttaagagtaaagcaagcgaacggcgtcacccgtcaaccatggtggagagtcgcatgtgttggattttgtgccctaannnnnnnnnnnnnnnnnnnnatcagatttactaattaataaaagatcaaaaattattttatgttgcatggttaacatnntttatttcatgattatatgtttaat

SEQ ID NO: 111912 - DNA, 3050 bp, Cannabis sativa
gtcgccggagtgtggtggttatggagctttgtgggttttcttttgtgtttgagtttaaagagagagaaaaagagattgagtgaagaagaggacgagtgagtgagggaaaaaggtttgactatttactttttttttatacatatatatatgtctctttttgattttgactcggtcaaaccgagatctcacatttacaatttcttttggtggtgcagtcaagataactgggggtggtacacctgtgaatttttgagttttgatttgaagaaaaagttgaatgaaaaaattaatatcacgctctagaatagtttggtttgtgttcgatcctagttattgtttgatttttactctcaaaagttatgggtttgaaacaaaaaattttgaaaaattgggtaaaagtggtaaaagtttgcatcttgaagtattcatacctacgaggaacgattcgtgtaaagccaagatcaaggaccaaatttcatctttgaaaaatacaaaatatatctaacgtctctgaaatccatcagtcatgcatttaatgtcatatttttaatcgagacaaatcaaatgatggaactcccctcgagactcgcatcgaaataaatagttgtcagttcttttgcttctccacacacgcttcaccaagcgagtagatgcttcgtgagctaataagataattccacactactataaaattggactttagcaaaattcggtgccgatactattccaggaaagttgtcttccattcatagaaaatatttagaatttatataggtttcccctttagcctccacctgtccacttgtacaggctgaagcaagccttcacaatccacaatattcttgaagcttgggggtgaatgttatatgtgttttcggcaagggatacgtggattctaaatagaagtcaaggtccatcagtaggcctaaacgacacgaactaggccgagcccaacaccaacctagcctttagggaaagcaatcacacttctcactcaggcaagcttccaccaaggttagtataaatccagaagaattctagctccgtgtttctggaagaactcttagcgtgtatttggaaggcagttgcaattttccgtttactgttatgtatagaatatggatatcaatttccttagatattagacagagaataaatatcaagctaaaataggaaactatataattgaagattatatgattaatatcacattaattattcacaatcaagggacacggtatgaacaactatgaccgtgatcaacatgccaagtcagcatatagtcactgcttcatgggatgagcttcacttgataagctcaaagtgatgtataatttgtaaactccccactagtagaaaaaggtaactaagtatgacctctactactccttcatgcaaataattagaatttcttgactcataagttcaagaaaagaataaagtgctattattcattgtaatctcttaggttttttcagcttactttataataatatagactcgtagactaaggctcattaacgccccaaccgcataaaaattatgagtgttccattcatatttgattatattaatcgcattctctttagctctagcattaaataattgatttttcaaaattttttgtaaacacatgtggttgcattagcaagggtgtgtgtgttatcaccagtttgtactaaatgaatactggctcattgctatggtaacaaaatttttatcaaactttgttgtaactacactaaggtaaattgtaagtcgaaagacattttacctaatgcccataaataagactttctaaaagtatatatttattcaaccaagatgagagaatattatattttgatcgattaagtaaatattataaagttacaagtttgttgctgatgagataatatttaatctaatgtagaattgttatattattttgaataatataatatataaattaaatatgtgtaatatattaatatgtataagagaggttacaaatctaaaataaatttgtaacccatgattcacatttgataaagatacaattaagtgagtaattgtatatcggagtaacaaaatcaaatggagatatttctaagattttaaaactgtcaaaattaatattcattcagttaaatgagtttttcaacattgggtgttgaattgggtcaaagaagagttttgaaactcaaagtttatatattgaaattggtccaggcaacatatcgcctactttaagaaacgagaggtttttgacgtatttaacttatctcaaaggatttaatgatattgctcaaggcgacatgtctcctagtaccaagataaatgagctattttttggagcattttctagtttttggtgacatgttgcctggagcctattctgcataaaaatattataaaacattggaaatcgatgggggacatttctatcatcaataaacaacgttccttttttatttaatgccctattttggctggtaacatccatggggatgtcttatctcaaatgtgaaattcttaacactataaaagaggtcttttggtgctcatttagtgacctagttttctatcaacaaatacttgctagaaaatataaagcttgataattctcaaacactactacaaaaaagggtatttgcgacggttctaaaaatatttttttggggaaccgtcgctaaaaaaattaagtgagtgtttaaaactgtcgggaaaaataggatatccctgacgattttaaactactggaaggtataggctacggttttcaaacatgcctttaaaactcccatgtatttgtaaaagagaattgccgacggtttaaaaccatcgactatactataggcggtagttttaaagcgtcatctatagtattttcgacggttttaaacatttggcaattctcatgcttcaattttacgcgttttgaatctgaaatgtcatttcccacattttaaatttcaaattttttactttccctatcttaaatttcatttccctccttttaagatataatccccccccagatcggaagagcgtcgtgtagggaaagagtg

SEQ ID NO: 111913 - DNA, 5215 bp, Cannabis sativa
tgtctctttattgatatttaaatgatagagaatacattgaaatagagttttatttagggcataaagcctaacactaacatgtatactacatgcacatatgtatatctttttatactaattttaccttagtttcgtaatcaagtatatcggccgacctgagtggaaatatcggttgttgaatggaagcccttgatcttgctttgtaattccttccaaaaacttgctaaaattcataaaattctttgtaattccccagcaaacgtgttcttccaccaatagatgatagccacgttaacctacaaatattgaaaacggaagtataccttccatgatcaattaacacctagaatgtaatcagtattacttttaaacctccacgtgtccactcatatggattagggtaagcttccaccatatgcagaagcttaggaataaatgttatttgtattttcggtaagggacacgtggattctaagttagcatctaaagcccactagtgggctcaaagaagataattgggtcaagcccaagttagacaagacctcccaggaaagtagctatgctccatgaccaaatgagcttctgccaaggacaacctgtatctggaagcacttctattaccgtgatgtcggagagccaaactgcatgttcctggaagactggtctgatttccctttttattcaagcacacagaataaggaattaaatattcctcaaatctcgacaaaagatcgtattaagctaaaaagggaaactacctaaatgaagaccaagcaattaattcatatttaattgcccaccattataggacacaattttgacaccttaaccatatcctatcaatctagttagcacatctatcctcctatgggttgggcttcacgaggacaacccaaccttatgtattttcatgtaaactcctcattagagagaacaaggggaaactaagtataattataatactataaatacccattaaatcctttagattaggggttaaattctcttgcaacatgtactcgggaaaaaactgagaatgtatgctcattgtattctcaaaggattttctacctcaaatacacaataaaatcgactcatggaataaggcgtgttaacgctccaaccacgtaaaaaccttatgcatgttttatttctttcttcagttctagtttattataatttattttttgaaaatatcagtaatcaaacatcatggaaataccatttatagtcttcctacccgaggcatacttgtgaaaataagcactgttcttgtcaccaagctttaactaactttctttagagcgagaagtccaatatttttcatctttttcataaagaacatcaagctcttttttaattttctaagctttccacaagacacttggtcaaaatttgcatcaagtatattgagttcttttaactttttataaatagcaagcttatgtcttcaataaattttcttgttctagcttttcaacttcctagccactgttctagtattaagttgaacattacaaagaggatccccactttttggcttccatccatgctcaataatagcttcacaatcacttttaacagcccaattattttcaaagtggaatctcaaatggaattttaccatgttcccatcaggtttttgagaagtagagagccatataggcctatgatcggacccagtaaaagtaagatgagtaactgacgatactggaaaaaaattcatctaagagtcattgcacacaaaacggtccaactattctaggacaaaagtcaaatcacagtgtttattactccaaataaactaaggtccctcgaaccccatgtcagtcaaaaacaatctttcaactttcctaaaattatttatcaaatattgatatcgcaacgagccaccttctttccccaaatgagacaaaattttatttcaatctccttgacaaacccaagggatacgaattgttatgagcaatttgacaaagaagagcccaaaaaaagtgatgaagagagaagtcaggttgaccatagacgctcgtaaaatgtccaggaatatagcctaagattcgaattaacacatcaatatgacctcccaaaaagtttaagagcattacatcgatgttatccatccaaagaagacaacgtccaccacttctttcaactttcccaaccaccaactttcccacaaaccccaaatgaatccaaataagcttcatttctcaacactaccaatggttatcgataaaaaaaatgtcaagtttaactttctaaacattagtgcagagagtctggaacatcctatcattactcacatcttgaatgttccaagccaacacattcataatgattggcggcccagtaatccagacacctccaagccactagaactcaccataaaaccattcttcatctcgttggcatcactaccctcattatcaattggagttttgacattagttttgggctatataacaacatcaacattactcaaaacctcatacaaacatcccccatccccctgctcttcaccaccttcatagccgaggaagtaggagcaaaaccatcaaagcccaaattttttttgctccctcgaccattgactatcacctccaaaaactgacctatctacaaagtcttatcatgcttattcttcactgaaactaccccttattttttcactaaacttggcaaaactcactgcttaactcccagaattggtggtcgttcaccaaccttggcattgaaaccaacaagatcaattccatgcatggaaccatgcaacgtcaaagatgatgaagtgtagaatgaaggagaagatgcacttaggggggtcacgtgatcactaaagtgtggcacacgatctccaacccctacatgcttaataaaagggtttaaatcaataaaatgcccataaagtactatttcaactttctccataagtatcccacgcccaacaatcttagaattggaggatgccaattttagttttgatgtataatgtgtaccaaaatccccaaaattaggtaatttattacctaattgcatgggtctactcaaatcaatattagtatctccattaattaaagtaatgcctaaattatcacatttcccattacaagaaatgtgtaatttttcattaatttccaaattgatattttaaattaattccttggccactgaattcgagagagaatctcttgcaatggctttcccttttataactgttgtcacgtcaaattttttgacatacacaggagctttcttttgctaagctgccaccttttggccatgaagactagcgttcaaacctccagaagaagatttttcagtgtgaaatgtaggctccacctgattttttttatggtaaatatcgacctagtcaccaccgaggctttgataaagtccccatacttctaaacatgtcccgagaggatactcgaatgtaacaaaggacattcacgaagcaaatgaccaatactattgcataaacatatggcagtctctcatatttcaaaggtatcataattttgggctcacttttaatcaacgtatgacgtaaaaaatttggtaaaggtttggcaatgttaaaacccacacttgaacaaatgaattttctaagacaatctcctgcagaatcagcgtcaatttttgtcacctacccaagtaaatttccatctccttagtcatacaagagatatgtaggagatgaaattgaacccaaaatttgagtctctcaaaagagagattatgataatctccaatacccgtaggaatttctagagctagcagttgatgttcgagaagccacagaccaccactaaacaccctgcaacaatcacccttatcaaaaaagtgaattaaaaatctattataacccacactatttaccttaaccgtgccaagaattttctaaaatattatagttgcattagttatgtccttcgaagacataaacattgatgaaatcatcttccttgcaagggtcttagcatgctatcaattcctgtagtagagaatttttccaccaaaacggcattaataacatcatattctccgttatcgccatccaaagaatcatacagagtcgtcccttcatcatgatccatgacgaataaacaataatcagactttgaaaatcctcaccaaaactcaaaattttcataattcaaaatatttctatatgattaattattgtaaattaataatgtgtaataggatggcgattattttaaaaataaaaaataaattaaatgcaattttttttacacagattaaaaccaattagtgagtaattgtagtttaacaaaatgaaagaaaataataagttaactatatgacacctacacatttagaagaaaagagaaaaaaaaatcacatccaacaaaaaaagtaaagataaaaatgatttaattgttatatcaaaaatttaataagttttattggtaaattggtccctataatttttaattggtacccaaaccttaacttcttgcagctttagttctcgagtattaatcactatggtggaggactaacactggcaagagaatcaaagttaagaaaccaatttattaataaaaaaaattagaaaccaacatgtaaaattatatatgacacttattttgtatattgtattgttgtttgaagcaagtataattgaataataacttctcccatttatgacacttattttgttttcccctttgtagtgaaatatttggcaaataatacctaaacagtaataatcacaatacatctatatgcacgaacttctattatattacaaacttatgatgataatgataacattcagaatttacaaccattgtagtttggtcacaaagttgttttgagtttatcttctttctattatcccccttgtctttaatatgtttttcattttgtctttggaataattatgattgctgtgaaaattttacaacaaaaggtctctcttttccctatatccatattgaaatgaatcatcatcccttttctactttttataattttactcatgatcatgtattttccacttcaattattctcctcacactattatatttacatacagggccggggtataagcgggctaggtccgtgcttagagcctacactttttgggacccaaaataaaaaaaatttattagccttttatttaagtaaaatttagggctatttacaaaaatatgggaaaataaagataagttttgatatatat

SEQ ID NO: 111914 - DNA, 15032 bp, Cannabis sativa
  modified_base (49)..(62): a, c, t, g, unknown or other
gatggttggaaggctgaccttggcttagagaagtcaaggtgccgcacgnnnnnnnnnnnnnntgaaaaggtgagcccgtgacaccatgcatagtagttataaggagacgccacatctccacattcacaaccacaactcatatcacaaaactaaatcaccattaacaaaactaaaataacacaacattcaaattataacaaaagaaagaaaagaaaaagaaagaaagaaaggaaagagagagagctaaggccttaggcctagaatagatagagggaaatgacgatgacttttgtctcacaacatccccatttctcattctcatctctccatttccattcaaattattctctcccaatgccttcttctaccacctctgctaatactccaacacttcgccgcaacaggaggaagcttaatctcacttcttccttcttatgtcgtaactcggccacggaaccactcccctcgcctccattaccagataaggttctttgtgtttggattttcgggagtacgaaattgagtgctggattttgatgtgtgatgtgtgtgtttgattatttatttatttttaattaacaggaagtgaagaggaaggttccggatctgcagacgctgctcaggcgattctggaaggtggcagctccttattggtcgtctgatgacaaagctcaagctaggttgcgactcgctggtgtttttgctcttactcttggtacaactggtattagcgttggcttcaattttcttggccgtgatttctacaatgccctagcaagtcagtagtcttgcttcctcactcttcattcattcattcatatgatttgcgtttgtttttcaatgtactcactgactttgattttgtttgtgaaatactcaagacaaggaccaagaacaattttccaaacaactgctctactacttgggtgccttcgctggtggaattccggtgagcacacaaattgctgcattttcgcattaggtatttttctgctgcttttgtgtttctctaacatgattcctaatagattcacctccacatagccagatttcacccacatgcttccataaacgacgtagaccctgtaatagcacaaaggctactggcattgtacattgataagcccctataacactaggaaagacaggatcaaacgttaggattatacattgcttttttactgggtcatcatatatgaaatcaacagcaacaacactagaggattttatattgctgtactgaattgtatgaggattgtatattgcatttgtggctgtctttatttgaaagcaacagctagaacacactagaatgtttggaaactgaaacagtttattggcagttgctgtactttgcagatattatcttatacataaataattgttccatttgattctgttgctcaggtttttgtgctgagagattatgcaagagatactcttgctctgagatggaggtcttggatgacaagctattacatggaacgctacctaaagaaccaaaccttttacaaaattcaatcacaatcaattattgataacccagatcagaggattgttgatgatcttagttctttcacgggcaccgccctttccttctcattaacgattttcaatgcagtggtggatttgatttcattcagtaacatcttgcttggtatctatcctccactgtttattgttcttcttgtatattccgtcggtggaacagctataagtatctttcttggaagggtaatgtcacaaccttttctctgtctcctcagagctttagtccttgacatgctgtttttggccaatagtagtatcaatcatgattaatggaatttaatttctctgtaattttaggaattggtcagtctaaacttcttgcaagaaaaaaaggaagcagattttcgttatggccttgtgcgcatccgagagaatgctgaatcgattgctttctatggtggtgaagaaaatgaaatgcgacttctgctgcaacgattcaaaagtgcttttgaaaatctaagtgtatgattattctctccttaagattttgcagaggcagttgtatgattttgtagtgcataaattcaaaatctttggtctttcagtttataatcaaagcagataaatggtctagtatgcttctggtttataatcaaagcagataaatggtttagtatgcttctgatgtttggggaaacttatactgctcacacatccctcaaatgtttaatctaaatctataatcattatggaaaaaagaacttaatattagctattctaagttgcacactccaaagtttggaaagttaaatcaccgagaggtgggtcgaatgataagccactgattttcacccaggatgtttagggctccatttgtacctagagtttcctacctccaaaggactagggttcaatgctagataagggaaaaggttagagagtgataacggctattaacttattattatagtttaaataagtaacagtgtatacaagatagatattctaaagaagtatatacttgtccttaagcttttgcatgggctgctttggctgcctccaataaacttgtccttgttatctcattatattcttttaccctgcagcaattgctgatttcttcgagaaatcttgactttttcaccagtggctatcgctacctcattcaaatccttcctgctgctcttgttgctcctatgtatttctcaggaaaaatagagttcggtgtcattaatcagtcagtatctgcttttaatcatatccttggggatgtttctctagtcgtgtaccagattcaagctatcagcgcattttcagcaataatcgatcgactaggtaaatatgtttgagttgtaatgctcttgttatatctattttgtttatttgtgtacctgcatttctggggtccggtatgcttaacaatggtacttggtgttggtgaacatgttttaagaacagtcagctcttgccgtatgcaggtgaatttgaggatgttctggatagtagtgggagttccaacagtagttctgatcctgtagaggagatacatctcgcatactgtagaactggtggctcacccaatcttgcatcaaatggatctgtacctgttgataagtgccaaaagttactggatgtagagagcttgacagtacagactcccggaagtcaatctacattagtcgaagatttgtcttttgtaattaaccagaaggagcatctattggttagtaaattagtctgcagtttaatctttagattttatgacatgaaatgatgattttaatattttagtatgaataaatttactttataataatcatgtaacagatcactggacctagtggcagtggtaagacttctttattaagagctatggctggtctttggaatactggaagaggaaagatcacattttatgtggaagatgaagaagatctccagcctcacactccttcagatttgagtcctcttgaaaccgatactgctcgtgatttagacataaagattgaaagatccgtatctagaaacagcagaagtgtatttttccttcctcaaagaccatacatggttttgggaacacttcgtcaacaattactttatccaacatggtctgttgatgcaattcccacggcagatggagatagcggtacaaatttgattctttgcctacagatttttaattttataagctgcacacatgaacaaagttgctataggaatttatgctccatgcctttgtaactgcgtaaaacacagttcttttgttctttttctacaaaactagttttctgctattgatcagcctctcttttcgaagagaagacaatttgctacgcagcttttcttttcttttcttttctgttttgtttttcaagaaaagatgagaaatgcataaagctctttgattccataaataatttgtgcattgagctcttgttacatgttcacacacatgattgccacttactatatatatgacaatacatgttgcatagtatacattattatatttgagctgcattagtgcttgacaagttcagattttaatgttgtcatttgtggtaaagaaaaacattttctgatgtcatgcaatctacttggtgccctatattatgtcacagatacacttcctttcttgatgggcatatcaaactctgagaatacaagttctgaacgtaataagcccacaacagaggatataatacaggttttggagaatgtccggcttggatatttgttgtctcgtttcaatcttgattcaacatatgaatggtctagtgttttatccttgggggagcaacaacgtcttgcttttgcacgtattttgctttcaaaaccaagtttgattctattagatgagtcaacaagtgctttggatgagtctaatgaggtacttagttatgcttattttactatatgttcttctcataagttttgcaattcattcatcttgtttatcccactactcaattggatcccaagctcaacttaaccaagatgttattttcatacactccttgtggcaggctcatttgtatcaagaagctgacaaagctggtataacatttataagtgttggccacaggcgaaccctttacggcttccataggagaagattgaacatatcgactatggattccatcaaaaatcagcaaaattggcacatcgaattgatcgaccatggcagttcgtataatttgtcaagtttgtagttggaaaaaaaaattgaggcttacacgatttgagggtccacgataggagtttgttaatataatccctcttttgtagaaaacccgtttcaaaagatgaatgaatgaatgtgcttacctttacgtttgttcttggtttgcaagaaatatgatgttgagaccatggtggcttagagaggtttaaagaatgtgaactaacaaaaacctatgaaaaattaggattgttaatagtacttgttgcaggcttgtatgcaaagagggctgtaataatattaatcatgtagctactggaacttgtaaatctggtcaattttagtggttggaaacaaatatttttcaatatggtaatgtgttcatcatagttatttatggtttcacactaatttttgtcaaatttttaataatttaatgcatcaaagaatgatttcataacagtatatttcgtgtcttctatacatgaaaataattaatttcacacacgtataaaacaagcttcaaaataatttgtatttatttttttgacaaattaatattatgtaacaattcaaaataaattatatgacaacttgcattataattatttagaacttctatgttgaatgatgaaaataagaaattaattgttttaaaattagttttatacactcacgaaataagatattttgaagttagctataggtattttaaattattcataattttataaaaactcatgaggtcataaatacatacaatatacaatgccataatatatttagattataattttttcaagtactaaaacaaaaacattcttaccacttgatacaaaagccacacccccaccatataaataccatatgtatctgagatatgatatgattattagaatgttaagtccttactttcaagttattttatgggtttcttctctttttattgccattatcactaatttaaccttctggatgcagaaatgcatggattctgcttttgctaaacacttgagaacttcaggtaaaggaggtgcaattaaggttcatatattttccaagtgaaattttattccaattgagctacaagaagcttgaaaagtagatgattattaaacccttgtaaaatttaacattgaataccattaccataccatgtaataagacacaaacatgtcaacaaataaactcattaatcattacaatttcactattaattagttcatacataacactgctgacaaacatatttatttcacaaagtgaaaaaagaaaagacaaaattgttctttcaaaaacacatacttaaatgaaaacaaaatgtcccttttccctgtcccaaaaagattctccacgttacatatattagtaaaaggtaaataaataataaaaaaaaaataagtaaagacaagaattggtccaaagaagcaactttcctactttggaaccaaatcatctcagcaaaaagaagctgtgccctcttgaaagcaaaatccagcttcaccctttttcaaaacaaaagtccttgagagagagctaaaaccatcctacccatactcaaaagctgtacagacagaaccgacggcaacatacctacgactgccacaagccctaccaagaaaacaaatattaccaggcttcgacactcctaccagtgcacaccattcccattgctatacacaccgtttactgatgacccattggaagacttgtaaacatgtccgttttggtggactttggctggtgagtgtccgttgcttattccgttgctaactgatttgctcacatggccatttccctgaagaaccgatgtcaagttgccgcatgccgctgctataagtcctgtaacacaatagacgaatttagagtcagtccttttgacattcctagctgtgaagtaaaaaattacctattacctttggcattctttgacatcttttaattaagcattaaacaaggccccccaaaaaaaactatctgcaatatcaaggagcataaaaacatacctaagaatgtcgcggaaggctttccaggtctcgatttaaactcaggatgaaattgaacaccaacaaagtatggatgagaagtcagctccacaatctgtatgcaatagcaaattatttatctaggcaaataagtctgtctcggtacaatatgttgacaaataaggggctaatcagtcaagtttttatacaaaacttgattttcactgctctaagaaagtacttacctccattcgccggtctgtttcatctctaccaacaaatgacaaaccagcattttcaagctgtgataccatatcgggattgacctacacacagaagctggcttcttagtgtctgttatattcacaaaagcatcatctactttgttagtaagaaagaatgctgcttacctcatatctatgacgatgacgttcatcaacataatttacattgccatacctgaaaacacaattcaaaccatcgttatttttaattataacttatgttttaaaaggtatatgatcacatattaatcaaatccaaaagttattatcatattactatgaaaggaattatatttggttaaaggttttcacaaaatataaacttaaattcagttctatgtccttacaacttcgcagatttgcagtctgcaaccttgaaataagttctccttgatcccaatcgcatcgttccccccatatgagttttcgaaccctgctcgataaacatcaaccctcttaaatacaatagaagggaaacaaatattaattatcaacattaaattgataaaaatatcacttttgtatttcacacctctggcataaatatgacacaaggatttttggtttctggatcaaactctgtgctattagcatcatgtaaattaagaacagattgtgcaaactcaataacagcaatctgcatgcccaggcaaattcctaaaaatggaactttgttctctcgagcatactttgctgcaagaattttccctcgaactcctctgtcaccaaaccctcctggaactagaacaccatcggcaccctaaattggaaaaaagtttgtagagttaagtgacgaaaataaccatgaatgaacactgagtcactgaccctaacactgataaaatgattatggatgaagagaatcaccttcaaaagatcccatgccgctttatggacctcaggagcctgcacatagtgaaatagtaaatatcaaattcaaaataaaactaagtagaaactgaatatatggctcaacagcaaaccaaaattggttctcacctctgcagcagttgcatcttcaagatcacctgcggccacccagtccactacaagtttctggtggcaagcaaccgaggcatgcaaaagggcctggaacaggagatgaagatattagaacctaaagaagttacaaccagaattcggaaacattagacatcggtttatgcatgaaaaaatttaccttcaaaacagagagataagcatctgaaaggccagtatattttccaaccattgcaattctaacctgtaataatcatacgacaattaatagcacgcaacaggtttcaaagatacgagagaatctcaaacattttctaggaacctactgtatcatgcaacttgtcacaaagtattgttctagcagtccactccttcaaatcgggctctctagccacactgcatacatgttttgacaaacttaaaatttacaatgcttctataagaaaaagaaaatacttaaagaagcaaaacaagtgtttataaaacaaacccatgaaggttcagctctttcaggattgcttcatgtgccttctggtcctaatttgacaacggaacaaggaaaacaaacaaaaacaaatcaagtccttgcaataattaagtgtacccagatcaaagaaatatcagtactccaagctaaaatagtttcagctgtagcactaaactacttactcttaatagcaaaggaacgtgccatatgtttgggacatcatatagagtgacaatgttctctgcctgtaacaatgttcagaaaataaaatccaattactcaaatgaaagaaaacatagaataacatcacaattaatataacaatgctaatggtaccggcacatgacaaaactgagcaagcttcgccttaacattttcatccaacacctgtcaataacaaatgaaatataaaaaatttagattactgcttgaaattataagatgtagaattgtagaaggatgtacctttgtgctgcgacaagctagaatatttggtgtcaaacccagtcctctaagtccccgaacactatgctgggtcggctttgttttctgaaattgaaatttgatgaaaaatttagataaatgagtgatcaagcatatgagctaaaaaataaattaatgtacatcatgtctccatgttgaaaaaatcaaatctagtattagaacaaagaattcttaatgataatttcactaattgatagttgttgatgatacctgctcgccaacaacattgagaacgggaacgaggctgacatgaaccaagcagaaattgccaggccctaatgaaagaaaatattttgtatgagaaacaggtttgctagtcatacaacttaatttagaagaaatgttgaaaacggaaaaagaacaatttacaactgaacatttaaacttaccaacacgatatgaaaattgaccaagtccttcaataaatggcatagattcaatatcccctgcatcaagaatgcaaactcaagcttttaacaaacgaaataataaaagacctaatcacataccagaaaaagaaatcaccaatacctatagtccctcccaattcaatgacacaaacatcagcaggaccttctttcccgtcaactggtaccattgccacacgctctatccactcttggatagcatcagtaatgtgtggaacaacctttcgtaaacaaaagatagaaccaaaattatttaagcataacattgtctaaaatccaaatcattgtgcaaaaggccagaattacaacatacctgaacagtttttccaagataatctccttttctctctttgtcaataacagactgtacaatcaattaaatgtcagctaaaataatttttatgacgattataaacatcaatgaaatagggctcttgaatagaaaaaacatagcaaattacccgaaatatttttccagttgtgatattgttgtcacgagttagtgttgtgtccagaaaacgctcatagtttccgaggtcaaggtccaccttcacaacaccaaaattaataaataataatcaagtaaaactaacatcaattgtaatctaatccgaatggcatgtataaccatccctttcaacaacatacctcaccaccatcatctaagacaaacacctctccatgctcaaatggagacattgtcccggcatctgtgttcaaataaggatctgcaagtaatgtaaccattacaattgttagcttctaacacctaacaaaatcttgttaccacaaaatcatacatgaagcaacataatactattcaaaactaagcctaatcaagatagctacttcaaacttcaatcagtatggtatttcctggccaaaaactatttctctataaccataaaagaacacatttcaaaaaaccccaaatgagaaaaaatatgaactttaaagaaaatacatatatatatatatatatatatgtaatgcaagaaaagtattggtgtaacagaacaataccaatcttaatagaagtaacacgaagaccacaagccttgaggagcacaccaatactacttgcagtgacccctttgccgagtccactaacaactccaccagtcacaagtacgtacttcatttttggtactcacaaagaccaaaaaaacaatacaatacggctctgttctgactactgctgccgtccacacagagaaagccaacgtattactaagattatatagacaaaaaataacaaaaattaaggaaaaagaaaaacagaggtaaacaatgatagtaacggctaaagataatggaaacaacaacaacaagtactaagttataaaaactgagacaaacccagtttgcttcttgttctgataaaaccaaagaaagagataaagattagacaatatgatatttttggataataaaaataaattaaaagaagaagaagaaaaaacagcaaccaaaaccttgttcacaatgacggtttttacaaagctttatgttcacccccaccacttttcttcttccctttcaaactgtatatttctttttcttttcttttttttttttctgggattttgagttcacaccaaaaaaaaacacaactgggtcttgttccaaagtctatttagaaaacaagaaaattaaacaaaagcaaatcaaagcaaatgggggttgttgtatgaaaagaaatgaaaaaaagaaagaagcttcgaacgaagaaaaagaaaaaggtaaagactttggaaaacaagataaaccaaaaacaaagagtgagttaacaaaatccaaaacccaaaagcataaacaagattcttcaaatatatgaaccctttcgttttgctttttcttcttcgtttcagtccagggcggcgggtggcaaaacttgataaccagtatcccttacaagaagaaaaaaaaaatataaaggctttccctttttttttttaatttattttatttttaacaaatttaaagtttttaataatttttagttttatttctaataaatcctttttaaagacaatatttttagaaagtagaaaaccatatatgcctaaacagaatttacaataaataaatttaattttatttttattgttgtccttttttataataaataaatattaagtgaaaaaggtttttagggtttccatgagattccctcttgttttaaacatatatattaaaccttctttaaatgtacacatttggacaaaaaaagatattcaactttgagagaatcaaatcaaagagaaaaacaacatgaaaaggtaagatcattcacacaccaccacaccatgccaaacttgaattttctttaactctttgttggaaaagaaaaaaataacatgtgtcactttgatgttactaatcccattaataaatattagccaatagtgaaaatatataattgtaacaaccacaatattccttcattacaaataattagaatattacatatggtatccaatacaattgttcatacaatcccaatttgtatttctaaactaaaacataatcaatttggagaaaatcatttaaagactaaactaaacgaatttagtgctgatggattcaaattgtttataattcttcacaatttcagaattattatccaaattcaaatgtaatatgtttgtaaaagatattaaaagaaaacattatctccttctagattgcattgttaatgagaataattttttgtgttatatataattatttatttggtatgttgatagatagattattgatattgatttaatatcagtattttttttttccataagatttaattttaatattaatttaatgttgttttgttaatattttttataaacttaaagaaaatggaatgactataaatggattgatttagttcaaatatattttttgaatgagattaagttcaaatatttaattgatctagtttaattttgaatttttttttttttaaataaaatctatatagttttgttaagaaaaactcgaagcaaactaaatagattatccaatacaatttgaaaatgtattaatttcattattagtaaaacaatataaagtttcaaatattttaatttttaatatttattttattatttattataaaaattaaaatttgtaaacttatttatattatattgattgtaacaataagtgatgttggcactataacaacactcatacattaaacattcattatgaaaacaaatatgtatgcattgatgattttttataacaatgaaaaaatcatgacaaaaataccatattatattacagaggacataaaaaaaattctttcaatcaaataaatttctatcaacggaaaacagtataaacaactaatatcatagtttacgaaaactcttaaaatattggacatcaaacttaaaaaatatatatagaaaaaaattataaactatttcttttaataaattctgaaaatattaagatgcaagggtcctcaacatagccgaaaaaaagcacgattaaaaaataaaaaataaataataaataataattataacacaattatataataaaaaatgatgcgattaccatttaaaataatatataattaagatttaatatacattattataagtagaaagacaaggtagcttgctcaaaaatataaaaaagaaatggataaacacaaaattttgaaaattaataataacattaaaaaaaacaataataattatattataatcattgattttgagccaagcaaaattacatataaatcttgtgtggatttaaagtgtaggtacatagtttattttatagtgtatgactgattgtggtgagaatgattctatgctgcatatttataaataaaatatgcttgattaaggactgtaattatatagtgtatgtaattaccttgttatcatcattgtggtgaaagaaaaaaaaaacatttattaaattattattgggtttttttttttttgatgggtattaaattattattggttgctgactagttcatgagtggttgctgagtgagctatatactaaatagtgatttacaatggataaagtgacatatagtcaaatgggtaaggcatgaaatggacagtaagagaatagagaaatatggttagtattaattagtactacatacatagattgtatgcatattcaatacttcttaagctattattattattattattattattaaaactaagctctcttattattattttatattatcccttacttaggttacatcttacccacttcttttttgttttattaatcaaataaaatatacttaaaaaattgaaaaaggacaaatatgacttatccttattttcagggtaacttttgcccttgtcatataatatctagtcaacttctttccctcttatttggtgactttaaccaaatattacaaacacatattccatgcatttcaagttgttgggcctctcttttgtatattatcctaatgactaaactgcaaattaggtttgtatatcaaatttaattaggatattcatctaagatttactcagatttttcaatactcaaatttgtaattgaaatattattctcattattcctttctctaaaaaaaaaacaatcatacaagcctacaagtatattaagaataacaaatattttgtttttaaaataacaaataagagagaaccgtatttttgtcattaatatagtttggtcattgtatatttaaaattaggtacaaatttaattaacctacttatgtggttatttatgatttattaaataattaataaacttgatattcttctaagttaatactttttggctcatgtatgcatgtaataagaaattagatgcaatattcatacaaaaagaaaaatgcaacattagctttctaaataacaatggaaaaataacctcaaaattattataaaaaactaacttttagagagggaaactctttttttttttgaatgtattcggcagtcaaaaagccatttgtattattaggttatgtatgattacaaagcaaagaaggtatatatacatatacatggggtaaacggcccaataagaaaatgggctgaaggcaaatgggcctaagtaatatctaatatcccactttacaaattttgtaggttcatcttggttacaagtgtatggaaataagtagaacgatgttgtttttggtgctgacgtgaattagttttagtgtgccttcttagattttctctcgaacaaacgtgacagtcaatctcaatgtgctttgttcgttcttggaatacggggttctcggagatgtgaatggcggttgtattgtcacaataaagaatggcaggatctttgtggtggatgccgaagtcccgaaggagagctaacaaccaggtgatctcacaagtggcatttgccattgctcggtattctacttcagccaaagaatgagagacggtacattgctttttttgatttccaagagattaaggatttgtcaaggaagacacaatagtcagaaacggaccttcgagtgtcactacaggaggcccaatcagcttctgaaaagatcttaagatgaaagtcagtattggacatcactacaagaaaaatgagtattaatgaggacaaatttcgttggtaaaaacttttgttttcgtcagtattccttatcaatgaggacatttcgttggtaaa

SEQ ID NO: 111915 - DNA, 2203 bp, Cannabis sativa
ggtcgccttacattacaaaaaattatcatccgcaaagagcatatgagagacactaggcgctccattagccactttacaaccatgtagccactttacaactgaatatttttttttgagtaaataacatttttgccctccaaattttttaccataccaaatttttctccctaatatatagtctttgttaagaatactcttcaaattataacaaatgtcggaacgtagttctttcgttcacttctatttagttttgccatgtaataaatgacatgacagtattgtttgttttttttaatgatgttattttgagattaggtgaattttaatgtaaattaaatacccttatattttttacaactattatcatcaacatcaacccttccccttttttctctattcttcacggttggggttcattttttcaaaaaaaaaaaaaattctaaataaaggaaagttagcttcatcacaggtggaacattggaacaacatggatttgtgaggaacaagatttgatcaattgacaatgatccactacctttgcctcctaaagattcaattggtaaaacattcattgatttggttttcaaacccactgccgattatatgaagatctggcctcaccgataatattacatttatatatatgaactacccttcatcttgaatcatcatcataattaatctttcttaatttctttctcagtttcgagattcagttgagggtgtgtttgggttcagaaggaaatctaatcttgacaccaaatcaacccaaatcaacaaccgtcacagaccgacctccgcctgcaaccaccgtcaacccaagaaattcaaacaaaaccctggagcctccttctctcaatttgaagtcaagattttttctaccaaccaacccaagaaattcgaagaaacccaggaacatcttcctctcaatctaagtcacgatttttttgagccctaaatcctttcttctcataaatcgaatgtaaaaacgggaaagctttcaattaggggttattttaatttctaagattattatctgaaattattttaaaactttattagttgtacaaaataattaaatgccatgtcattaaatggtttctctacatataatatgccacatcaccagttttagacaaaaagaaaacgaaagtgacaaaaggatgaaatttaattaatttaaagagtttgagaagtattcttaacaagtaaaatattatagggacaaaatttggtatggtaacaagttcgggggccaaaaatactatttattcatttttttagatagttattaaaattactaatgaatttaccatattgatattcacaaagaacctccttgaatgaagattatttattgtttaacttaaagtacatgttttgtcaaatcataagttgttttttttttttgataaatcagaaagtttgtattgtccacaatcaatttttttacaaactaaaggcaccaatcatggtccgtaatcttctatacatcaatactaatgtaaacaacactttagatcaactactctatgccttatacccctctttacatgcccccttcctctgttctttttcatttttttttacaattgattgtaccaaaccagatccatttgttgcactttcttcgaccagcagagggatatcctttgcttaacatctgctttggtttgttgcagcagatgatcggcttccacttgtttcccttcccaaattttagtgtttcgtgccctccaaattgagtacaccaaaccagatacagaggcaacaaatacttgcttcctgaatttacttagtttggccctcccaatccacctaaacagacgggtcaaggatacagcagcagcatgccactgcagctagtttttcaactcttgcaggcagaaattcgcaactgtacattcaaaaaatagatgtgcacaagtttcagtaccttgacagcaaagaatgcaactatcttcatctacaattcccattcgtctgagcctatctcttgtttttaatctattttgaacggcaattcaagaaacaaaactgtgtttcgacgtgttcaagcgtccccaaacttgttcactccaacacaccttgtcccgttgtgttcgaagaactttatagcctgtagcaacactgtaaggagatatatggagtatacattggaagggaccgatattgatctaagataagatatcataaacttacc

SEQ ID NO: 111916 - DNA, 2182 bp, Cannabis sativa
  modified_base (37)..(39): a, c, t, g, unknown or other
tccgtgaaagtacaataacgggacaaaatcatatccnnntatatatatatatatatggaagcctttcaaactctaaaggaaaaactaatttttgcacctatagtcattggatcaaattgggagcttccgttcgagttgatgtgtgatgcaagtgactatgttgttagggccgtgttgggtaaacaagttaacaaggttttttgcaccatctactatgctagtatgactttaaatgatgctcagttgaacgatgctattactgaaaataagatgctggctatactttttgtttgtgacaagttcaggttgtacctattaggaataagttgatagtgtacactgatcattcaacaatcaaataccttatgaccatgaaggacgctaagccaagactgatccgatgggtccttctcctccaagagtttgatctagaaattagagacaagaaatgtattgagaacctagtaacagattatttgtcaagacaaaaattagacaaaaatccttaaatctaataatctcaatagtttaggaggaatttttagcggcaaaaaaagttcagaggacatgatttagtacatatcaaagttcgaaatagaaaaatcataattagtcttaaattaattatattaatattatcaacataccattgattagacactattgcttctttcagaaattgtcataaaataatgttgagcgaatcaaaaacttaacaaaaatggctgtgttttttgtttgattatcaaattgagaattttaaactagtaaattgttttttcaatcaatcttggtcctagacctactcctactactctatgtggagtagtagtagtagtactgtacagtgacctgtatcacagcatatcatatagcatagaacagcctacctatataatttaatttatagttgagaaagatactctgttactttaccccataccaccagccagggagtaaccacctaagcaggttcatttaattagtttcattattagtagttattttataacaatgaaataattgaaaatttcatttaataattaacaatgattaaaacctttccccccacttcaaattttcatttataaatgccacattaattatagtttattttcttcataatttaggtctaattttgtaaacacatttatgtttgtaccttctttcttgatgtcaaactctgtacatatattaaaagtagttttatgattttacagattgcaactacaacaacaaacacaagccatttgaaagttaagaacaccatagccaatattgttgcttttgttctttatttcaagaaaattagtaacagcttcaatttaatcaataaatggctcgttaaaggctaaaaaaaaaagaaagccttacaattcacaaagcagaacaagaccaaatgaaaatgagacagtcccaaaagcccttggtcaccaataagaaaatgagagaaatataatgcatgtttggcattataattaaaaattattttttgttttttttgttaaaagaaaattatttttcaaaaacaatttgacttgtttagtattgttttttgaaaacagttttcagaaattaaaattacaaaaaataagaattttgaaaacaaccaaatgttattttctgttttaaaaaccaattcaattttaatcaatattatttttaaaaaacactaaccaaacatgacttgtgttttaaaaacttcaaaaattattttttgttctcatatctaaaaataattttttaaaaacaatacccaacatgctcataatcttttgatctccttaagaaaaagtttatataatgaattgttgtgaatgattgttaggctgtgttctctaatactttttcaattggtcttttagtttttgaattaaaaattgaaaatactttcagaaaaacatgttatataaatatatttttactttttaatttttaaaatgagaaaacaaaaaaaattactttaaaaaaaattatacaaacttttttaaattataatctatttgtatttttttattagtatttttggaccttactgctctgacgttggattcaaatccggatcccgacccagacctgaacttgttgcgataattttgcacacgcaagtgtacgtatcgtttcaagtagtagactcactaggagtgaggtcgatcccacaaggagtgtagttaagtacgtt

SEQ ID NO: 111917 - DNA, 1991 bp, Cannabis sativa
aaaagtttttatcccactttttattttttcaaatgtaaaaagtgggataaaaagtctcttttgttgtagtgcaccaatggactcttattttctattaataccgcattcgtcatattatatcctctatgagctccttaaggtttctccccgagcccatcatccaaagccttgtgttgttggtgttgtttttagttcaaactcatcacatgccaaacttgagggcaattacaacaacattcaagctgtgttgcatgacgcttattatgggcgtcaaccgcttgctgatgtgacatagttatcaagtaagtctttctctccttagattttatgtcacattagggacagtgtgaattatttgtttggggaggggcttaattttgaattttgttatttatttgattgtttagttgtttaatttagttttttttagttatcgtgctttagtgtgttgttaattaagtcgagatcaattttgctgctgtttttatttgtggaatagattgaaattttaaactgtgtgctcaatttgttaaatctttggattattttagatgcttgtaaagactatgtattgatgaaaattggcaatgtgtgaaatatgttataactgtcttactttggtttgtggtaagattgactgaattgcttagaacttgaatgtcttattctcttgaggtgaaatccttgaaagtgtttactaggaatatgatttaggcaattttttgaatagtttgagcctttcaagcctacataaaatgaatatccgtagtgaacccttttgaacctaaacctattttatttcttcacctttttgaactaaaaatgtttccacaatgtattctatcttcattgtatttggaatgataccataagtttgggagaatgaagaatggtatgagtgaaagtgttgaagaaaagaagaaaaaaaactgtgtgattgagaaaggtttgaaacgaaaagtttaacctggcatcacttgtaaattttagaatagtaatttctctcaaaaaaaaaaagaagaaagaaagaaaagaaggaaaaaaaaaagaaaaaaaattaagtgagagatcaaaagctaaaagtgaaaaaaaaaataagtgatatccgaaaattgttaaaaagtcttgattattgttagttgtgcgaacacttcgagagaatttaattggtaaaaagttgcaggttcaagtgcactcatggtatttttagccaaaatgttcttcatctatcgagtattaatgccatgaatttctaacctaaaagtccttttgattccgcaaaacgttgtcaacattagtcgagagaggtaagcatgcaagcatattagccattggagtgaggaatggttagaatgagtaaaacggttgtgacattgtttcgatattgaagttaatttacatttgtacattatttttcaaagtaagcacatgaagtaattgttatagagtttttctgaaattgaaattctagtttatttaattatatgaagtttcagaggtggcagcagtagcttgatttttgaaggcttagttaattgtgtgttagtatgagattttgagtcttagtttttagtcttactcgagggcaagtaagaatctagtttgggggaatttgttaggctatatagattgatcaaatttcgaaaaacaacaatctatagaatagagaaaattttacaagaaaataaagctaaaattttaagcctaaatttgactatgttatgatcagattttggaaaaagttatataatggaatctttagatctttttttcatatttccaacgtatcttaaatcaactcatctagagtttgtacgtgaaagttatgcatattttactaaaagatgttgaagctgtcaattggcttcagtactgacgaccaccattttccatggtcgcaactatggattttgggcagaaagcttgtttttcaacactactacaaaaaccccctttagaggcagtttttaagccctttcagcgtcggtttt

SEQ ID NO: 111918 - DNA, 4316 bp, Cannabis sativa
  modified_base (4266)..(4268): a, c, t, g, unknown or other
ttgcctttagccttcttgtccttacacttggggctctttttgttcttcttggatttcagtgttcgtgcctatttgtctagctacaaagctgcttgaggtgtccaattaactcaagattcagttggtatggagaacatgcttccgctgatacttgtatatctccattgataggtagcttcaaactaaatgtggatgttgtgttttatgagcagtctagtattgttggaattggggctattgttagggagagccacggtcatgtattagcagccctagccaaatctagacaaggaaggtgtgcaccaaaggaaatgaaagttgttgcactttctactactttaagctggctgctccactagtggagaatagtgtcatttgatggaatagattcaacaactggtttcaaatgccattaattcaaaatcatcatccatatgaagtttttatgatttaattgatgatgtttcttatcttttatttccttttccttgagcaaatgtatctcatgttaaaagagattgtaaccaagcggctcaaagtattcctcgatatgctctttagctggatgatcaagattctatatggttggtggatattacttccccaatctttaccaatggattctctacataaataatagcagtaacttttttctaaaaaaataaaaaaaaatcaaccttgtactttataaatgagttaaatacaatatgattttcattaaaccatttacaaaataatcatgtttacgtttcaataacttatcaatattgttaggacctgcagacaccatctatctccacattggtatgatattgtctgctttgggcctaagtatttttgagcacctttccaaaaggcctcattctaatggagatagtgtccatccttatatacccaagattctttctatttctagtcaatgtggggctttgattgtaaacccaataatcttcccctcaaacaaaggaccaccttacgattgtaggtctaatcttaagcaaccactcaagaacatatttccaacttccttagaaaaattacaaattgagtccatcgattctaacactcaagatccccttgagtaagctagatgaatgccttcaccagctacattcgaactcccttcaaattagatctgaacctctgatggctctactagcaagcttcaactaactttgggatccagctctgatatcacttgttagaatcgtcagacaccatctatctctatattgatatgatattgtccgcttagggcctaagccacgaatttgtttttggatattttctcaaaaggcttctttctaatagagatagtgtccatctttatatacccaagatctttcttatttctagccaatgtgcgactttggttgtacaccaaacaaatatatttataaaactcttaataatacactcgtagtctatttatattgacgatttaaattatttaacatatttaagaggcaataccttaatgtgtatatggtacatattttttttcttgaataataatataaatgagcatattttaaatatgaggtttttgtactattttcaagttacgcaagtgaatctaaattttattttattttattttttaatcaaaattatttaatttagtgaatattttttgggtcctatcgtgttatatatcctattttattttaacataacaatatataggcttcaatttacaaaaaaaaatatataactagtttgatcgacacatatgtaatatataataatataaagagagatttgtaatattatgtacttattactttattatattatgtagactgaacattaaaattaaaaaaagttacatattatcacatcatcgataatattataacaaaacctacatatatatatatatgtatacaatgacttatgtccatatacatatagttttatttattagctatatattattattattattattgtgatatatacttaaagacgacacatccccattcccccaccacctaattgttgtgagtaggcgcatccttctccttcttctgaagcttagtctcgttgaagagctgcatgatagagaccaacatgtcacgagtcaagggcttaacaacgcagtgatcaagaccagccttaaggaatgcttgtatctgttcatgatcactcgcagtcactcccacaatcatgctctccactcccattgctcgcaattcctccgttgcctgcattataaacaatggcaaactcaaaattttagttaatccataaataaataataataaaattatatccaagaaggtaatagtatataaataaattaaaaaataaatgaaataagaaaatgatttaatataaataatttagaagagaaatgatagaaggtagagttgccctaaaatcggtttgttcaaaataatatgaattagttcacttattatcatcaattagttttgagataaaatcatgtgattcttaaaattaaataattacctttgcaccgtccatgatgggcatttccctgtccatgagaataagatcaaaagaagctccagaacgatgtagatcaacagccatctttccattaacagcttcatgagtttccatacctaaacccctagccaaggagttgtgaaccattcgagcaaatttttgatcttccacgattaggacggttgttggcttcttctcatcatcatcagcaacaacagttgatgatgataacttattctctacggcaatagcagtagctgtcagatcaacgagatcatcaacattagtattgctctccaccaacacattactcactgttatttcctttccttctaggtggtcatgggttgcaccaacaacttcattacctagcaccatttctttctccttcaaattttttctgtaagcaaaaacatataaatatatatattatgtattgaaaaatgtaaaacatataaatattatgtattatataaaaaatataagtgtaaaattaataccttcacaagaggttgtattagatttagctaggatagaatattagctttgtggtgttgtgtgtttgattatatagtagtgtaaagggtcaagttcatatatacaagtcaaccatttaagtctagatattgtttgtgcgtttattgaaacttatgagattatacatatctcactttatttgagaaagtgcatgaaaccatgaaaatttgtaatctaagaaatttgtttttttctacatgtaagatacacaaatgtattgagagaagaaaaaaatctgaaaaaaaaaaatcttacttttataaaagtgtaacaatttttgtcatcacatttcagataatgaataaaatctgtagaaatttatgcctaataatgaacgttataatatatagtaatacgttagatttagaataaaatccatctaaaaaagtcgttatattttgcaatgacatttgtagaaactataacatagcataagtgacttatatatttaaacgtagtttactcacctttagtaaaaatatcgtacatagtataaaatttataaatgtttcatctatatatgaacttgtgattgatgttgtgacattctttaatcatatcaactatcaatatgtgacttcaaatattgacatcaaaatctagtttaaatctaaatacatagccaattttgagaattttttccttagtatatgataaatgtgtctatgatttttacaataggatgaaagttttataatttatttatttatttattttcaaatcaactttgttaattgctaagttcgataattattcaaaaaaataaaataaataaataaagttcgataataagaagagttataggaaattttgaattaatttatttatatgccaaaataattaattatcaaacaaaaagggaaaataatcctttttttttaaaattttttttacatttagaataaagtatatttgcactaaaattgtcacacttttaaaacaattacatagttaatatatatatatatatatatatatttaaaaaaatcaacttggtcatataattccaatcatttttggaacaatcttagtcaaatttgtagaaaaaaaaatctataaaaataaaagtctaataaaaaataatgatttttcttttaaatgttgcttaatcaactagttttctttcatatatacatgccacaatttttttagaagaaaaattggcaacaaaagtatccaaactttcacttattagcatatatagatacctatatatatatggaggaagttttaatgattacatttttattgtannnatcatggttatattttttttaagccattagattactattaaatggttg

SEQ ID NO: 111919 - DNA, 2867 bp, Cannabis sativa
  modified_base (41)..(46): a, c, t, g, unknown or other
  modified_base (2828)..(2841): a, c, t, g, unknown or other
tatttaggatgttaattcaacataattgttagtaaatctannnnnnggtaaaatattcccaacaattaggtttataacggagctgaaaatttgacattcgagattgatatgaacgtaagctactcacgcttggttgattttttgtacgaataacttgatgttgacaaagtgtagtatgacttgaaattaaaagtaaattacaagtacatgaaaggcttaatgtatcgccctgaagttattgaaaatgataagcgtgtaaggttatttttatcaatgcttataaaaagctagatgaatttactctcttatttgtgactttggcgaagaagaatgtctgtatcaatcctagttctacaccaagtactatcacgaatagtcatagcgagattgggagttttgttccaaaaatgaatccagaggtgttggcgcccgatgtgttactaaaattaaacactatgatgctgacagttgacattgtagcacagattctctatgatgattgttttagtgatagtccagaccctgaatagtatgttgaaggtaatgataacgtaatagacaaccaagatacagaggtccctactgttgtagctttgaacttgactccaatatcgtaccaaataccacctaggaaaccgacatagaaaagaataccccgtatagaaaataaccaaacacctggtaatagtagtagttgtccacatgacgctagatgaatcactgatggtggaggtcctagtgtacgagaagaaccagtcaagctagagggaccactgatagtagaggtcctagtgatgctagagggaccaatgatattggatttagcgatctattttcttctttgagaagttacggtaaattcaaggagaaaatatttacaagagaagacatcaaagatcatagtcattatatatttattggtggcacaccaggtggagagttacatctaggaaagtcttttagagacagagcatttaaagatggttgttggtttgtatccaatgaaaaaatggtttgactatttcgttaggaagtctggtactgctgtttggtacgttacatgtaaggtttttgtaaaattgagcaatttggcaacaatcggaccatatatcaaactatatcgaacactatcaggccagtcaaaatatagagcataagaccatataactggccctacatcgagcccttatcgggccaactatccatcacatttttttttgcaaaaatgagcaaataggcctattgagaaccatcggatgtgtatcgaacctatatcgggataaatagaaaatttagaataattataaataaaaaaatccacaattttccaatatatatcatagttaaatattaaattttttgttgtcccactaccataattagtaagattttaagaaaaatgcataatttattataagcttgtagaataaatctatcgaccatcttgtctaaacaacaccatgttgtcactgtattagtagataaacaataatttagtgttattataatcatatttatcaatgtattatattacttagtaaatgtattacctcgtttgtatgtggtacttccttctatccttgtgatcctaagtgaatcatctgacttgactttcagaggttgtcatctgaggtatcacgaccatgtagcgggtgttaaatataccagactgatcgatcaatgatgtgaatatgttacagtaatcgtccatcaacttcttcaatgcatccttaatgattgaaccaatattggaatctaggacaaataacttccacaagtccgaattcatctccacggccacccaatgtttttgagcatgcaaggatagggccatatatatgaattccttcttctcctaagaaggcaaaaattggacttcatcaccacgaatcaaatccaaaatagagtcatcccaaacaaagtctcactggtctgaatctcccttccaagcatcccattaacccttgactgatgtgaaaaatgaagtgcgcatgatggtgcactgacatttgtacacatcttggtaaaactattgctgccttctcattatgtgaaaatgcatcatctagatgctacacaatttaacaactaagccataaacgagcacattaaaagaaaaaagaaaaacaacaataaaatagtgcatagtgttagaaacttacatcattagaaagccactccctgttgtcgagctacctctagaactatttcgagtcgtgttgaccagagaagcactttctgagatacttgctcccaatgatgcctacacacaagtttcagagactgaacaataacttatgatcaactagtcgaagcgagtcaacattcaaatttgcccttgatggcctcgacttcttctttattttagtgtactattcaaaccccttaggcctttcttcgatctcttctccactgatgttggagctgtgtttaaaacttggcactcagagtcttgagtgtcaccaatggacgtgatctgatgttcttaggtgtatagagaacatcagattcatcatcaggcttgtaatcattaaggagaatgaaatcatctccaagagccttgtggtgtggctttggctctgaatttggcattctctgatcttccattagttccattagggtgtttaggtaacccataatctctgttttcccttttaaaagagcagtgtggccttgcctcaaagtaatttgctccctctctacagtctccaaccttgccaaaatggtagagtatactagttcctgagcctctgaggtgcagggaatagatgctgacgagggcacggctgctgaagtgggagcaaaacatgttggaaatattttaccannnnnnnnnnnnnntaccatgtatgtttcattaacatcct

SEQ ID NO: 111920 - DNA, 2696 bp, Cannabis sativa
tacagttatgagctaggatatggctctgtcactcgtcgtttctccttcaaaactcctcctccactaggccctgacgttccatacacatttggggttattggttagaatctatgaaaagatattaacattcaatatttgaagaataatatgtgtacacacttagatgtgacaacatatggtattgaattttgagtgatgatgttgttttcttttttttgtgtacttaggtgatttgggacaaacatatgactccaaccaaacattggaacactatgtgtcaaaccccaaaggacaaacaatgttgttcgttggagatctttcgtacgcagaccattatgagtttcatgacaacaggaggtgggatacatgggctcgattcgtcgaaaagagtactgcttatcagccatggatttggacagcaggaaaccatgaactcgatttggcatctgagattgtaagcataaaatgccaaactcatcatactctctttggctcaattattggttttaataaggttgtgttgttgtttttagggagaaaatgtgccttttaagccatacatgcataggtatcatgtacctcataaggctgcagagagtacttccccactttggtattcaattaagcgtgcatcggcacacataattgtcctctcttcttactctgcctatggtatgcatatcaactctcaaaactaccattttattacttttttcataagagattggttggtaattttgtgttgtgttttttgttaaggcaaatatactctacaatacaattggcttgagaaagagtttcaaaaggttgacagatcagtgactccatggcttattgttttggttcattctccttggtacaacagcaacacttatcattacatggaaggagaaagcatgagagttatgtttgaaccttggtttgttcaaaacaaagtcgatattgtctttgctggtcatgttcactcctatgagcgttctgtaacttactcaactcaactcaattcaactctctctttttcacttatcatttttgttagtaattttaccaatttctaatgaaacatatgttacattttaggagagaatatcaaacattcagtacaacatagttaatggacttagtaccccagttaaggatccttctgcaccaatttacataactattggcgacggtgggaatattgaaggcgctgcaagcaagtaagatttttgcaaacatttgaaatctttttttggcttgtataggcgcagattggataaggtcacatgcctgcaagacatataactctaatactatgttgagaatcttttcccatttatttcatgtggggcactatccgacaatatgagaaattaagtctattttattatgactaacatacatcatttgttgtgtgcagttttactgagccacaaccaagttactcagcatacagagaagcaagctttgggcatgccattcttgacataaaaaatagaacacatgcttactatacatggcatcgaaaccaagatagtgaggcagttgctgctgattctctatggatatataacagacactattttccagtggaggagaacacaacttctactatggtttaggtttattgtttaggtcttgtctttctttttaagataactattctttagattttaagataatcttagatggtcatattaagtagtactatttttctttatcctatttttttatttaattcttattataattattaatttgtaccctcagaaagtattaaatgtcatcaaaattcattggctcaacccgtgttaattaatattgcaacatcaagatcatcattattattgattggtctcttttcttaaatttcatccgcatcttaaacaagctcaactataaagcaaccaaattaggcccaacttagtgagtaacgttagtgtataagagcatcaacattctttaagaatgtaaacactttatacattatttatacattatttaaaaatataatataatatgaaactatgcaaagacaatggagattggatttgggcaaatttcaagtatgaacacatcccaatcttttgttttgtatgtggtttaattggccacgcagaacgactttgtccctgaaggtttgatgaagatttcgatccattagtcaagccttatggaaacggtatgcgtgctcaaacaaggagaaagaactacttgataggagctcaatggcttcagaccggttctgaacagcaagaaatggtcgacggcaatggtgatgaacggcaatctggtgtgaacatggctgatccgactggggcaaaaatcatggagattgattctatcaatcagggaggagagattacgaccatgattgcaggaaaaaataagggtgttattgttggtagtaatggccataaagaagacgattctgaaggagaaaaaggtggcaagaatgatgggaatgtggctgattgtgatgatgagctgttaattttattagacatcaaaaggagacgtagggacatggtacaaggctcacgtgactcagagatagttgagagtaagttgggccaagataatgtgggcagaagtggatcaaaaaacgatttgaaggtgggccttgcctctcaggcccaccagacatcatgagtattctttcttggaattgccatgggcttgggaacccatggacccaacaattcataaaagat

SEQ ID NO: 111921 - DNA, 5104 bp, Cannabis sativa
acggtgccgtttagtctaagggtttacttagactaggaaaggtcatttttgaccttgatactgatattgttatctttgttggtgtagggttaaaacagtaaaatcctacatggtcaaaagagggtacatattgaatatttgctttcttttgcaagattctatcaaaatgaatgtccagctcgcattggtgttgtcacaccaaattactggcattgaagttggagtgaactgcatttcttgcaacagagactcgagccatataatttcaacaaaaacttgggcaagagtttgatattctgagtcggtgcttgaccgagacacaaatatttgtttcttggactatcatgaataagtgtttcaccaaagtagacacagtaaccacatattgattttcaatcatctacatgcccagttagtatatatttgaatatccaacaagactaatcagattgtcactttgtttaatgtgtagaccatgatgaagagtacttttcaagtatctcaaaacacgcttagcagcattttagtagattgtagaggggcatttgaggaattgatttagcttgctgactgcaaaggctatgtcaggtcttgtatgtgtgaggtgatgcattgcccctataatgctttgataggttattggttcgtccaagacttgaccatccgttggagataatggcttttcagcaattatagatgtcagacaaggcttcaaattcaacatattcatcttttcgagcaactctgtaatatattttccttgcctaagatacattccaatagtgtctatttataccttaattccgaaaaagtaaccgagatctccaaattctttgagagagaatatcttgttcaatttttctatgaacttctcaagttcaaccaagttgctcctcatgactataatatcatctacatagatgagagctatgacaacaaattatggagtcttcaacatgaaaaatggagtatcagcttttgaattctcaaattccaacttatcaagttactcttgagttgctcaaatcaggctcttagagcttgttttagtctataaagtgatttctctagcttttctctttgtccaaaaaatcctatggttgtaccatatacactgttaatgtcaagttgtctcactattaaccctttagaagctgctataaataacacaactctaattgttgaaagtttgatgaacaagattaaatgtctccccaaaatttagacatagtctttgatgaaatcctttagatataagccttgctttaaacctctgaaaagacccatcaacattgtctttttctttaaataaccacttgttttcaactacattgtagtttagtaaaggtttgataagaattcatgttttgtttcttatgagatgatagaattcctcactcattgcttttttctagccactgtgttgaagtgcttcaaagacagatgtgggttctccaccactgggattccactgagcttgaccattataaacctttggcttgaaaactctagctttagacatgattacctgaggatgcccaacttgagtagttgttctgtgttttgagttgctaaagcaactcgtgatgatgtagataaatcttgtgactattgtctcatatcattggtatcatagtcagtgaaatcaagattaacaaagacactagttgagagatcaacctaacttttgtatgtagcagtgatgctttaggttcacttgttgtgtgatttgtatcaaattgagagtgagtttctaattgaatagagttttgactctgagtggcagtatttgtaatgactggtgactcattttttggttggaattaaaacaggtagatatgtccgggaatgtagagtttgaattttaacagttgactctttttggtaagtgttgaagaaatcaattttgtagggaaattctttctcattaaacactacatcccttaaaatatataagctccatattgagcttagacacttataatctatgtgagactcattatacccaaggttaacacactttttggagtggaattgaaacttatgattttgatatggcctaattagacatggaaatcaaactatccgaaagaccttgagaaacttgtaatctggctttttagagttgacaatttcaaagggtattttaccatttaaaacaggtgttggtagtctactaatgagataatgactacttgtggaacatgaagcatatcttttaacagtaaatgactacatgtatttttatgaagtaccataactagtatgagagatgatgagttgattactattaccaacatttagtttttctttacctccataattggctctatgagtcatattataagcatatgaagttatatgtgattactagcactattgtatgcataccaaccatcattatccataacatttggagtagcaatgaaggcatgtttcttctcttttttatgttctgcaccatgtgtaattcccataaaaattttatcatacctattgtaacaataggcaactgaatgtacatacctcccacatacttgacaagtgagttttgagtttctccctcctttatcatatccacgacctgatccacctctggaatttgaaccagggccatgattttctctttcatagcctcgacctgagttgttgctattgttggggttctatttgttaacaaaatgagcaaatggtccaagtagagatgaaaattaactagaaggattaatacctttactgtttccatttgttgtgaccacttggaatcttccaagtttgctatcaaagttgagaagaacttcctcaagctcctaccagctcattgattccctggcttcaagaatacatgttataggcagacattccaaatctagacctcgcagaaaattagaaaccaagttatgtttcgttggttttacagtactaaaatagatatacaacagaataattgttattgattatcattgtaccatatgcccaagatcaccatatgtagcatttggctacaagcctaactttaaaggtttctaccttcccttcattatttctcttctttttgaaaatccacatacaccttatgatccatggcatttctacttgtttaagtcagggtcttccattgctttcttataaatcaatggattatcattgtttgtgtcagagacaacaatatgtgtttcatgttcatagctgacatactgactcacaactcttccaggggtttcctttttagaatagtggtgaccattgttggtccttcaactgatggtactgaagttgatggttcaaacatttgctcattttttattttcttgataaccacttgactgcgcgcaattattgacctttcatataggcatgttcaaggaaagtagcatttagtgaccgatgtagcatttcttccagcaagtagtctttgaattcagaatctaaatactcgccgccacgatctgaacgaagtgtcttcaatgatttacctaatttcttttcagccatgtctttgaagtctttaaacaatctgaaagttttagacttcttggccattaggtaagtatgaccgtatctagaataatcatcaataaaagtgacgaagtattcataaccttctcgaacttgaatattgattggtctacacacatcagtgtattagctcaagttgttctttggctctattgcctttcacagaaaaatatatttttgtcatcttgccttctagacaaggttcgcttaccgaaagagttctaacttttagttctctcaaaagactatcatttgttaaccggttaattctgtttaggccaatatggcctaataaacgtagatgccacatatactctaaataattcagtatttaaaattaattgctcacttggtctgagcacataaagtccatttctttattttacgtaataaattggtgttctaaattttttttaaaaaaaactcattattaaaaaattcaatgttaaaagattgttcatgcaaaagtgataaagaaataatgttcctggtacaatcaaaaatgaaataaatatttttcaacaataaaaatttatttttaaagttcaccggacttggtcaacacatttagccgatatttgtgctccattcccaaaccgcatggtcacctctctatcagcgagttctcttgatgattcacgcatacgcatataagaataaatatgattagtgattctagaatcaataatctacaaagatttattattatcttccactaagttaacttcaagaataaataaattatatttatctttcttaagcttggagatatacttgttatagtttctcttccagtgtcccattaagccataatagaaacacttgccttttgccttttgccttcttgaccttgggacttagggctgaccttgttcttcttggctttaggtgtcttcttgcctttcggcttgggcttgccactgttgttgtccaccatcccatttcctttttttcatcctaataagaaactggactttgcttcaacattatttgactcacatttcttggacttatccttgttaagattctcaaacacattcaactcattcaataattgagtcatgttgagttgtagcttgttcatcacacagtttgtgataaaacttagaagcaatgagtgagcgactgaagaataatgcttacttaagtcctcttgctacgataatctgccaatgatgtgctccttttaaaaacaatttgaagattgtctctgagttcatctattctagtttttgaatgagctctaaacaacctctccaaggcaagccataagcctctagctgaactgcattccatcgcctctgttgctattaattttgtcattagatatatagagccaacccataattagttggtaaaaaataatccattgctcatactctggattcacactaactcaaagacttggtagtagggttgtatattggtcagtttgggcggtttattctttatattttctaacccaatctaaagtttgggttgctaaaatataagtgtaaatcgaccaacggtttggacgatttggtcgggttaacccgcccaaaccggccaaattttttttttttttggtttcaaagtcaataaa

SEQ ID NO: 111922 - DNA, 4346 bp, Cannabis sativa
gcaacttataatataatgatcgattgctgtagtaccttaagaagcttcagatccgcttgtgctcttgtttccatgatgattcgtgatgggttttatccacaggcaatgactttcactactctaatgaaggtagctttgatattctgctaacatagtctgatttttccttctttttatatatcagcttggaaaatattgtgctcctatgtgcgcgttacaaatgtttactcatgaaaagttctaatattaatttgactgagttaccttcctgtattcttggctataaacttttcagtgtgatgtagtgattcttgtagatgcctcagctgattcatatttcttctgataatagtaattgttcttcataattatttgtactaacttacccttgttatcagctgtttctaactaattgtgcttttatggaaattttgatgtctatacactgcttttcccttaccatatatagcacaggccaccttaaagtaatatgcttgaattgttaagcaatatcaacgttactgattatcctgtgtggttctacttttttccagattctactggagaatgataattatggtggagctttaaatcttttggaacaagccatcacagaaggagttgaacttgatgttttgttgtttaatactattcttaagaaagcatgcgaacaggtactgaatttctattattattacttttactctataaactatagagggttataaggagttcttaacctgaaaattaacaagcaagaacaaattcagtgtgaaattgtttatttaaaaactattacatagagattgcataccatgaatattaatattgagttcaaaagcaaatatgataatcatgaaactttgaaattgttgtcaaattggtaggggaaatacattttgtgatgtaactttttgacatgattaaaccaacttttcactgttagaactaatataattattacatgtcttgatatttgtattctaactcaacttattggggagttcatagctaagtattatgtattgatactgctattctttctatggaaaacaggggatgattgacgtgattgagttcgttgttgagcaaatgcaccaagaaaatatccagcccgactcatcaacttgtaactacgtgttctctgcataccatgaccgcggtttttacaacacagccatggaagcattgcaggtattgagcatgcgtgtgttaggagaagaattcggcgatcttccaaaagagatggaggttgaatacaattttatcctagctgaagaggctgaagccgagtcaagaatattgcagctgtttgaaaatttccaggaggaccgtgctgttgcccttctgaatttgagatggtgtgccatgcttggtttttcaatttcatggtcacctaatgagagttcatgggcaaaaagactctcaactaactataatacccgaaaaggactcagatgacagctagcacaaaattgataatattcctctcaatttgtttttttgttgaagagcagtgctgagttaaaattaactgggtctgcttggtaagccatagcctttggccagagttagttacgttgtggtccggatgacatggctaactaccatacttacttggctggcaaacttaacccagagtccaaggtggctacctcattcattctggtattctttaattgtttttttcacttaaaagtgctctaacataagataggaaagttcttgggactgtatactttcatcaagtccctgttagaactcttagattttccaaataacatgtatcattttggttgcattttcaactagtgaagagcaaagtagtaaatgaaattaaattgatggcaaatttattatttatttttttttctacaatagtctgcaatctgttgcccccactttgacctttacctttttttgtctatcgaaaacgttattatacccagcgcatgcgtggccaattaggacaactttcctagtaaaacgacaacgttgttaatagctcttccttttgtaaacgacaattgtctaaaaaatgacaagtagacaacattcttgtcgttgaaatgaaaactacaatgtttatgggacgacaactttcttgaagaacgacatgttttttttagctaaaacgcaggaagacataggcccaaagctgaatagaaagtatagcaagtgttgtgtgtacaaccaaaactccagaagtatattattagttattttctttcaattagaaaccacaaataagttatattacgagtaacatgaattcaaattagctttttaaataatacaaaggtaattaatagttgcaaattgtaataattataataaaacatctcgatgattagtaatatattgaactaataagatgatgcaaaaataaatatagtggctacctagtctagtaatccttctgcgaatggaatatcagtgtcaggcaaccaagtttcccccatggtaaaattatagagagtgaaattcaaagcttgagtagtgttcattagaacaaagcccggccacttaaccctcataccagtatcagaacctggaccataattctcaaactctccataaaaaagggtatccaatcccaatgtaccattccactccaaccacccaaccaaagtcacaaaactcccaatatatgattgcatgtaaacagtcctagagtattgcttccatggcctaccaaggtaacttagagtagtcgtactagtagtatttgattcttcatcatcaacatcaactgcgagatcaggtgctgcttctatggtgcaattgtggatagagattccagtattttggttggggtctgtccgaccctgagccgtgatgacatttttttggtgcaacatgggtttacgagctagaattttgcagttttggaaaacagcagcagcattaccaaagataaaatctactgtgccctggatttggcaatctcggtagaattgccttagggaatggacatagagagtgtcttggtagccctcgatgctgcacctgctacgaataaaatatatataaattcaaaaacatatatttatatatttgtatagagatttagaaaaagtggccctatataggtggacctgtaaaatatggagaggtcggcttggttccgaactgccacggcttgatgtttctctgggcccgctgtattcctgaatgttatgtctatggccatgaaatggtctccggcaacagctacaacaatccattatatttacaaattgaaatatcttacttaattataacaaatgtttaatgatcttaatcatataatattcctaattaattatataatagggaaatttgtaagtagtcaaatgtaaattttaaataatttaatgttatctacaaattagaatttaggtagcatacatatcaacttttttattatgtgttaattttaatactataatttatatatatttgaaatttaggcttgatactccacaaattattcacacatagtaaaagacacatttttttgtatgataaatttaatcatactaaacataattttttatcacattactaaattaaaactctacttattcatacttaaaatttatatgaatttacttcttatagtggaccccagacttttttgtacgtacttaccgaatgttgaactattgtaagtactccaaccgtcaatgacgctgtggttcccagaaacaatagtggaattgatcccatctccaagcaacattatattcttcttacatcttggaataacaatatattcttcatagtatccttccatggcatatattatgaaatacccatcttctgctttcaaattcttgggtgctattgctatggcctctcctatgcttctgaaatcttttgtcccatctttcctcacaattacactcccgtttaccataattccattcccttccatttccaaaacaatcctttctgctaattcatccctcgaccgcttatgtaaactctaattaaacaacaaaaaaaaaaaatagtgaaaagttaattaatctcaatcaataattaataagaaatttatgtttactattattggacatcatctcgatcaattgtccagcatctatacaaacctataaatatactacaaacttataaaaaaatgtttatgttagccgaaaaaccatttttctttttactatataaatgttcaaaactagctacccagcctattaaatgatgttattataaagaatgtttattgttgagtaaactggtttggaaaataaaagaggaacgatattaccgaatgaagaattctgggttgagtcgcggactaagtcgctctctttaagacgttcgcggcactgcccaggagtgtgcaa

SEQ ID NO: 111923 - DNA, 3727 bp, Cannabis sativa
attttttaatatttaattaatgattataaatatcaaccattagatatttgatccaatggtcaagaataaaatacccatacatgggtaatacccattaagagcatacccaacccgtactacattatgctcctgaactttcatatatgttagactttcttactaaaattagaaaaaaaaaaaattctttttttaatgaccttaaaagttatggaacataattttgtacaagaggacaaaaattttggttaaccaaaattttaacataaaaaaaaaaaaaaaattaattcaaagagcaaatatcctaatagtatgctcaagaatacttccaaaatgtactatgtaatttcatatcattttttgaacattaagaacacaacattgcaaaaataagtgtatactttgattttatattgagtctaacttaacaaaatgtagctaattagaatttttgtttaattttaagatatacaaaattatacttaaactattaaaattgttggattaaaaaatcttagatgaataaaagttcagaaaaaagaacatactttaatataacaaaattagtaaaaataaataaaattaatcaaaaatctttaaacccaataattttaataattaaggaagaattaatttagtacaagccaatatataaatataatctactaaatatgcactgaaaattcgaatccattatcaaatatgttttgggtgttacttttctcttttctttttttttttttattatctacatgattcaatatccaccgtccaagtgttgacccattatacaagggattcttaaatcacaattacaaaaaaaaaaaattaaataattatttaaaaaaaagattaaaaatatctaattaattatttaattaattaaaaggttcaattaattatcgtcatagtcaccatcgccggacctatgatgattcaccttcgctataccacgcactacactcggcgcgtgaggcgcgtcaaccacagcagctgacgacatctccatttgacaaaccctaactgcaccgactaatctctccggcaactcttcctccgtctgcgcctcgatcagaaaccccatatcgatcgcaacgctcgtaacgtaaccaagcgcgaggtgaagaatcgcactggctatggcggagcttccgatatcaacatcgatctcaagatagttcgttcctctatggtaattacagttcaatgccttacctaacaaacaagcactgtaattccccaccgttttcttgacgatccacggtcctttaacgatccgattcacgatcttgaaccgttgatttctaaacgcatcgtcaccgttaacgaatcggtaaagaagcgaaccaggagagataggatcgtctgtggcgaagtaaaacacagcgctatgctgatctttaccaggaacttgaagattcacagcgaatataaagctcttaagagattttccctgaccttgagatctccttaacgagttcgccacgcgattatcggaacgagcgagaacgttatcgagtttagtactggatttgagccagtccataccgatcggagtgagtaagtaatctccagcaggagatttttgtcgtttagtgagataattcttggctctgagtgagaagagattacctggtggtgaagcccagccgttaattccagtgattaggtcaaccttgtgtagagatccgccattgatcgattccgtcatccaatcggtttctccggtcgtggattcatcggatctggagcttcggccggctccggcggcggagctacggtgtttttgcttagttgttggacacattatttagagagagaaagtagagagagagagagagaaattgagagtggtgagagtgaaagggaaaattgggtcttttaagcgaaaaaattagagagattggagcttcgatgaaattacgataatgcccttggttattcctccagcttttttattaagaggaccagctagccttactttctttattctttattttgttatgatttatgggacttctttttgggaaattctaagtaaaacccacacaatatttaaaaaagtaagtttaaaatatttttaaaatttttttaaagaaaattttaatattaatttcaatatttaatatctaatttattttaataattttttaaaaaatgtataatttttttttttttaataaaaattcacataattttttgttgtaatattttaaacataatttatatttgtttgataaatatatttttaagaaaatgaattggaagaaaaaattaaaataaactaatataaataaatatatatttatataaaataaaaattattaaaatatagtccatttataaatttttggatgcaaataaaactctcattctttttttaattaaaaaagtggataagtattattttgaacactatattttgaaaaatatacatattggatttgtttttatttcgttaaatgataaattgaacctatattttttaaaataaaacaaaatattaaagatatatttgtgacgaaactttcttaacatttacaattgttacacatatgattctagttaaaactgtgataacaaaagtaccttatcttataatttttaagtgttgacttagaaacacgtaatatattattagaccatatattaaataattactatttatttttgattttttttgttaaaataaaacttagtaataagttatatgtaaaggtgttatgatatgactagttagattttttatatctatttatgttaggaattatctttaaattaattatattaaataaaaaatattatcaaaaattaaatttaaagtactattttataatattttaaaaaatatatgagatttaatttcttaattaataaggtagaaaatttgattaataatttttgtaaaatagaaaattaaaaatgatattaattaaaatatatctttttaattatttgattggtggatggataattatttaagttactcttgcacatttaaaacgacctaaataaataaattttgattcaaccaagtaataaacaaacaaaaagattatgattccaagatgataaattttaaaatattattaactaatttcagtcttggagtccaataataaaatctgtatgtaaaaaaaaaatattgttttgagtgtcagattattatatctcaaaataaaatatgactgttttgataattagtaataataaaaaaatacaaaattattagtaataacttataagtcacactccacacaaatatatacatacttttattttatttttaataaagaatatgtgatattaattgaatttattttttttttgtttttgtgtaagttaagagttggataaaggtgtatgtatgtgatcaaaacagcttttattggcaagccagcaaggaacctttaaactaatatataataataataatatttaataaattatatagttttttttcctcttgctagggaataaagtgctgtgcaaattattattgttagagaattataaaaggtactaacagtctttagtattttattatgtaaacacatttaatatttttagatttatttaaattcgatgtaattatattatggatattaaatttgactatctcatttaatttaaattatttttttttttttttgaatagaagtgttctttattaactcgagcaatcgctcgttaaaatagacatgaagtccataggaacactgttaatagg

SEQ ID NO: 111924 - DNA, 3153 bp, Cannabis sativa
  modified_base (3100)..(3100): a, c, t, g, unknown or other
taatattatcacagtttttaataattaattattctattagcattaaactagtttataaaatcacacacgtggcgtccctatagattagggcgttacagttatggacgaagatggtggtctaggggttatggacgacggcaagcagtttctggatctaatttatttttaactttttagtttttttttttgtggttccaaagtgtgttcatacccatttccattccatcatttgtatttgttaatgtttgaatcatagaattctatatttcaattcaaaatatgttgttaatttataattttttctgcatttgtgtaatttttttctgtatttttttataggtttttttttctatatttgaataatttaagtaaagattttgtgtaaatttatggaattttgttttctattttaattttttgggtaaattataaattataattataattatgtaactgtatttattttttatttctattttaattatatttttatgaaatgatctgatttaggtaacaaattattaatttttatgtatctattttttaaattgtatcattaattaaattattattatgaatctgtaatatataaattgaattaaaaaataatattattttttttataaataaaaaagcatacatatagtgacactttttgggaggagctgttacttttatagtctgacaatgtttgactttaaaatcctatagtgacgcgcgaggagtgaaactaaaagggtttagtgacccatctaatatgtcactaaatactacttttctagtcacccacattagtgacacgcggtgaagagtcactaaattgttttagagtcactcaataagagtcactagaaccagtttttgtagtagtgaatgtttaaaatacttttttaataaaaaaatataaattaaatcatttccttcatttaaagagtgaaatttgaatagtaacttgggacttaatggccacataatgcaactaaagtgtaacaaaaatgtatttttaccgttaaatttgtttaggtattaatctatgtccatgaaataaacttaaggaatatggctataaattactctttcatatacttttctgtttagaaaaatgcaaattatattgaatcaagagttgataatacaacaagcatttagaggtggaggaaccacctccatccaagtacaaatagagtacaccgatagagcatactttgctagtaagtgagcaacagtattagtagatctatacacatgagaaatctgcgctccaggaaagttggacactaagagagaaatattagctaacagacaatcaaattcagagttggaagcatgagaggattgtaatcctttaaccactaaaagagaatcaatatcaataaagtgagtagttaaacaaatatctttaagccattgcaagccatacataagagccattgcttccatgacttccagtttaaaggtacctgggaatggcatcaacatagtagcaataatattaccactcctgtcacaaagaaccgcaccaaaaccaaaagagttattcctgctgttaactgcaacatccgtgttcaattttagcctacccaatggttgattcatccaaggtggatctttgttgacaacatgaactgaggaagaggaactagttgtgttctggtttatgagttgcctacttgattggaactcttcaagataagcaaacacgaagtagagaagaacatcatgtggacttggtgttttatgatgcttttctttattcctctcactccaaatgctccattgtattgttgcatgttgctcaagctcaatctcaagagccatatgccaagttatgtgattactgagatcaaaattagaagctttccgaagacatttgggatgattgcagaaaaatagtgtgtgtggaaccatttctttctcacggtggcataaataacaaataggggaatccgcaatgtgtcttgtatgtagaatagctgctactggcaagcagtcatgaattgccttcaaaagaaaaattctgatttagatgggatattcagcgcacaaaacttcttccaccattgttaattttgcaatccactaaccgatggttgttgttcctctaaatgggtagctaagtggtagccagttttaacagagtatatgccatgggattagtaatgccagatctgttggtcacgggttggagttaatgtcaaagggatgttttgaattttttgaacgtctgagtcgagacaatagactctgcagcaaggcaaggttccattgacgttcatccaaaatcaaactagagaccctcatattattatcattacccttgtacattaatggcttaaaatgtgagaagcctagaagccacgaatctgatccacataaaatgctatgaccatcaaaaacttgccatcttaaccccttagtgaggagctcattcccccaaacaattccttgccacgttagagacggataggagctaggaccagcatcgaagaaggaactattcttgaaatatctttgcttgagtattcaactcattaagaaagtaggattagagaaaatatgccaagcttgcttggctaataaagcctgattaaagtgtataaaactcttgaaacccaaacctccttcgactttagaatggcatagagcagaccaagttttccatttaatacctaagcccgaagagttagaaccccacaaaaacttgttcatcataacttcaatctgatttataagagacttagagcgacgaaaaaaactcatcgcataagtagggatagattgggcgatagctttaagaagaacttccttgccactgactgagaacaattgctcttgccaagctgaaaggtgattccaaagtttttcttttatttccccaaagaaattctttttgtccctgactgagtaataaggaagaccaaggaagcgtttatggcacggctgaattggcataagcaatatttgttgcagattagcttgaatggaaaggagagtatttggtgtgtaaagaccgcttagctttaatttggaaattaacagataattagggtttaaattataaaacttgattattaattttgaattattaatttatgatganttatttgaattcagaatgcatcttatatgtcatatatagaaatttcataattt

SEQ ID NO: 111925 - DNA, 4284 bp, Cannabis sativa
  modified_base (366)..(368): a, c, t, g, unknown or other
tcatgatttagaattggccgcagttgtttttgcactgaaaattttgtttttttttaatgatacggcgaccaccgagatctacactctttccctacacgacgcttttttttaaaaaaaagattataaattttatgtaaataaaagagaaaataaaaaaaaaataaaattttaagataatgtgtgtattttgataagagaaatgctaaaagatatcttagtaccattttatgtgtcgatatcgctattagtctaattaaatatcttgtctcacatattttaatatagagcattgctattaggcacccatagtttttaacacccttaagacgtgtcgccttacgatttgctagcgatactccctaaaannnattatattaaactatatgggatccgatactaaattatatcaatagtgatattgacacgtaggagggtgttttgcactactggtaccttttagtatttatctttaatataataatttttaaaaaatatcgctacatgtttaaaaatattaggcaccactaataatttttttttgataagtataggtgtaatatttgtatccaatagcagcatagtcaagattcaagaagggtagccaatgaaaaaataaaaaagcaggccaccatttaaattaaaaacacgtacgacacatttgtcgccactaactcagtatgtgttccaaacttcgtacacatctcccaataagataccccgctcactatactctcttcactttatttatttgtaaagtttttttttttttttttcaagaattcataaagagttgttgaatgagaaattagaaacattcattttctaaaacaatactgaagagattactatccatggaatccataatcctgaaacttgtctttccaccaccaccttctatcttcctcaatacattatccttgattaatattccttccttggccctcggcgggctctccgaactcagaggcaacaatatgccttattccaaattcttcatcaccaacaacaataataataataatgtaaatgctactaatcttcaaaaacagtcttcatcccaagagaaaaaaactactgaagaggtcaaggtgtctagtagattaggcatgcttatatgttacactccagctttcctagccaccttggctttttaccttctttttccccaagagagctacagcttgagaatgctcttgctcaatttgactctggctcttcatttcttcaagaggatttttgaggtaaccatatatttatttatttgatcttttactccaaaaaacatagaaaagtatggaaaaggcccaaaagggtgtgtgttgaattaaagcattctcaattttgaaatgtagaagccatttttttttattgtaacatgattggtcattctgtttttggggaaaattattacatagataggaataggatgaatgttaccagtgataatgttcatttacttatcaaaaagttttgcactgccaacttagaattagactccaaaccattttcaatgttatatcaagatgcttgtttctctaataacagaaaagaccgagttgctcaccatgaaaaaatgctcttatgacacatccatccaagatcctagtatttgggataaacagatcttagacttttatccttttttaacctgaattattcctctactattagagttagtcccacattgcttatatgtgtgaaaataaattgtcatatataagatgaatggattactctacccattactaattgatttttatatagaacacatttaccttatcttaaattctaacatctactcccttaaattgttgtgaaactttcattttaatccatacagaattatttcaaagtgatctctttatgtcccaaactccaaaaaaaattaagacaaaatgttgcatagaatatgtgttaatgtttatgaaaaaaagagatcaattttagggatatattactttgctaacacagtagtctaatttctttacagagagacagagactcattaaaataactttgttttattcatgtacatgtttgatattgtttgtgtaggtactatgtgttcacaagtacagtggcaacatgggtcttaaaactgcagtaataatcggcacaggttacttatcatccacagcaagtatgatttatgctcaacacctttcacaagggcttggagagccaaccattgatctgaaatatattgggtcattgttgttcttaattgggctaagtgggaatttctaccaccattatcttctttcccaattaagagaaaagggtgagaagaagtataagattccaaaaggtggtctttttgggttagtcatatgtccacattacatgtttgagatcatagaatttttggggttctttttcatttctcaaacattacattcattttctatagccataggcacaatgttttacttggggggaaggagtgttgctactaggcaatggtacctcactaaatttgaggattttcctcaacatgttaaggctctcattccatatttattctagatatgaaaaatgtacactttcaaatagtgcaatatgaagcagcaaccaaaagccaaaactgttataactcaaaaaattgttttgattaagaggttttataataaatttatttttactaaaaatacatttacttagagcttctaatatatttgagtttctattttctttttaatttttttacatgtgataaaaatataatttaaacataatataaattatttttatcaaatccatataaatttatactttgaaaaattaaataactaaaaatatatagaaaataaaaatttaatataacatatatttttaaataattattattataatgaactaaatgctttaacgtttttttttctatagttatgttgcaactgttttttttctcacaatatggttatagttgctaaattggcctttatgcctaacctaagccaaagaaaatatgttttcgtttgttttccaaactaaaataaagaaaataatgtggtaattctctagtctactaattactatattgtttaaaaataagacgtacatatttgctataaaataagatcatttaaactaaaataaatatcgttcattattattaaatactactatacaagatcgaattagttttatacatcatcacaagtttctataaaatataaataaggatacctaatttcattgtgataattcctagatgagagtaatggatgaaggaatccatatgatggttgtcggagttaagagggaataacttttggcatttctcggcacgagcatattgggcactaatagtgtcaagcaccttctataagtggcgctttgtgattacttagcgatattttttaaagttatatgagatctgatatttaattacatcaatatatcggtagcacattgggtgttaagcaccaataatgtcttttagtatttctcttctcaaaactctgctcgtccatgtatatgacatttttaggatggagaataaaaatttataggaaatttacaaaatacacttaaaaacggaatttttttcttttacatttatatgattttttttatttacattttttttttacagttttgtgttgtttcaatgttgttttcatgttgtcataatattatcttatattttcgcaacgtaagaacaacgtggtaatgatgattttttttaacaacgtgtagacaacggttctgtaagaaaaaaaaaaccgtaaaaatataataaaactcaaaattctgtaaaaaaaaatgtaaatttttggttgttttggtgtatttttgaaataaactcaaaatttattttggtgtaggccttaaatagcttaagaccaatcccatgaggataagttgaggaatatcttttttttttctaacatatattaataaaaaatactctcatattaaattttattaaaatgtgcttacttttacgagtgagttgtcttatataccttcactctttacttaagtctagtacataatttacattaatataaatggtataatagagacatcatttataaaagtaggtatatcttaaaaaatataaaaataaaggtaaaaattaaaacaaataaagtaaagtgggtatataatataatttcctcaaccaaacccatgtatgcttagaatcaagtaaaaaaaagtaattgaataaggaaaacttacaaaaatactgacttttggcttaatctttacaaaaatactgccacacggcagaaattatttttatactgtcttggccaattttttttttcttttata

SEQ ID NO: 111926 - DNA, 2335 bp, Cannabis sativa
  modified_base (52)..(59): a, c, t, g, unknown or other
aacataaaaagaccgtattttatgcaaataaaataaaaaaatcgtaaaaatnnnnnnnnttccgtgaaaccgtatttttgttatttttatgcatttgtgaaattaactatttttttattaatttcacaatctttaatatatttgtcacaaaatcaccacttttcaatatattttaaaaataacaaattatgtttttaattttaatactattactttatttataataatgcacgtcaaaatgttatatggattagtatgctagtttttgtaaataaaatacggtcaacgtgttttgatgcaattaattcttaataaaatgtacaatatttaaacataattaaaagcaagtactcaacacaatgtcttatatgtatcaaaaggtttgataagatatgatgcatatgtatattatataatacaagtagttaactcgataatgaaataactctaaccagcaataattatatacatgcatgacgagagcaaggccaacatggctaaaagtggccacattacattattatatattcaaacaattacatgcgtaagaccaagactactcgaccaaccaccaccagaaggcaaccggaacaacgcctgagggggctcactcaacctagttgactttttctgcacgtgatcttctccaccaacccacgtgatcatcaacctggtctccttctctcttttcttcaccattattatttccaaaatcctcatcttaacctgactaatcaaatcccagaactcatcatcacttctcctcttcttgaacaacgacgacaagctctccttaccatcttcaaccctgttcaaaccttctagaaaccgagtcaactcgccagaactcaaaccatgtatcctatctccaagttccttgacccggatcgacagttcacgttgaacaagcctgtaatccttacccaccagctccaaaacgtcatgtatcaaaccgttcgtcacattcttaaaagaatcaggcgcgtcgcgcgtgcattccacgtagtccaaaagggcgtcgacttcagataaaacttcccagcttgaaagtgccgaaaccttattgttgttgttgtttcgatccaaattattacacaaataatagcccataaccctagaaaccattagattttgctcaacaacggcggcgtaccacctaacccacgaagacatctgccacgtgtcgttgtctgatttgtcgcggaatttagagaggttgagaaaattttgaccccctgtggaagggtagaaggagagctggtctttgaggatgaaagagcctgttgaaacaatattatgagcgacgaggaggcacttgagtgccacggcggcactgcgcgtggcttggagtcgacccatgagtgtgtttatgcacgtactggagatggtgcgggatccttggccgccgccgcccatgacggcggagatacgattctcggaaggaggagatgacggatcgtgtgtggtggcgcgtatgatgcttacgcgcatagaagttgcgtggaggcttgtggatagagtaatggctttgatgattgaggctttgtccttgacaatacccatcaagtttcgtaatttctttcgccttatcataattcccatatgggagtagcctagtaaattcagtgagaggtgctggttaattggtatgcacgtatgttacggatatttgtatatatatatatatatatacgcatacacggttcataatttggaatatttctttgcgtttacacacataaataattgttaacttgttgattttgtattaattgtcgacatggttcctttttcaattccgtgcgcgttgaatttctagaaaatgcgtaggtactacacgcgtgttcttcgacggaacgatcaatgaaagaaattcaaacatgtaatgtaataacgcaatgaattgacaatttcttttttttttgatttgatacaccaaactatttatctaattacaaaaaccttattatgagattaagacttgataactaattaataagtacaaaataaatcaatgaattgacaattattcaggagttttcccattattgattataataatttacgactgatagtaggtatatatatgggtatacttttttaacgtgtattacctattaatagataatattagataatataatggctctacaaatttaattttggagaattaacttatatactatttttttaaattcttttttaagtttatgtttttggtttttaaagtagttgcaacgctagttgctataggggtttttatacgtttttttgttgtaatttaggttgcaataagggtttctatgtagatcaatttcgtaaaaatacaaaaaaa

SEQ ID NO: 111927 - DNA, 3082 bp, Cannabis sativa
gttgatactttatagaagagtggttgtaaccagtttttgatgccgaatttgttaactgtgaaagcgatgctgcaacgaccttctcagcctgaaaccaaaaatcaaataaaaaaagattcaaaattacaaactaatatggggaatgagtgacatgaatcttacctcagagtaaccaattgctattctttttgcataatcatctgcaacatgttgtttcgatgtaccactaactgcatcatgatgttgagcaattgctaaagcatcagcaagatagtctgtgttcggcccagctttactctttcccctaaaaaactctagctgccttgctgcctgttaatggatattacaacaacaaagagcatcacaaatttgaaatcccatggtaattggtaattacttaaaaaagatacatcaaaagtgtaccaaatagtaggcgcttgtcactctaacatagcctttaagggctggtctgctagtaaaataaccagtccaatatgcattttgtttgtctgcatagctgagttattgacaggaaagtggtcagtgcaacacagacaagaagaagattttgactttcgatcatattgacttacgggaagtagtcttcgctctttaatggccagtactcatctgctgcatgttttgcatcagtgtatattgatggggttgagtacagggcatttacacgcccatcctacaagcatgaaaatacaagaacataaaacttgaaaaccactaaaaaatatacatgtattggaatgagttttaaatacaaactaacttggttaacataatgaataaacttgtccatctgccgaaaccatgttcttgcatattggtactggaaatctgtccccattgtccacatgacatgatttgtacgagtaatgttagcctgaaaaaggaaaagaagaagaaggctgtctcttttctgagattcaacagtattctaccaattgctatttgtgtaaagaagttgatcaaaaatttctagacagtatgaataatgaagtaaagattacttgtgatatagcagcagccacaaattgattcacacgctccatcacattgtagtcaaacaaatttggattatccttcaagtgaaacaataaagtaaaatatatacatatatacccccaaaaaaaacaaactgtgtaatgttgaacaaactacaacaataattgaccataacttacttgcacaataggatcatccgtaccactattaacttcatagtaaaatctgctgggaggttcataattctcaggaaaagccccagcaaagatctacaaaaaacagcattaggacataagagtcttccaattagaaaataagttgaaagagctttatgtgaaaataacctgtgaagatgagccaagactcttagatcctcgccagacaacctcaagggtcttgtcattttttcgcttagctctatcttggtagtcaattctcccaaagaaaaaagagtcaaatccaacctaagaaagaaaaaaagaaggcaaaaggggttaaaagattggtttatagagaccctttcctcacaaccataacaaccatacctcagctcctaacaggtaggcttgtacggcagaatgaccaaatggatcaatctgccaaccaattctaggagtgacattaaactcagcctttataaagcgatggccaagagtagtctgatcaatcatatcaatgtaatgagttgcagcctcatcgtgcatgcacatacccccatttctacacacccccaagaagaagaagaagaaaaatgccaaaacccactcattaaatcacaaaaacaaaacataaatacatttgattatcttattctgtttagtaagtacatacatgagctctagttgaccagagttgactagtttcttgactgtgcttttaacaacctcactctgttcatcccaccaacgctggaaaaatgcctgtcatttactaaaacagtaaaactcatttagaaataaaacactacaatcccataaatttatatatatatatatatatatttatatggattggcttgcctgttctacgtaaatgaacttgcgattcttatcagccaacagtgcgggaactaatgaatccaacacgttttgaacacaagcatcctgttattaatacttcattaataacatcaatattacattatatataattataataatagtaataaaacatgtaatgacctgaatggagttgttggagccaacatagtactgatcaatggtcttcaaccatccaacatcatcgtgagtatggggaaccaaatgaacattgatctttccattaacaatagtggaagtagtgttgtaagcaatgaacttagagtgtccagtccatgaaaacagagccaccgccatgaacaacaacaaccaagctctgatcgccatcacggagtaataagtaattagcaaactagctcagatcagatcagaccccaattgggttttcattactatcgcttcacgagtgaaaacagagtctcttatgtatgtatatatatatataaggatgtatgtaccaacttttctttttttcttctttctttttcaatagtaatgttgtcacttactacttgttcgattccaagtatgagaatagacaaagaaagaatacaaaatcaatgcatgatcgatactatactatgtggctaaaactgaaagataagatcgaaacatagatggttttctttttttgtgtggataaaaacaaaaggtgtgttgtgttggtcttggtcttgtcttggtcctgagttttgtcccaaactctgatgatttctaggctaggtgtctttttttttccacttaatcaaactgttcgaaccaggaagaataccataatcgatggtggtggggtcgatcggtgttatcgccagattttatttctttcgcttgttaattaccattaagttaatatgattatgtcggaggaagattgtatagaatggtgtaattcaaactttgttctttttttcagttaatattataggaaaattgtattaaaaagtatgtgtgtgaaattttttttcattggcatgtaaattttaagaaatttaaaatagtttaacatg

SEQ ID NO: 111928 - DNA, 8754 bp, Cannabis sativa
acaattcatttaatcaaattatttattttcttttctttggttaccatccaatatgctcacacactaacggagccttacgcccataaaacccatttattcttttttattgaaactactctgtagtgtagtgtagtgtagtgtaggtaattgatttacagatgagaaaatgagaagtcatcgagtgagtatactgacaaatcttgttaaactatcgagaatactttttagcctgttaatctgcatttttttttagttctaattgtttgtattatttggacatagagaaaagaaaacagaggaagagaaattatattgttaaatcatatcttttttttattgccaaagtaaagttcagctaatactgttgaaaatacatcgttagatatcgttttgatagaaaatatacatttttgacacttacaaatatgttactaaaaacatagaaaattaaatttaaatctgtttggatcattgcaaacgcatcgttagatattatttttgccaaaagaaattaagtttttttggcactatcgcaatgtatcattgttttttttctgaccattgtagatatgcatcattagacatcgtgtttgttaattttgacatcgtgtattaaacaaaaaaaaaaattctggcactaccgcacatacatcattaaagcattaattttttgttgtaaaaatcgtttcttaatattgtcgcaaagtcatcgtaagacatcattttactacaataaatggactttttatcctagtttttacacatgaaaaaaaataaaaagtgggataaaaacttttgatcccacttttacatttggagtcttaaaaaaaaattggaacaaaggccttgtttggcaaatggataaaaaacggtgttgaaatggctaattttatgcatttaccaaatacaactttagttcttaaaaaaaattggaacaagggccttgtttggcaaagagataaaaaaatagtgttgaaatggctaattttatgcatttgccaaatgtaactttagtttttaagtgagactttttattaaaaagttccacaatatctgggcctttacatatataaaaagaatattaggttttagggttttatttacacatctcattcccagtcgtctctctctcctatctctctctaagcgatggtgcaacctttctctctgctattttttttcttcttcgtgcttaagcaactcaacctccgaaacggtctactatttttttcttcaacctccaaagctcgagccatgactgaaccaaaaaatcaacgacaaatgacaaaggctctgctattttttttcttcattttatatatcgatccaaccactccaactgtagatccgagattccaaccccgaaaacccaaggttgacatcacttgaactctttttacttctctgtctctctttttacttctatgtttttatgtggctcacttgctttttttttcgtgcagtcggacggcgttgaacaacaaacttcagtgtggtgttgatagtttttaggtttattttgtttatatttattttttaactattatgaaaaaaaattaggttttattgagctccacacccatatttgagctatatgtattgaattttattgattcatgggaatatttcagttcaaaatattttgtattttttttaattaatttgtaaatcaatttttgttttgagtgtatatcgattatgtatatccatttcttatttaattttatggaactgatataaatttttttgggtttatttttttattatatttttgacatttaatttcggtttttacataaatattgggataaaagatctctttttatcttagtttttatatgattttttatcccactggcatatatcccgatttttattttagcgaaaaccaggataaaatgcccttaaaaactggggaaaaaagctttttttatagtagtgtttatggcactagaaaatatattgttagacattattttcatacaatttttttggggttttagatttaacaaaaaataaaaataaaattataaattttagtttattgaacgcgtgacttttttattttatacgagtgtgaaatagactctttgaacattgatttctatattgtaaattattcaaatttctccaaattttacaggatgtcttaaataactattgttgagcctattttttaccaaatacgtggcgaacatatgaagttccatgtggctggggggccctactcgtggggagattagcgcttcttctagagtgattttgcactcagcctcgctgattgtaaggtgcgtctgggagcaggtcccctatctctagaataaagtgtccacagattacttcagccatccggtaagcgataagctcccagaatagagactctccaggactccattatttgcataacacggattccaaagcaaataattgtatatgacgaattcgacgcatgattaacataactacaaagccatactgctctgacgacccatttacctaaacacaataaagtgacggcgatgcattgtcatgtcagctgcacatgtgacaaatcttgtctcaccaaactcctactatggaggttaggcagcacctagagaccgaagggagatgtaccttttccctccttttgactcttctttttccatataaatacctggaactttaatggaaaaggggagttttgaactcacacacaaaagtgagctcttatactataacttaaatattttttgatcaagggaacattctcaccataaataaaagtgacttgtagactatagttcattaatattggaaccatgtaaaaaatcattcttctattttgcaaatcattattgctcatattaaattaatagttgccaaaaatctcagtcaatattttggtgctttcattgagagttgtatgaaactttcacgaagaagaaacttgtatttaaatgttgttgacaaggaacaatcaacgacctcaacaaccgcctgataacccggcacgacccgaagaggagataacttctcggatagatggtgaagggggtgataccaatgatcctgattattcaagggaaggcatggcacgacctaccctcaagaaataaaaataaccatcagggaggcatggcacgacctacccacaaaaacaaatgtaaccaccaagcttaaagtttaatagaggtgaaaaataaaaagtgtcatgcacacttcaattaaaaataaaaggcttggacaaattctagctaaaaggaggcatcaaaggcctcattgtctcaaaaggaacatgattaaggccacatggccaacagttatataaaaaaaaaaaagataaatatattgaagccctgggaaaggctattaaattgtcccccccccccaaaaaaataaaaaagtggctagacatatccacaagtaaaagaaaaagaaagagagaaaatgaaaaggttggtgaaagttgattcaataaacctagtcaattattgcctaggagaagccaaaagaagaagtcgaagaccaccaatcttttcttgcaatgccacttccagctctttgttcttttcccataagcgtttgtaaacctcctcaggatcaagcaagaagttgagagaaggcacaaacttgttggacctccagcacataaaaaccccgtcttcatagtgcttgacgcagtgtttgcaagtggccaaaggtggcacgtggatgactcatttggctgaaacctaatttactaacttattggagtcttgaatcaagagcaactcctttagctcaactgacatcttggcattggactcgaggtccgcctaatgaagctcttgcaggttcttcagttggccatgaagggtctcgatctccagcttggccttggacaggtctgcatcctttttaagactggcttatttagctgccaactattggacttggcagtcctagtaccctttcaaggagttctccaagttagtaaccttcttttcatccctttccctcagggtcttttcaactagaacgttgtccttcaagtcttccacgtccttcctagccttttccaactctgccaacatctccccagccacctgagatcctatagttgtcgcataactctgatctattaagttcttcgagaaacaaccaacctcaacagcagcctgaaaaaagggaaaaatgtataaacattcgggaaaacgttagaaattgtggatatagagtaaggtagatgaacatgactcaccgaagccaaacttcaatcctgagcctagttgacagtgttcgttgaagcacaaacagcaaacctcttcacaggtagctgaaccaattcagctggaaagttacttatgatctcagagacaaacaaagccaaggcagaccccacatagttggagaaccagtcagtcacggggtccaagttcaaattcaaccttccccggtatactcccctcggagggccgcatcttgatatttatttatccaccactttaaaacatcagcctctgcagaccctttggtttgtgcatccacaaccaagttgtaccgagctagacgcaacgcggcatgatctgactccagatggacaagagtcagtgggattggggggacactcaagaactgctcagcttcagaaggaatgcctgaattagggggtgccttaaagaggagtcttgacaatttttgctcgttttgaagaagactctgaggaatccttctcttttcgtttccctctcctaggaatcaaaagggttatctccccctcctcgagtactactacctctaaatcctctaaactgacctcaacatgccctcttagagtcactacaacgtatagagcacttgtaggcggagtcgcttcacctcctgttggaccaacgtcaatcatgtaggatagcgaaagtctcatccatcaaaggaactgcaaaacacacaatcaattcgtcagcataaggcagtaacaaataaggcgtgtagccacaacaaggttagagaagcaacaaaggttatggagaggactagtcctacctcggcgccctaactctgtcttagaaaattggtaaaccaaatcactagagtcatcatcccctaagtagctatcaaaggggagaaactaactcgaaactaagtaagaagaatgatccagcaagatatggacatgaaggcttgatcccattcgggacctgcccaagaagtcccctataaatgaaaaatacctaattttctatttgttaccccaccaaaagtgggacatccttaacctattgagcctctcagcgaagcctacaggtcgtacatgggagtactctcgaacagatggaacatgaaacaaagttagcggagacttactgaccccagaagggctggttcttggagtccctatgttgggcacagggaaaggaaattatgggcgtggagccttggggctctttcctgcacctgcttccctctccattcgctccgcgacactttaggccctagcgatcaatcatcctccgccttctgcctgtgacaggcgttgtaactcgtctccgcatcctggatagttttagccttgagccctctaccgccttatctcgagcattggggcaagtgtctacactgaggttaaagtcttgcacactttgaggacccaccaagaggcctaccctacgacaatttttggtggtcactaggtctctgacgttgagctcttccttggacaaagtttggaatacaacctcatggtctcgaaagagttgcgtgggggctgttcagagtagaggagggattccggtccactcagtgaggagattcggattttcaaaggcctagaaaccagaggaaaagaaaaatctatgtctaaagccttttacattcttctaaaagttatacggtactttcccatcaataatgtcataacaaggttgtaaagaataaaagtcatccttaaatttgtctctattttttgggagagtaacgagttcagaaaaatataaaattttaccgagagtgggaacatcccacccctatcgctataaaaataaataaaccggctagaagtctgtagccaataaattctacttattgaaaacaatgtagaaaggttattagatgtaaagaagtggttagccgataaattccaaataaaagatttggaagaagtaagttatgttctcgggattaaaatttatagagatagaaagtagagaacattagcactttctcaagcaacttatatagataaggtgctagaaagattctcgatggagaattcaaagaaaggacaattaccgtctagacgtgggattactctgtgcaaggatcaatgtccatagagtccgcaagaggaagaggacttgagaaagtacccttatgcatcagcagttgggagcttaatgtatgtttgttgtgtacaaggcttgacatgtgctacgctatagggattattaatcgttatcaaactaatctaggtttggaacactagattgttgtaaagcacattctcaagtatcttcggagaacaagagatctcatacttgcataatccggtggagagttgaatcctactggatatactaattatgattttcaatcagacaaagatagtcgaaagttgacatctggatctgtatttactcttggtggaggatttgtagactggagaagcattaagcaaaccagtattatagattcaaccatggaagccaaatatctagcagcttgcgaagcagctaaggtgtaatgccctgactcacagggacgccacgtgtgtgcttttacaaaataaacttatagttaatctatctgtttaagaagggtgcggcttaattaaaaacttttgagcataacttttatacgaaatactgctgaatacggggatcccgtatttagaaattttaaaaacctggcccaaaaccattattacaaaatacggttacattttcaaaatataatcaaaagggtggatcctgtccactggaagccgagacaccacggttgatatgtacatcgttgggagacctaactcatggctggtccactttcccccttccattttacctgcaccacaaatcacccgtgaattgcaaagactcggcaagaaaagcaagtaaacacaaacacatacattacacattacaagaaaatcatggcaatgcatagccaacaatttcatcatctaaaatagatattcatccaatacattattaggcattacacaaacaattaattgtcttataagacaacccaactttgatgatttgtaaagcatccctaccattcgttacccacgatctccgtatgtcactatcgttgcccgataaagcaatcgataagtaagaaacctatatgcagtttcaagcgagtaattactcattcacaataaacggtaatgactgtatctttacctcgatcataatcgagtcacaaacgatgataattgtttctcacttaacatgcttaacagtgcaattggctttcttacctcagtccagtaatcaagtgtgcacaccgaattgagtggaataaagctcgatgatcctgggtcctatgtcacgacaacaaatctagtaaataacttaaccaaactctagaacaaaccctaattccaaaactgggcaaaccctaaccttcaatggcttaaaatagactatacaacacctaaataccctaaactaggtcaaggaaaacacccgagccaaaaaccacactcgaagaaaatcgagattttcccctgcaaaccaaccggtcgatcggttcaccagtacctatagagacggtcgaccagttctggcaagtaagaagaattctagttttcttccctaaaatcgatccaaatctccaccaaacctattaaaactctccagaacagttttatatcataaaaacaatgcatttcaacaataaaaaactcaacaatttatcaaaatcatcaattcaacattaaagagcaagattgagttcttaaactcaactcactctaaactcaatcaaccaagaaatcattcaattcacacacaaatagtcccaaattaaacttaaaatacaatctaaactcaaaccaaactcacaaacccaaaatcatagaaacacccccatcaaacctaactcaaaacttaggaaatccacgagaaaagaggaagaactcacctcaaagctttgagcagcagctagggtaagcaaatttagtttagaattggttgattgtgaagaaaattgctttaactcttgctggctcctagggcttcgaaggaaagaagatagaaggagaaagtttataggattttccttagttaagagttatcttaaattttctaaataaaaacaattaatataaacctaaaattaatccctatttcagcctaaaataaactcatgtaggacaaaatcttaaattaagtgaaaatactattttgcccctcttaaaccctaaaatctaaataaagcctaggggtattttagtcattctaactaccccgactaaactactatctaacaaatactactagttcggtataattccaatatacctcaacttttatcgcaatgacatttttgaccactctatcgagttttcacggccgccgaacccgaaaatattttatttcaaatggtatttacaatacccccataatccgataataacttcgtaattaataaattacattttatttattcatttattagattttcactaattaacttacaattagcgtaagtaagattataattttactccaatatccgtataatcacatatttaataaaatatgcctaattaaatattattatattttc

SEQ ID NO: 111929 - DNA, 11021 bp, Cannabis sativa
  modified_base (647)..(651): a, c, t, g, unknown or other
  modified_base (10669)..(10669): a, c, t, g, unknown or other
tcaataattatgttatgtgtattatcctgtccgtaccatgattcatatatataggaaagggtaaaaaggctaccctttaccataccccaccggatcatgcataataatgcttcttcattttcattttaaaataaaaaaaaacaacaaaattatttatcggtaacatatacaactggatgtctaatgatttgatagatgactgaaaagaaagaaagaaaaaaaaagcttaaaaaactacatgtcaagtacatgcatatattataagttttttttgtgttttcagttccttcatcgacttttatatgtatgtatgtacagaccattcatcatttatgtataacaaaattatcaagggcttatttattcctttctcgtcgttgatttttcatttttccggaaaaaaaaatcgaaattagttaccaataacgttgagtaggaaaagaaagatcataaaataaaattgtgtcctcacgaattttgtgcacataaatttctttactataattgattgtctgaaaaaaaaaagaatcttttgtcacaactaactgtagtgaaacttagtttacttggggaaaaaacaaacacttccagaagatttttacttttagtcagcaaataagagtttacatataataataataataatnnnnntaataataataataataattgcagagagagagagagaagcgtttacattattattagagaatagagactgcaggtaaaattattgaggctgttttccatgaattatgcagaaataatagtccttttttagttctctcaagggaagcaatactcttaaacagtctcttcttcttttgtgtaacttaagtatagctggatacattgatgcaagatcatgaaattattcacgaattagtcaaaagaattttcaaaacaaaatataaatgggtaactttatagtacatttcttaaataaacgttttagtacattcttaaataatgggacgacgttttagttttaagagagttttttaatttatattgtaattatttaaaaatatttctaaattttcagacaatttcatataatttaaaatactgaaagaaaagttaaatattttattgaacattatttttctaattcaagtcataaatatctgtttaaattatatttttgtttttttgaacaagagaaataattttattcaaaaaacgaaacaagattgaggcaaaaattgccccaaccaaacaagccgagcaacaacaataacggcacacctagaccaactaccagtttaatattacatcaatgaaataactgttctttctactgctaatgaaggggcccaaacataaaattctaaactttatcattttcttcacatcctagctaatcctgcttgggaaagaacaaaacaagttaaaaagacagttatttctattttgccaaatgagatagaaagtggtagcagccactgcattgatcactctgttttggatgtcatgccgagccaaggaacacctgttacaaagatcagaaatggatgttggccaagtaacttgaccaagccaagagcataatatatgattactcaccagttttgcaaacaagcaatcaaacaaaacatggtcatgcgattcttccttcaactcacaaacgagacacctgatgtcataaatcggcatgattctaatcagcttgtctcgggttagaagccgcaagttgagaagttgccaatagacaaaactgtgttttggaatcacaagtctgtcccaaacccagccagcataatcaactctattctctatcaccagctggttatagaatcttgtagcactgaatttcctacctttgacagcaaaggtcagctgataatcacttgtagccaccctaagattcagtaatttcttaaaataccagcttgtttcaggtttggagggatagttccggatggattgaccttccaggttgattgagtacccaaagattatcctgcttgctagatatagcccaaagaaattggtcatcaaagccttgttccatttctttccttctcgaaagccttttccaccaaactttttgggaaggcaaactttttcccatgaagctagatgcaacttgcttatcttccccttcttaccccataagaagtcacgacaactcttgtctatggcaacagttatcttttgagggattaagaagatactgatccagtaatttcttataccaagcaacaccgagtggatcaattgatttcttccagcaaaagacagatttctactagtccaacaattgagattcttgtttattttatcaaggatcacgccacaatccgaagccttccattttgttgaaggaagattcacccctagatactttagaggaaaagaaccctcctccatttgaaccaagtcgagaatttgtctttccacaacatctttgacttcgccaaagaagatctgggacttagctttatttgcagataacccagtagcattacaaaatttagaaaaggcttcctgaattattctcatcgaattcaagttgcctttgctaaataatacgagatcatctgcaaaatataaagattagtcaatcggaggtttttggacaaaggagtagatccaaagtctcccgagcttgagtgaaagctaagaagcatggaaaggtactccatcatcaaaacaaagagaagaggagacatgggatctccttgtcggagaccttttcccttcttgaaattgccttgaatcctaccattcatcaaaatatggtaatgagttccctttaggcatgtcataatccaattgatgaatctagtagaaaaacaaagctttctcagcagatcttcaacaaattgtcagtcaacagtatcatatgctttgctaagatctatcttcatgatgcatctcgctgatatgttctttcttgtataccccttcaagagatcctgaaagatcatgatattatgagctagaagtctattcttgacgaaagcatcttagttaccttggacaagaataggaagaacttctgagagcttagaacaaatcaatttagagatacacttatatattgtgttgcaacaggctatgggtctataatctttcgtcgtcctcggatcagtaacttttgggattaaggatatgacagtttcattcagatccttaggcatgtaaccattggcaaagaaatcaagaacaactctagaaattttattacctatctcactcctcatgtctttaaagaatccagagccaaaaccatccaagccgggacttttagtagaggggatactgaacattactttcttaacatcctctattgtgaagggtttgataagtctaacttgctgctccacacttaggcaactcccttgggcaatacaattttgatcaatgctagagattcgaagcttttacttcccataaacttctcaaaatgacccataaagtgtttaacaacttcctcaaagtcatctataatagaatcatccttggagtaggttgttatcctgttatacaacttcctttttctcatggcagcatgaaagtagctagagttctcatcattaaactttaaccactttatcttactttcctgagaaataaaaagggataacctgttctgggcagtaagaaactccttctttttgacatcaacagcattttgaaggtcagtgtcagctgaatgggtagcagcttcctcttgaacccggcagtattactctttaacaatcgtgtacttcttttcaacatcccccacttcttgtttgctaaacttttttagagtatgttttactctataaagtttcttaacaattttctcaagattactgcctgcagtaggcctattccagctagatataacagcccttctgaagttcggataggtaggccagtggttacaaaatctaaagggtttgaccccaaccttgttcgactcatgattctgaattaaacaataactgtgatcacaaactgtctcccatttaaagcaagcttcggcattaggaaaagcattcaaccatatatcattgatgaaaactctatcaagtttagagtaaattctttcacccacctcatgtttattgttccaagtgtagaaagcactcgaacatttgaattcctcaacctggccattagcaagccaagtttgagcatccaaaatgtccttagcttgcactggtctaccaccatttttgtcttggaacgagaacatagcagtaaaatctccaaagatgatccatggttcatgtaacagcccatagccctcaagtttgtgccatagatttctcctctcatccattgaattgctgccatagaccactgtaataaaaaaagagaccttttgcccactacttttaactctgcaatgcacgagctgagtgtcctcatctaaaatttccacctgaacaaatttatcttgccaaataatcataattctaccaaaagtaacattacttgaatagaacttccaattaggaaaattattggcaataatctcataagctttctcatgtttcaccttggtttcgaataatgctccaaaaccaactttattcaatcaagaattgcattctgcttttcttttttattcatttccctcacattccaaccaatcatattacaaacttccattaataatcaagttagagttgggaaccattacctcatcaactgctccttgaagagctgcataaccgttcactgttttgggtgcttcaacaatagtctttgttaccattttttgccctctctttttaggagtaatccagtttgctttgttcgaaaccccactgcctgttttctccatgtcagcttgacttgcttactctgctttttcctccccagtttctgtagcagtttcacagcgattattcaagttcttctcatcaccagtaattgtttcttggtttggaacctcctttttatcttccttaaagtcactaggttgtttcttcttccagactttaggtttctccttgttacaattggccacaacatgaccaagatttccacaagccaagcactttgaagggagccattcgtactccaccagctgctcaacaagctgcttttatattttggatatgtgagttataatatataatatatatatagtgttggtgaatgtatcgaatatcataatcttgtaaaatatatacatatatgatatttatattattggtagcatagcatctgttttacttttttttttatattttattaacttttaaaaattatgaataatttaagataaattaaaattcaatttgtgagctgcacttgcactagtcataagatgcctcatataacaacttatatattattagagatgtgtataaattgttccaatataataataattgatcgattcaattataactaattgctaagtattagatatttaattgggatcaaatcagattggatgatattgttcaatatccaattggatcagatttgatgttagatatggtgtttaaaaatttaatacatccaatatgtaactaaacaaattaatattctcagtttgaacgagtaattagattttgtgttgttatacgtaaaaatatatgtaacattaatttttttttgaattggatagatccaattcaatctaatagatactaaatataaaatattgaatagatctgatccgattcaataaatattaagtctaaaatattggataaaacagaattaaatcaatatatacatgaaatatattcaatattgaactgatccagtccaatccattagaagttggatcgattggataactgaaattaattagatcggatcggatggtaaaatctaacattcaatatataattagatcggatcggtggtaaaatttaacattcaatatataattggatcaaatctggataggtttaaaaatattatatgtgctccaatggacatctttatatactatgatataaatatatatatatatattacgtatatatatacttataagacatgtttatggaaaaaaaaaattcaaccattgatgatagattcaatagtgataaatagatatgtatataataataataataataattggtatttgaattgtattatattatttttatttattttttaataatattgtaaaataaatatttctttacaaaattaattaaatattatattctcaatcctccctcctctttatctctctctacactcatttttgttcttcatgttcttctttttcaaggtcatcttctagatgattaaataaactagggaaaaagaaaactcaaagaatcattcaatatcttttggagaaaaaaaaaaaaggtgatgagaaaattaagatgaaagttctctctttacatattcaaacctttaattttgtttatcgatagctataatagaatttaatatgcatttttattttattttttaatatattaattatatatgttatataatttagtgcacacaagtgtatatatatttacatatgcacataaatgtatattaaatagtgtatatacttaattatatgcatcatgtgaggattagctcacttagtcaacataactaataactaccaattgtcaaaaggtagttagtttggttggctttaaacttttccatccaagacctaataagagtcttaagactcatttcagaagatgatcaagatcgggaaacacaaaacagagtgagattaattctctttgaattctcaattgaaagagagggttgtaaaaggttttttcatttgtttgattggatagtctcaagtgagatcataatgtaactagtgtgaattaccattagtgagagtttgtgtgtgtgtgtgtgcgcgcttgatctgagtgttgtaatcttgttcattattgccaatcatcaaataaagaatccacaactaaagaatgctacttctacccaacgactagatccaagttttagccaaacttatgattgaacctctttatgttcatgtctatttcattttctattttatcagatatttagtttcttttcattctcttgattaatcttctattcttgtaggtaaatatgtgcaccacaaatggtatcagagctctagggaggtcgggagtgttcattcaagaaccaagtttagataatcaatattttgtccaagatggcatcagccaaatttgaagtggaaaaattctcgggctcaagtgattttaatttttggagaatcaagatgaaagcctttcttgttcattaggaaattttagaggctttggatgaagataaactgaaggaaattaatgacaattagaaaaaatataatattaaaactaagactcatagtgtcatcttgctcaaccttggagatgaagtttaagggaagtttctggtaaagaaaaggcattggaattgtggaataaactcgtaggaatctacatgaaaaagtctcttgcaaatatattatatcttaagaataaattgtacactctttgaatgtattagtccaaagatctcctgaaaaatcttgatgattataataagcttattcttgatttgaataatttgggtgtgaagattgaggaggaggaccaagcaatcattttttttaagttctctgccctaaatgtatgaaccttttgtggcttgataatgataaaagtcaagactgctctattttcaaaagaaatttaaaagaaagatgatcgagctgacaataatggagatggtctatttattgtgaaaggcaaaattccaaataacgaatacaaaggtcgcaagaactgttacaacaataatagagataagtctgatagattcaaaccaagaactctatcaagtaaacgatgttattattgtaagaaagaaagtcattttagagatgactatttagaactcaagaaaaagataaagagagacaagaactggggtaaaaatggtgaggctaacatagcagatggctatgaatcagttgaggtcttagttgcatctagcaatgtttcagctggagtctagattttggattaacggtgttttttccacctgacacctcacagggggctgtttagctcattttcagatgaacatggtgtatctgtgttagttagtaataacaaagcttgtgaagttaagggaattggttcaattgtaatgcaaatgcatgatggtgtttcaataagtgttcaacaagtgagaaatgtaccagttttgaaaagaaatttgttgtccattggaatgtttgataagaatggatacatagacaagactaatgagggcgtaatcataatttctagggttttaaagattgttataaagggatatttgaacaatggtctctactatccagctagtaagattgtgattggtaatgttgcatcagcactgagtcaaacatctgagatcactacaagactatggcacttgaggttagggcatgttagccaaagggggctagatgagctaaataaataaggaatattcaagggaggtttgaagaacaaacttgaattttgtgaagaatgtgtctttgggaagagttgctaaaccaaattcaattaaggtgaacatcatacaactgagaaactagcctatgtgcactcagatctatggagtccttctatggtggagccacttggtgggactagttatatcataagcattatagatgattatagtaggaaggtttggatatacctacttaagagtaaagaccaagcatttgggacctttttcaattggaggacagtgctggaaaataaaactagtaagaggttgaaaatgttaagagcaaataatggactagagtattgctataatttgttcaaagattattatgctaaggaaggaataaaaaggcacaaatagtaaggtgcctattggttggagctagttatagaaagaaagttttgggaagagactctcaaaaatatttgttatctcataaatagatgtccatatgtttaaaacaactttaagacaccacaagaaatatggacatgtcatgttcctaaggtggatcacctcagggtgtttggttttatagattatgctcgtgttaaacaagataagttgtagcttagagcattaaaatgcatgtttttaggctattcagatggtgttaaatgctacaagttatggtgcttggaatctagatacagaaagtgtaccataagtagagatgtagtcttcaaagaggatgatatggcaatgaaacctaaggttcataatgagattcaataagcagctccagttcaggatatgaaatttgaggcggactagaaaatagattctcaaattgcagatcaacatcaagaaatcagttcaaaaagtgagaggcataaagatcaaactattttgagttcacatcatctttccagagatagagatagaaggaaaatcagccccctgacaagtttggctatgcagacttcatagcatatgcactgattactgccgagaaaatagacatttcagaacctacaagctactatgaagttgtcattagcaagaacagaggaaaatggatgaaagcaatagatgatgaaatgatatctctcaaggagaagaaaacttaggttgtgtccacaaaaccaaaggggaagaagttggtaggatgcaaatggatcttaaaaaaaaggacacaccaggtacagagcaaaccaagttcaaggccaggttagtggccaagggattcactcaggaagaaggagtgaatttcaataaattttttccagttgttaaacaaacttctgttagaatcatgatggaaaaagttgcaaaagaagaattagaaattgagtaagtggatgtaagaacaaccttcttacatggaaatctaaatgaggaaatctatattcaactacttgaaagttttgaaagtatagatctagactaggtttgcctcctaaagaaatctctttatggtttaaaacataccctaaggccatggaatttgaggtttgatgaatacatgaagaaaattggatatgctaagagctaatttgacccatgtatctatcaaaacagttacatctactcgttactttatgttgatgatattctaatatttgggaaagaaaaagtaaaaaataacaagtttaaaaccaaattaagtcaagagtttgagatcaaagaccttggatctgctaagaatattcttggaattaacatcaaaagactaaaaccaaatgtgattactctatctaagaaagggtatctataaaaagtgttaggtaagtttggcatggaaaattcaaagattttctcaacacctctatctcagcatttcaagttgtcaagttctcattcaccaacaatatatgttgagaaagataaaatgaagaaggtgacttaagcaaggtttgtgggaagcttgatgtactctatggtctacaccagaccaaatttagctcatgccatgagcatgataaacagatttgttggaaatccaggatatgtgcactagacagctatgaaatgggttatgagatatctaaaagggacattagacacttgattaaccttcaattataacaacaacttcaaggaagtggtgataggttatgtagactcagattatataggaagtctagacacaaggaaatcattaacaggctatgtattgcctgtccattgtgggtgtgtgagctagagatccaatttgcaaaatgtaatggctttatcttctatagaggctaagtgttgattggatttttagccaaccgacgcngagttgtaataaatgagatttaaaccaaaatcacaataataaatgcagttaataacaccgaaatttgcaataaatgtaaataaaagacaccagaatttaaagaggttcgacctcggatgtcagtaatagcctactccccttgagttttattgtctgagttgcaaaagtcaagaacaggctcttgattgcaaagaatgagaagtatttatttttctaagtgtttcaaattgcggatcccctctccaaggtcatgggtgaccccttatataggggagggggtcggtgcttcttgcttcaggagatgcgaccaacgcggagctatctcaatcgtctctttgattttcagaggcgg

SEQ ID NO: 111930 - DNA, 1274 bp, Cannabis sativa
gagagagagagagagagaagaattttagggttcacaatttttctttttagagtgagtgtgtgtgagtgcacaatatatattaaatttcagatgtagaaaaataatttgggtgacatcgaagtttgagattgttaattaaaacttgaatttgaatcgtatacactcaagttaagctgagcccaattattttcttttattgtttatggactttcgggtagaagtgttcatgaaactgttcatttaaaaaaagtgtattatacaaagagaatgtgacctacgtctactatatatatatacatttcttcttttctatttccctcgtcagatcccccatcttctctctctctctcttgaaacgaaccaccataatcaccatcgatggagctatgacaagtacaatctggacaacatttgaccccatgcgcctgaccattgcattcgttggatgccggtaacttcaacccctaagtggtagctcatcattctccgtcgtcgttagtctaggatcgcaagtcaaagttttgaaattcaaattttgaatggatttttggttagctctaatgttcgtatgaagatccgtctttgcccctaaactcagcaagtcgagaaaaataacctccactatgtcattttgtctagttctctattttttcagtgacatttttttaaatcatcattcttatgttgtgattaaaaaatccgtaactaaaagtattagtcataaaaattataatttattgtgactaaatatatttttagtcataatacttgtcgtagctaaatactatatcttagtcacaagtaacttttgttgtgactaaaactcacagttaatcacaaaaaatttatattgcgattaaaaagttgtcactaaaagttgctattttttgtagtgaaaattgtacgtgtttaaaactcagcaacaatttacgaataattaaatttaggattaagaacttggataaatgatattttttttttatataatgttggcaagctttgaaccaaattttcataatcccttgacattagtagtgcactaatctcttatttatggacaactaatctcttaaatgtctagatattatcctaattaatcacccaacttacagaagctaatacattgttaatctaatatttatgtaattaagtgaaaagcccatatatgcatggagtacttggttataacactactagaaaattgggttttagtgacacacattgagtaactctaaaagtatatagtgacacttcaacgcgcgtcactaatgagg

SEQ ID NO: 111931 - DNA, 5487 bp, Cannabis sativa
agaaggattattttttaggttttaaataaagtggttatatattttcaatagtggtatgtattagtttaagaataaaatattagatatatataactatagaaaaccaaatttcccaaacaaaattactttttcttttgccaaatcatacacttctaaccaaaccggccataatccttaaccaaacaaccaaccttaattctatgaataacaataacatatccggtgtagcatttctcgattgtttcagtgttttctcctttaatctctctttctctctctcttagagagtacaaagtttgagcacacccattattcttctcacgaatctgacccgtatgatcttccaaccttctggtaattacctctctttcttctctatatttcaactttttctttgctttatggttttaaaatcatccatgcatctttattattcattactcttgttctactgtggtacttagctatatccctgttacagactttgattatttttgcaagccttggttgctaggaaattggcacaagtgttcatagtttctgttatgtttgtctattaagtgtttgataaaatgcttgcgtaaacatgtttaatattttgaataaattttatgttttttggattattattactcagtactcagtcctctttgatttgactctcattaatattgcattcaaattgcttgattttgttggcttttggtttactctttctttccaattgttgtgcttagtataataacagagtgtaagaaaacaaaggttccacatttatatttctatttctttttttcattaatggaggtttattaaaattccacacttagttaatactttaaactaaactgttttattctttctcataagaagtgagtgtataaatcatatttataaattataataaataaactcttacaaacccatctacagtatgagacaacatttgcttttgctgtccactttcagatctggtgtgcctctgagtttctttctcatacaaactcatgaaaattcttgattcatatgtggccaactacagcacaatcattacttatctcccttgatgtgaggtccgaggtccagcataaaataattctgattgtacggaactgattaaaggaatcatctcctttcattctttgttgagtttattcctagattctcattttcctcaatctgaaaacaaaaatgctggtaacatttttgataccttttttcccttcttcctattgtgtttagccagaaaatttgattcataaaatcagtagcttgtgtgtttatgtcttaatatgatttctcttcgtagattcagtttttcaaactcgaatcttgctagtaggctcaattatgtaaatccatttggtcaatacctgtatttcttcaaaagatactttgtatcgtcctgtaactcaaatttggttaatgggaacaagctgccttacttttgtttcatggcaccgaagggccacaagccatgttccgaaatttcttcaaatggattgcaacgtggatttgagcagcttaccttgtgttctttttactcaactaagcctatatgtaggtcttatagaaggagagttagtaagagattgaaagctagtaataagcctattcttgatgaagctcaatttcaaagggcactgtcccaacttcttcctagatttacagctgaagaattggccaatgtaatggctcagcaagatgatcctcttgtgtgtttggagttgttcaattgggcctcacagcaaccgaggttcaagcacgatgcttccacttatcacattgccgtaaagaagcttggtgcagctgaaatgtatgaggaaatggatgatgttgtcaaccaagtgcttgctatctctcatatgggtactgaggctcttttcaataccattatttattttttcactgaagctaggaagttgactagagctatcaacatatataagcacatgaagaacagcaggaacttggcttgtcgaccttcaattagaacttataatactctttttgctgcatttttgagtaggggaaacaattcttacattaaccatgtgtatatggacacagttagaggcttgtttaggcaaatggtgaatgatggtattgaacctgatatcttctctttgaattccatggttaagggctatgtcctttcacttcatgtcaacgatgctctcagaatattccaccagatgggtgtggtctataactgcgttccgaactcatttacctatgattatttgatacatgggttatgtgcgcaaggccgaacgaacaacgccatagagttatgcaatcaaatgaagagtaaaagctttattcctagtgctaaatcttacaactcacttgtgaatgctttggctcttagtggagatgttgaagaggccattaagtatctgtgggagatgattgaacagaggaggccagttgatactataacatatagaacggtgttggatgaggtatgcagaagtggcaggtttgaagacgcaatgaagctattgaagcagttccaagagaaagaccttgtggatggacatttgtataggaggcttctacatgtgcttgaagatgactttggacattcaactgacaataataaattcaggtatagtcatcgttattcagttcagtgtatgataatctactgatttatatggtctcccaaccaaaattttccaaaaaacaattctagtatcataacttaatgtcaagacatgagttcagagtctattggtttgcaggtggccattttacgtttaagttttaattattgtttcattgtttacaacattatgaacctgcttaaaacatatggcataggcatacatactaatgttgttgtatgatattttgttaatctattgatgtgcattcgaacaatcatttatcactataagccgaaaaccagtggggtgcttctttaaccaccccatcactcatttttggacaatattcggaaaacaagttcaaattacagaattccattttttttaataataataataagtcatttggaatgtctctttcttgttatgtgaatttcttttatactatcccactattattttgaggatctcttcattttggcaatctttagttgtttattatttgtttgtttatttgccatttctagttgaaagtttatattctatccaactcatttatttgtatattttctttttattgaataagcattgaatttgggatctaaaactcatttgctctttgtgcttgcaggtagatgaatgcagtagttttttcttttttcaatttctgtaacagtgaaatccttttacacagaatttatctgaggtttaagctgctatgctacatggtattgtcttctgttctggcttgacatgtaattgttgtattgctataactaaaacaaacattttatacgtgtcaaatgtgtttttctggccttgtagtttctgtcatcctcctctaaactaaaggtcctatatcatcaagtagtttctgaattttttgccatgggacatgtgcttgcttgggtttcaatctaatcatcctttttctatggatcatattggagtttgttagttgccttttatgcagattcaccataaaatcggatccatgcttttggatgcagatctccactaccggatcaggactccagaaagggagcagccagccagcctagggaaatggccaaaggttggctctcttatatgtactgtgtttaatttttctaggacatctaagaccaagttttttcatttcaaaattcctcatctaaaaaagcccaaagcccacaagttgctgctgctctgagtctgaactgaatatttgtttatttattttaatataagatatacaaatagtaatactagagagagagaggggtttatcttttaggggccatgaagcagtgtcggctcagtgtgtggattgggtttgtgttttattaataatgtcacactactgagcattattttgtttattcttactttcctggaaagtagtgggtactctgagtctgagatggcaaacaatagtacttatattttatttaatttgaaaattttaagctttgggtgtgctgaaaagaaagaaaaataatattatatttattaagtaggttgtctttactgcttaatactaataatagttgggtatttaagctttaattgtgtttattgcttgccattgaagatattgacatacctaattgtaggggtgttttgtttgatgccccaaatggtggctgcctattattctttggcatcaggtaatataatcagtaaacttgtctggtgattagtcctctctctctctctccctccatctagcttctttgttataataagctttagcctttttatttatttcattttatatatatatatatatttatgaaatgaatggtagttagaagggagttactaccatataaaattattatttttgtttcctttgcttgctcaatttgctttaaacgttactacaagtacagtctggtgtcctggatttcctctttgtatcagaaagagtgtattggttaatgctttgaattaatgatatttctagctctcggccccgagctctttgctcttaggtggtgttctctgaggcgctattttctcgaagaaaaagaaccaaaataaacgagaccaagtaagcctattagggaaaaaaatctgcaagctttgacaaagagcaattatctgaataggctgatgtggtgttgtagttatatgcctttgtggaacagttgcataaagagagaagttatttcagcagacattttggtaagaatcaatatgagatgtatttaaaatccaatctacaatgccaaagccccatcactaacatttagcccatctattctaacccttatggctttgggcaaaagggtacccaaaaaagagatttggatggttgtcattgtcaattgtcattctcctcctacactacacctaccaaatttacaatagctgctctgctgctatgtttgatgctagtatggatttgagacccctttattttcttctactactaatcacactctccattgaacttctttttacactagcagctccaataagcatgcttgcttaacataactttccattttaaaacaacttatgcaaagcatggccatccaaacaatgtgaagattgcctactcatattgatcttctttaacccaaagtacaagattttgaagattgcctatatcacaataatgagggaaatctgtcaacctaataatgtgaaatagtgatttcagcacaaaaaaaaaaaaaaaaaaaacaatgtgaaatagtaaaatttgcaaaataattactctcaatttactctatgtgaccaataatagtcccacagtgtaaatctataagggtgcgtttggaaagccacaatgtaattggatttgtgtgtaattggaggtaattacataatttggcaagtttgtctgaccatgtaattacacttgtaattggaagtaattgagggg

SEQ ID NO: 111932 - DNA, 7272 bp, Cannabis sativa
  modified_base (7196)..(7226): a, c, t, g, unknown or other
ctggtaaaataatttccaactggtcagccacatgcaagtaacaccatggcttgccaaattatagaatgctaagaagatgaacaaaactgaaaatacaactcaccagagaaaggtcccatggtttggtagagtacagcatgtcaggcacactgtcacccaactcctggaaagcctcatccaagaaagggataccctctctatacaccgagtggctgactcagcagcctttctaccaacagctgaccccgctcctctgttaggcctccgtgtacctgggaagacaggttgaactataggtaggccagcaggtgcaggccctggtagagggggaggcagcgagaggtcctggccactttagccctcactcgtctgctaggctcatccgaaggcccacctgcgagacctcttagcctggaagacatgtctgcaaaaagaaagtagtaaagtcaaaatgcattcaaaaatattcaatacaagaataaaaggatggtgttataaactatttaataccatcagcatctgaagaagatatgtcagagctcacaactacagctttgcccttgtccctaaatgtaggcacatggcgtgtaggtctatcaaaagctaggcctctaggcccaatatgaagagaggcgtcacctacttgacccccacgggccaggcgcctatggagagccctctctctcctctctagattctgtacaatacgagacaaaggtgcttcttcatcatccaagtcagggccttgcccatctctagggcaggacacaccagcagttggcattctcgcaacctcaggagcagatggtacaagccatacatccagaagttgtccacactagtgaactggataatgtttctttgttcatccgacaaagaaaggatgcgattcgctctatcccttatttccaaagtagggatgtaacatctgaagagcggcactagctaaaattcatggtgcacaattacgtgaaggccttgtgccatagagtattttttggcatacttgccaacttttaacatggctttgaagtggtgtcgcccagccattggtgactaagctagctaatataaaaatagtcggttttgctctgcttcagcccagaatttaacttaaaatagtacccaatctcgttaggggtaggcgaaggccaaccaagctccttgtacaagacaaacatcatcgatagatatttaatgctctttggcatgagctgtgtcggacacatcccaaagtaagcttcgacatccaaaaagtatgatgaagttgcaacactgcgccataaactatgtggcacccgaccatgccaaccagcccgaagggggcctgtgcgccctccaattcttggaaggaatctcacaatggacaccccttactaggccactagtaatgagcttatcgaaggcctcaacagggagagcagaagccagtgaaacccaccttgtcttaggttgttttgcacctaatatctttggcactagagactgtactagcacatgatctagtcctactactgaaggcgcgccaagcccattcagtggattgcctcgggcatcataatggcccaaagagcggtcagggaggatagaaaatgtcctatctctcctccccctcactagaatgacctcctctagttcgaattctacatcgaagctctagtctctgagtcctcctctcgcatagcttcgataagaggctaggcaggctcttcctccactctaatccaaccccttgtggccaccatggccacatgaggatcatacaggggtgccttacgcaaagtctatttcgtccttgccataagtacgaggtgaacagaacacctacacagctgtcacctccccaattcaacacgaagcactacctacatggaagaaataagagaggtgagcaacctgactaagctacaaatatattcaagtcaacaactctcaacgacatctttcaggtaaaacaaagggtacaattaccaagacacatagtaagtcctaagttgcacaattaaccataatggacttattatctggccttatacaaagtttctaagagaaaccacgcataaggccatagttctatatgtctccaatgtcgtcacaaggccctaactgtggtccaaagagggagaaaactggctgcctgcttggagcctttgccttggccggccagggttctaggtcctagtggccggccaaaccccaagacccagcttagaggtcggccagcctagggacacagtccacatggccgaccagaccccatgaaagccacccatggccggccaagcttcaaataaagcctccttggccggccagcacatgcatggatcaaaacacgtgatttttcaagaactcaaacatgttcttcgtgttctttgtgattcaaagagccaagaatcacaacgaaggttagattcagttctttttcatctagaaattacacattgtttatcctaaggctatcatgcaaattaaaatacggaatggactacaatctaacgtaaaagtcaaagcatgttcaaaaaaataaataatgttcatccattcatggtaaaatcaatcaaatcaagtgaaagagagagtagaaagcttactcgcaacaaaattgcgatgaagatgaagatgggaagcttggatcattgaaataacgtaaaaatcccaaggagaatgaagcctatagattcggccacctagagagaaagaggagcttttttaagagccaaattctagtgagagaaagtaaaagtaaaaaatgaaagtgaaaaaggggtttccccccaaaactcacttatgtagtacatgtgggcacccattttctcacttacttcaccaactcatcataaaggcacataaaggagttatttctctattgcaatgatatcagacagtcaagacaaaatgcttcaacacgcaccactttttattcagcaaaggtatcgtcagtcccgacaacatcaatattgccggtaacgtccctatccgtacagacatctgcacaggaacatggggggcaaatattatcccaatttttgtcctcgtgacgtctcatacttcgtggacagaacctgtgccacgtgacagtacagctcactaaaaggaaggggcaagtcaacatccgagcaaaaaaagaccttagcactcaaacaaggatcaagtgacagaccaactcactctcaggagctggccagccacccctggccggccccatggccggccggcccagggacaacatcatggccaggcaacctggccagcacaaaggcttggccgaccaaggattactctgtaggtcccacaagatactcatgcacgtggacatcaaaggtgggctgcgaattgggccccaaaagcccaacagaatagctaaataatatctagaattaaaggcatttaggtctttcataaatatctaactaactatacaattttcaaggaatttgaattgtaaacctagggtttaaagcttcctatataaaggtcttaacctctagctgaaaacctaagttgcttaagttgcctctaagctaaaaatctcaaactctctaagtgtcagactctctctctctctcttcttcattctcccacacgcctagcctaggttgttcaacacttgagttctgccaaacatcgattcatacattgtaatcctaaggctactataacagatctcacctataacgatctgaatagtaattccctcaatatatctcgttatctattactttttattcttattcgtgcacacacgtggcaagcatcggatctatatgaccccgttgtcggttgatcacttttcaaggtcagcaccaacaaacaacaataacttgtcaaaagtttataaataatatgatgacacacttatactactatttttctcttttatatctatattactaccattttcctcatacattacttatactactatttttctctttaatatctatattatcttatttaattgcttgacttcacattctagtttcttaacagatttcgtggcaattggcaagctcctaagacgataagaaaattaaattcataatgtcaatattcttagtttattcacatatataaggtaaggtgaaattttacagataataatacacacaaatagataaaagcaaaattattaaaaacacaatttaaaattaatttactaaatacttatttttccaattttcgaagaaacacataaaatcctttcatatgaatacaccaatgtagaccaaaaactagatacaacatagttgggacctttcaacacactaaccatctaaagtctctgtgtctctctttacaaaatcgaaattacacattggtggggatttttctctttccctattggcatgcaatttttcaagaaattggggagaataaaggagaagtagaactgtagaaccacatatggaagagagtttcatagaacaattaattagcagagtttgagcaggcaacgttacacaatccttggactggaattggatcaaaaccccttgtagacaaatttcatagcatagagtttgagccaaccacattcacagttctttattataaagcaaagtaaggatgactatatacattatttggtaacctcagcaactgagaaacaaatttagttattgcatataataatatatctatataaatgaaaatgctcattttaatagcaatatacattgtatgataatttaaatacctatagtgcattctctaacatcacatgaaaatttaaactttggctgtctattgttcttggttttttatcaaactttggacaaaatctgttaaacccacaacaatatctacttgcaacaaattctcaattgctgaacccaccactacaccagcaacaagcccacctatggttattatagtagccttcagtacaaagacaatcagagtgggccatggtagattaattcaaaatattctcaatgaaaccctttacttgattaacccctattatatacatcagaatctcatccaacaaatttaaattaaatatttcaatattgatgcaacgtcaactactgttaatggcactttctttccttcaaaagtttattatattttccattatcacactttagtcatcaagtaaaactgccctatgttttattactcataaaaacaatttcaagagggacacatgctatgaacagcaaactctccttcaaattatagtttagcctttcttataatcatcttcaactaatccagaaaaggattgaaaaaagcaataatacacaagaaaataggcattagctaacttaacattctttttcgccataagtacaagaaagctccaaagctaccaaccaagattaatccaggaacatcagcctcaaaatatggcatgccagaggatgtggtggctccattaacataatttaagaccatcaaagctttcttaacatagttgaagcaattggtcattagtttagtcgtaaaagggtcactaagaaggacctgggccgacataggaattttttctagcctttcttgttattgttacatatcgcaaaatcaaaaccaccgaaaaattagaattggagttggattgtggagaaagggatgggaaatggatagggatggaacctgttagaatttgggataaggtgaatgggttctatctcaaaataaattggccatgagaggagtggcccattcctcttatatattctattatctttccacacattggcaatgttagactctctaatatcccctcaagatgatagctattttatttactcactatcttggacaactcgatcagatgactctttttaactatccccaaatcacaaaactttgctcttggattattatttttttttttgggttttggtggccctttttttcggctctacttcaatcggtagagtttttttttttttttttttgctctgatactatgttagaattttgggaataagatgaatagggtttcatctcaaaatcaattggcaatgagaggagtagtccattcaatttatatattttattatctttccacacattggcaatttgggactctctaacagaaccttagtcttggaggaagagccaataagagcgttggaaagagagggaagaggattgcggaggaagaacaggagccaacagcacaagcaagcatcgccataggtaattctaattttgatcgccaccaccgacctcaattcaattcaactccactccacatactccccaaaattttctctctcattgccagatatggagaaagattgtcgataaagatggtgttgatagaaattgtcaataagaattggaactggtcaaagattgtcgataacaatggagttagtcggaggtctgtttagtgtgatgtgagaagtggagcagaacgcgtgcttgattaagaaccctatgtgtattatattttattttgtcgtgtaaatgaataaaataatacttataaatgtataaaaaaaaaaatctttctttttgtttttttattaacgttaaaaaaacttgtttgccaactataattattctataattggagattgattcaacaaagaatattaaaaaaaaaaatcattttattttacctttgttttgttttttcataaaaaaaatgaaaaaagaaatatttgatgactagataattttttttttgatacctttgactagatttttgtggaaattttttttttcttaaagaaatacgaaattcattaagaaaaattcgttgttacaaaagaactcaaaaatcaaggacaagcatctgtccaaacacaatctcctaacctaataacagagtttgccaatgtatgggcaacattattcgatgatcgcgaaatggcactgcaagaaccaccaccaacaacagctaataatgaatagatatctaataaaatatactgaaaaataaaattaatgtaaagcatattcatccaaccaattgccacagtggaatcactattaataatggagatattgaagccaaactgatgcgcaagaaccaggcccagaagaatggcaagcagctccgccacattagcagagaaatcacctagcacatctaatgaccacaccaaccaaaccacaccctctgcatcccgtatcactcaccccaatcaaaaaaatcccctccctagaatcaccgaagaatccgtcactagtgtaaaggatccaggaggaggtggttgttgggttttgtgccctannnnnnnnnnnnnnnnnnnnnnnnnnnnnnncttattaataaagatcagaaataagattttatgttgcatggttcac

SEQ ID NO: 111933 - DNA, 890 bp, Cannabis sativa
gttaacacgcttaaactagtagggtattacagtccagcaggttcaagctcaaaataacaattctactactagtcaacatgatgttgtggaaactgatttcttgggaacccttaagatttttaatgatgcagccattgatcctcattgcaaaaaatatagtgttagcgttgttgtcttggatagtctcaatcaggttatagtagggttttccaaaccttttattgggattgttccccatgctgtggcacaagctaaggccatctttcaagctatccaaagggctcaaatggttcgacttcctgtggatatgcttatagccgattgtaaatctattgttgataaacttgcctcttataattggagcaatagtatacttgatgacattttaattagtgttaagaacttgttatctttcaatccaaacctaactagagtctaatatgttggctcataaggttgctaagttaggtcttggattagataatgagttggtttggaatggttgtctacctttattgtaatttgctggctttgtactccttgtttcatccaatgaagcactagtttttatataaaaaaaaattattattcattttcttaaatttattttatcatgtgtgtatttttcatgtcttttttaaaaatttgttataaatttatttttatttattgtaatttgtatatatgttttttggtgcaatgaagaaagtaaaatgagggcttttataacaacaaactttaaaaatttacaaaaaaaaatttattgcttagaagagattcatcttctttcctccctattttcactactacaaaaagggctattcccaacggtttagaagagggtcaattataggaaccgttggaaaaagtaagtggaagtttttcccatc

SEQ ID NO: 111934 - DNA, 3640 bp, Cannabis sativa
  modified_base (3595)..(3597): a, c, t, g, unknown or other
aacctcggtcaacaattgcatatgaattaatagctttttctgctgagtctttgtgactcacgggtgcttcatggtgcaggtaaagggaagggtaaagcgaatcaaccatgagtcagaggttttccagtaatgtacatattaactgcggcgcctcagctaccagtggacaggatccaccttttcggctgtattttaaattgtaaccctttgatgtaaactaatgttgaaacagggtgtaaaatttttatacaggggatccctgtagtggtttatcttttataagggttatatttttattttaatttaaaagttttaattactctgcactttttgtaaattaattaaattaattttaaaataagtttgtaaaagcatacacgtggcgtccctgtgggaaagggtgctacatattatgtcatcaacatatattaataaggccatgaaagtccatgccttttgtcgaagaaagagggagttatcattttttgactagttaaaaccttgttgaagaagtgtgttgctgagttttgcataccattgtctggatgcttatttcaggccatacaaactcttctttaatttgcatacatcatttggaggtataacacccttgggagtatagtcttggggaaatttcatgtagatatcctcattcaaatcaccaagtaggaaggtattatttatgtccatatggtggagatgccattgtttgattgcagcaagtgcaaaaagtaacttgagggtgttaaactttgctacaggggcgtaggtgttggaatagccaataccttgtttctgattattaccctttgttactaaatgagctttgaacctctcaacagactcatctaagttatatttaattttgtagacccgtttattatcaatggtatgttgtcttggaagtaatgggacaacaatccaagtgtcattagcttctagagcttctacttcattgtccattgcattgctccatactttatgtttgcaagcttgtgcaaatgtagtcgatttgatgaaatgtgttgtagcaaggacagctactctaaaagaagcaaagagcttgttgtaggataggtaatttgcacgggggtgataagtggttgaaggatgaatattcatggtgcagctatagtcctacaaatatgcaggtttttgaagatgcctgccaaatttagttaaagttggggctgctggtagtggagtagaagcagaatttgtgtctattgttggaatttttgtgtcaacaaggatgttgggagcaacttgtgcttctactcgtttgattggagaaaaaattagaggctgagccttggtagttggaaccatatgatcctggtctatatcctgcattttagggaagaaattattgatattattattaggagtttcggtttggagaggatagatgttctcatagaagatgacatctctagagtgaaagatctgattagtttctatgtcaagtaaggtgtaggctttcatatgttttggatagcctatgaaaacacatgctcgagccctaggagcaaacttgttttggtgttgaatgtgtgatgcatatgctaggcaaccataaattctgagatgatagtattggggtggcttactatgcagtaactcataagatgttttgtcatgtaagaggattgaaggggttcgattcaataagtatactgcagttttgaccatgaaactccaatatgtcaatggaaggttagattgaaatgcaagtgctcttgctacattcaatatgtgttggtgctttctttccaccacagcattttactgaagccttccaacacaagagttataattgatggtgcctttgcttttataaaaactagttagtttgagttcttttgcattgtcagtcctaagagccttgatattggctttgtaatggacattgacaaaggtaaagaaattctgaattattgttggggcatctaatttagcccgtaggagatgtaattatgtgtgccttgaatggtcatctacaatggttagaaaatacttgtatccttcaaatggagggattgggtagggaccctaaatgtatgaatgaattagatcaaagattgctttagagaaatcattgttatatatgagaggtaatttcttttgctttgacagatgataggttggacagttatgagaaattttgttagcaacagggaaattcagttatttatttaatttgtttgtaatgagtacagagggatgaccaaggcgtgtatgccattggtgtttgattacattgacattacaagaaactgaattcaaaagttgttcctattgaatgtaataaaagatatccaaatctcctagttgtcccaatcttcaaggtctgagagtggtcctaaatggaacaagtgttagaagtaaaagaaactatatgtgaagaattggctaagagggcactggtagaaattaaattgaatttaaattgtggaataaaaagaaaattgtaaagtatgatattatgattaagtatgacagtgccaatttgagcaatattaatatttgctccattagggagagtggctgatttgtttttaggtgttgctgtgaaagatgaaaaacatgtagcataacaacgaacatggtgtgtggcaccactatcaattatccaaatattgggagaaatgagtgaaattaccaaaaaaaaaattattaattgcaagtgcatatgatgttgaagcatcagtagtaggctgcagctattgactcagtaaggaaatgagttgttggcattgtgctggtgtgaattgagattgttgtgactcatttgggggaaaagatgactgcagggtgtgtggattcatccaagattgagaactataatctggtgttcaattatttgtaatagatgtatcattgtttcttggtttacaataactaggtggaaaaccatgcaagaagtagcatttgtccttatagtgacttggtttttgacaatgtgtacaatagggatgaggccttttattctttgatgcctggtttgccacatgatttgaatcaggagctgtgggggaaggggttgtagcatcagctacaagggaaggtatgtttcgattgcccaatgttctttgtcattattgatgaatgaccatagaaaaaaccttattaagaggagggaagggattaatgaggagaatttgatcatgtattacgtgaaaggattcattgagtccttttaggaattggagtacttgatcatggttaaggtgagcatgattttgggtggcagttgtacatgtataggggatgcgaggtcaaagttggttgatttcatcccacacagctgtagattttgtgaaataggcactaacagaatcatcaccttgctgaagataggtaaaagtctccaattcgaatattcttggaccattaccttgattgcatctgttgtttaggattgtccacatctcagatgcagtatcaagatacattatactacttcttattttaggtgatacagaatggagaatccaagacatcacaatttggttgcaccagacccaagaaataaggagagagtcattggaagggggttgagggagagtaccttctgttgggattttatgccctnnntaaaactcatttcaatataatcttatttgttatcaatagaaga

SEQ ID NO: 111935 - DNA, 6864 bp, Cannabis sativa
gattttaatcactttgtcaaaaaatatatatatatatatatatatatatttttgaaagattttaaattatatttaatactataaaaatacaaattgtatcaatttttcattattgttgtaattaaatatcggatcccatataattttaaaaaataacttctaaaaaatatcactaaccattcgtgaaacactacttataaaaaatattaggtatactggtacccaataataatacccagtacaatatatactatataagggtaccaattatgccactagtgattggttataaattaattatatttaattgtaccatatattatttatgaaatggtgtctgatataatttaaagtacattaattgtgaaactttgatattgccactatacatgctatatacatgtatatattttctagctatatattgtaaatttgtaataatatttatgttagaaatccaattaataaatgcttaataagtataatttgtaatatacagatccatgtataaatgttcaggctaattttttgaatattcttcaatgttttttttccctctctaatattaataatgccatatggatttaacagtactatatgaattaataaccaaatattttgatataattgtattcatattcatctctatcttcttcatttattattaacattttcgtgacatttagatattattaatatctatacgtatgtacattaatacttacaaatttaaatacatagtatgtatacatatatagaaatatagaatatagtgttgaaaatcaataccaatttaaatttttatttattattgcagagaaccatggttatataattgtagtttcatttcggggattttagttatatataataggagaaattttttaaaatgcaccttaaaaaaatgtatcgatacatctttatctattttagtatttgtgtaaattttttagtctaattttttttatggtcatttacgttgtagttatttaagacattctgtaaaaattttgagaatttagacaaatttaacacgtcaaaaatatgattctaacaatttattttacacgcgtataaaataaaagagtctcgtataaccgactgttggaaccctattttcgctatgttaaattttttttatatctcacaaaatatttacatgatgtcttaaataactacaacatagacaactatgaaaaaaattaacttaaaatttctctaaaataccgaaatagataggagtgcctcaataaatgaggaatgtattgtagaatcacctagtatacatttgttttttcctttttttatttcacacctcaccctttcttaataaagttcttaattttataattgtacatatgaatatgatgaaagttataatatcacataacttcttaaaaaatagaatcaataagcatgcataacctaaaattattactaaaattagcaaacattattcatatttttaatttcaagatatgtaaatatatatcattgtaaataaactaaattgtatacaaataatgaaataaaataatatactagatttttaccactttgataataaaaatcactaaacgtattgagagaaatggctaaaaaaaaattaaactcttttacctttaatatttatttataaatttcctttttaaaaaataacatttatttaaaattaatttatgttgatcataaaaagaaatattatagttttttttcagcaatataaatgaataaaaatacaaacaaacaaaattatgttaaggtatatttagatattaatgattgattgtataaatgtgttattagtaacacttttaatagccacaccaaccaattaggtttgtttattaaaataattaatgtaatcttttttatttattttttttttaaaaaaaatcaaccatattcaaactctcaaatgcaaatattttagtcaaattatagtattaatgacaataatagcattatacatatagcaatatgaatagtctttattttataatagacaaaacattaaattatccattaaataccagcctaccaatattatcaaccaaaattaagctgacattttcattagttcccacgtgtgaaaataaccatatgtactagtgagaaaaacaattaataatgttaatatttcttttgaggaaaataattaatattaattaattttaatatatatattaactagtggcctttctagaaaataaaatataacttgtgatacatgctatgcgcgctattaaattttatttaaagaaatttatgttattaagtatgataataaattatttgctttaaaattcaaataaattaatagaggacattattaactaattattaagaatggggaattctcatattgatgtagaaaattacaactcaaacttcttattaaattttaaaaataatttatggtttcaaaattaagtattattttgtcaatttttattatttgaaccataaatcaacactataaattatatagacttaaaaaataaaaaactcattggagatatttgctataattttatatacatagtcataaataatttttttttataaataataaaccaaaagtgtaaataacaaaaacacaaggatgaacatataaatagtatataactagtagggccaaaaaataagtgagtgaataattgtatttagtattatttcaaaaaataaaaataaaataaaacatttaatgtggccataactttaggtgcctccttttcttgaattctcctccaacttctctcaataaataatcctaacccaacattaaatgttgacaattaatctaaaattttaacccataaatgcaaactttaattctttatttttttttttcaaaattaataaaaaaaagatatttattaaaaatttaataaaatttaaaaaaaaaacaattcttatttttattattaaataaatattattttaatttaatgaggctctacatttaccaccaccatatatatctccccttcaatctcaaaaagatttcatttttctcacacttttctttctctctttctatctaagaagagaattttctttgaagccaaacaccctaaaccaaaaaaaaaaaaaaaaatggcagctgatgtgagctctcttgttagagttatgagtggttataataataaggatgatcaacatgggtcgtcgatgagtactgattctgataaatcaacggctctaatcactcgagacctacttggtggtgggtcttcttcttcttcttccttttcctcttccaaaattgtaagcgatacccaagagcttgacctagatttacaggtccctaatggctgggaaaagcgtttagacttaaaggtttgttaattttctcatctgggtctgtttgtttctcgagaaaaatcatttctttacactcatttcatcctaattttgtaaaatcaaactgttgattttgttgatattttctgggttagcttgttactaattagtgatcttgataattaattttgttttataattaacatggattaaagtctcaaatttttttgtctttattgctttagatttcatttttttttaatttaaaataaaaattaattaatttagtatttatatatttatatatacatgtgtgtgaagctttttcattttgtcccctgaattttctctgcagccaaacaaagtctattttatttattaagaatacttttcagctttcacatgaggatgacccaataaactgatttttcacattaattaatatatgcatataataaaattattgctatatttattcttgtaataataattttctattataacaattaaaacagtatttaatgacattagggaagcgtgtaaacattactaatttaatgataaaatctttaaagctctgtgactttctaatcccatagtacattctttaaagtttgtcaccaccatgattagttttttctttatttatttaaattttaaattaataattattgcatactttactacacattatttcatgctataatttattaattaattaattaattttattattattatattttgcagtcaggaaaagtctacttacaaagatgtcatagtaataatcatcatcatcatcatcataagcaccaaattaccaatacaacagttccaaagcttcaagatttgaattttccaatttcatcatcattatcattatcaacaacaacatcaacaaaaacattaccattgaacctttttgatgacactaatttagaattgaaattagtgtcatcatcatcattatcatcaaataaaaataacatttcaacctcaacaacctcaccaagttaccaaagtgtttgtactcttgacaaagtaaaatcagccctagaaagggccgaaaaggagccaacgaaaaggcgatcatcgtcgtcgttgtggaaatcgtcttcgccttcttactcgtcgtcctcttcgtcgatcaaagaaggtattgaagaagacaacatcaacaacaacaacaacaatgatgacatcaacaacaataacaacaataacaacaaggttttctcatcatcatttgcagctggttgtcctggttgtttaacttatgttttgataatgaaaaacaaccctaaatgtccaaggtgcaactctgttattcctttgcccttaatgaaaaaacctaggattgatctcaacatggcaatttgatcaatagggctttggttattttattttatgcttttgataaaaattttgtatatgatagaatcaaaactagatgtttctcttaagaaaaaccaagaaaaaaaaatagattggttagtcatagaatggtatatgtacattttttttctttcttaattataaaacaaaagggttttattatgttttttccatatggtaattttatggtatttgtgttaattttttgaaatttaaatcactactcaatagtttgaatttggttttctaaaaattgaaactttaggttaaaggtacaatgtgtttttttggtgacaaattaaatgtatattggcaccttatttatagtatgggaaaaaagttctatttttgatcattatatcaaaacagagctttaaattgcttttattacattatttaaacagagcttttcttaggtaaaaaaaaattctattcaagtatatattgacattaaaaagggaaaaaaaaaactttgttgaatgtgaaagggttttattccaatactccatttaagaagtttaatttcattaatgataggtattaaattcttatgaaaattttcatatgctgtatatgagtactaatttccctaagatattttatttatttttgtttgtaattattttaatttctcctttcccattttggtatggtgttggcaactactcatcatttaattcaaatattttatgggtttttattttttatttttcttaatgatgaataatagtaaactttggggttccctttggtatttttcatacataaaattacatttttatacttgtaaacattatatagacaaaaagaacttaaaaaataacatgggacaaggtaccatttaattttattttactattaaaaaaaattacaatattatccaaaatatatttatatataattatataaactttttaaaaatttcacacatataccatattatgtttgagaaatacttagtaacttcctgcattttaatttgatattatgaaattaagtattgagtttcatataatataatttaatgtaataatttttagagaatatatcgttaagcaattacaaggtgacacgtctagaaaatattagataatactggtgcccaataataatactttatgtgttaataacactattaattcaactaaatatcgggtctcttatagtttaatgtaataacttttagggaatattattgaccaatcacaagacaacatgtttagaagtgctagacaccactgatacccaataagttttctataatattaaaaggaaaaatgcatttaataataataaaaaaaatactatcaatccttaaaaaaaatggggttaggtaaaacaaataatgtaagatatgcattaaatataagcatcctcctccttgttatatgtgattattctactgatcatatacatatataacatctgcagatcctgaaccccacaaatatatataaatatatatataaaataaataaaaagagccatgcaaaataagtaatatttattatcattattattattatatgcatagtgttttaattgataacatatatatctaagtttgtatacttcttctatgtcacatggtagggtatatagtagattttggacatgtccatagaactttaattatatacttattattttttattattttttggtatatatatatggataattattaataaaataaatatatagtgatgtccaaaaaaaatatggttgtgtcctataaatgtttgaaaagatcattcaactacactttgtcaaaattgatgtgcttaatggttgctgcatggagctaattatggccatttactagaccaattcattaatatacctaacacacattaaatgatatatttaattttatcatagtctttaaagttttgtttacctaccttcctactattttatttatttatttctatcattttaatgctattttttttttaatttcatttctttgactagcttgtatatatatagtcctttttaaattaattaattaatctacagaattattttttattctctctcatttttctatgccctaattaattatcttgaattatataaaaattattattattattagggtaaatatcattttggacattctgttttacaaaaattaccaattggaccctgtgttttgtt

SEQ ID NO: 111936 - DNA, 1638 bp, Cannabis sativa
aaagctaatccattaagtgagtggggtggaattacttggctgtatttttttttttttttattttgacgtagctattctattatttaaatatatattaaatttataaatactatactttttcatttcaaaataaataaataaatactatacttttctttatatatagagagaaactttgaaacacaagtttattaattggctcattttttaatgcttatacggaaataaaattttgtgaaagagaatagtggagaacagatagggcaaaaaaggatgtgctccttatgtatacataaaaacaatgtgatacaagtttttgttgaagataataatgtaattgcgaatattttatttttatcaattacatttaaataccatctattctagtaaagatatgagcaagataagatgattcaagcttttcttgatttctgtcagtctttaattatttggtactagggagtctactagaacaaaagatgggttgttgtctcggccggagatacatgctaccatctgattaagactattctgaatataatgttaagcatgcgcttttctcaatttcagatagtagtgctttttttcaagacacttggaaaataactaggaaggatttcttttttaaactctaggaagatgctgaaggaaatcaatgctacctctgttacattcattccaaaaattgtttgtccaaagtcggtttatgattatagatcaactgcttgttgcaatgtggtctataaagtggttactaaaatgatttgcaacatgctgagagatgtgcttccagatgttattttagaaagtcagagtgactttatcaaaggcaggcaaattgttcacaacataataatttgtcaagatatggttagaggttatgataggaaaactggaaaatcaacatgtctttttaaaattaatttgcagaaggcatatgatatagtggattgggaattttttgaagaaattcttgaagctcccaacttcccaaaaaaatttatggagctttttatgatttgtctctactcctcgcttttctttatggtgaatggatcacttcatggttatcttcactcaaagagagaggactccgtcaaggaaacctaatgtcacctcttcactttgtgatcggaatggagtacttattcagaattatggctagtgttaggggaattagttaggactgttacattgagtttgttaaatcagttagttaatactgttgcactctaactgatttttgttagtttctaacttcttctccttcattgtaatcgttggctatataatgccaacacttatgctcattcaataagattgctctttgtctcaatcttccctttctttatctttctctctctttcttcaatcttctcttcgtctctgtttttctctgctttctggtcattagtgtttgcttaagtgttcatcaatggcgaagagattcaacatggtatcagagctctttccccctctctctgctaacatggcgaatgttggagctgctaccaacaacattcagaacagtttgaatcccaacagatctggttcacaacctaacggagcttccaatctcagtcaatcaagaaacaactccgatggcttcaatccggtatactttaatcacaatatgtc

SEQ ID NO: 111937 - DNA, 7550 bp, Cannabis sativa
  modified_base (7488)..(7504): a, c, t, g, unknown or other
actaattgcataattttgtgttaaaagttttaattttccgaaattagtttaaattttcaattcaccccccctcttggaaacatatcttgggctaacacaaggcacgtgtagggaaagtcatggcaactaagttacttatgctgccattgaaagtgaagaccctagagatcatgacattgtgttaagacctcttgtgttttgcatcaccaagcaccatgtagagctaattaaggattagtactctttacccaaaattgttgttaggaaatccaaaattgagtgtcccagtggttcttgaaattcttgttgtagtgattggttgagattttacatgaatggaggtacattgtttcccttacacctgtggtttgtgtcaattacttataatttcagagtctacccttatcagctgaatctaaacgattacaaaaatttatcaacatttttcatcatgagtctacccaactcatcatgaaattaattttttgtgtgatatggaaaggagtgttattcataaggaggaaggcttgtgtcgtcttcaatattttagtgtgtatatcgataacatcactaaaagcaactacgacatttaccataaagagtatttttatactcccatcattcctttaaggcatgtcacctttcaaaaggctggacctttcaaaagaccaacttctctgattgacatgaaatggagagtggatgctatgttgattgaaattaacttatgggagagagatgggaagatgttttcagtgatgacaaccttcatcgcgttggctgatagcaatgactcttggacaatgccccttgaagacgaagagagtgggcatagtggtactgtcattgggtttgaagaaatgtcagaagttgaagatttttctcataatgacccagattattcaaggagaatatctgtgtcccttgaccaaaatggtgatcgagatgaagttgaattagaacctttgggtcacactaaagcttgtgcacccgagaaagttagggaatcggcatgttgttgatgcgccaatcatcgatgtgatgcttaacttgattgtttccctttctatccatatttctctcatgtaataaccactcgttcttttgtttagtagataagatgagttttcttattgtcatgggaacttgctccaaaagaaagaagcttgcaaccaaggttgcgaaacttttgttcgagaagttgtgcaagccatctcgtcgcttactctattcctttgaagaaatttaagaagagaaacaaagttgttgtggctgaagcatcttctttggctagggcctaacataaaaggaaggagaaggttattgaaattaaggacgagcctcctgcttccccaatgggtttccctagaagaaattgatgtggtcgggccaatctcctatgagttagagctcttggccagtctgggtgtgcaaggcacaatgttgttggcacctagggaagctctgattacttccaaggcgaatagcaaacctttagggaagctgttgtctactgaacctccacatgttattgccgagaagagattctatgacatcttcagggtgagtatcttttcttgaattcacctttctttttaaagaaatcttttgactttgttttgccacttgtaggcttgcttggggtttgcttatgctatggaaaacgagcataagaaagttctcgaattcgcagattgtgttcatctgccaagaaaagagcttctgatgcagagaacaaggttactggcttggagaacatggtcagtgaacttaagactaacgtctttgatcttttaggtgttgcacacaatgcaaaggactgagaagagagcttgctataagagcttgcggattcaagaaaaactttcaaagtagaagagtccctttacaagtcccttaacgaaaagacattgagtgctgctgaactagaaggtcaagttcatcacctcgagggagaagtggcgaccctagaacaaaggtagctgcaaatattgcccttttcgatggctacttctttgatgttgtttacaactcttcgtcagctaatagaggagctactagcttgaacagggaagccttccgagagaacaaggtcgagttcctctcgagctagtgtgagtagagtgcaagtgaggaagctctttgcgacatcaatttttacttgaatggcgatcctcaaaatgtcagggatgttgcaagggttgaaggatacaaccttgatcacccagaattttctatactcgaagattcatcaggagaaaaatgcagcgaaatcaaggagctattgaagaattagatgatcaagacgttgtcttaatcttttttttttagcatttagttttagtgtgttagtttgtcgcctcgacgaccattttagtgtggatatgccttagtaaaaactttatcagaatttgtttcaatttaattagaaattaatccaattcaattagactttatttcaatagttttttttaatttatctgaaactacatgacctcaacacttgcacaccatttaatgttttaagaaactcaatcactgggagtaactttaacatttctttaatgcccatgtaaacatactatggtgtacatgccccccaagtgatcaaagaagtgtcttgagaaattgttatatgttgagcccttattaacttaaccagagtttcgtaggttggaaatgtttaactcattaaaaaaataaccgaagttacctcaagtccaactctacaagctttacttaacgtttgagagcgtcatcaggtctatgagttgtaactgattgatagcaatgaagtataaaaaaatattgttcaacgtttttattcatccgaaattaaatacaattacatattcatagctaatttaataaaaaggaaacaacatttgtaaatttgtatttttatcataaatagctgagttgatccccagtacactgatgccctattcgacaaataatgtaagggccataacttggtgatggacctcttgacttatagatgaattcgcggaaagaggtgatcgattcacttgcatgtgataaaatgaatatctctatgaactgaactgttttgaaaataactcttttattggtcatatcgtcttagatgttttctgtttcaataccttggtacaggtactgaattcaagtagcagtcatagcgagccaacttgtacgtctcgggttgaagcgcttctgtgatgacatatggtccttcccaagaagggctgactacttctagtgccgagtcttttgtatttaggaatacccattgtaacatcatgtatctaggcataaattttctatctttaaccttcgagctgtagtgttgggaaaccttttgttgatatgcagccttgcagagcttaaatgtctctttaatttcctcaattctgtccaaagactaagccaataattagtaactggcatgttgatcataagtgagtcttcggtgtgatgggggtgtgagttctatgggtattattgattcatattcgtaggttaaatggctagatgcttttttttacatggtgtagtaagaccacaacacctcgggtaattcttcgagccagtttcctttagcttgctctaagcactttttaagtgtatctttaagagtttggtttacaacttcgacctgcccactggattgtggatgagctactgctgaaaaactcttaacgatttcgtgcctttcacagaagtcaataaataggtcgatgttaaactgttttttgttgtttgacactatattttgtggaagtctgtggcgacaaatgatattcttgactatgaagtcaagaaatttgtttgatgtaatagtaaataagggctctgcttcagcctatttggtgaagtaatccacaaccactaccccttattggactctacccattcccttaggcagtgagtctatgagatcgattcttaagaccgcaaatggtcagggagtttgcatgctcttaagctcatttgggataactctaggtatcttggagacctctggcacttgtcgcatcttttaacatagtctgaatcttcgatcattgtctgccaaaagtacctttgcctcaatatcttttttcagaggcttttgtcccccagtatggtttccataaaaccctcatgtacctttaccatgagtagcttggcttcttctttcatgacacaccttagaagaggcattgagtagaatcttctatacaatactcattccatgatgaaaaagcaagctacttttctcatcagtttcttagcttcgtttgggtctgttggaagaataacttgttctaagtactaagcaattggggtcatccatgattggatagttttcggtcatgagaatagactctaaatcttcactgatgcttggttgagtgagttattcgacgggaactacgcttagagcatcgaagtttgttatgctaggtaatttagctaggctaataaatctttagctttgctcaagcatgctatcatcttaagtccccgagcttggtattcgcccaggatttaatttacaataagctaagagtcattgtaattccctagtgattgagttttgatggccaacgccaattgaagtcccgctacgattgcctcataccctgcctcattttttgttgcgataaatgcaaactgtagtgcacagtgagcgcgaaatccatcaagaattttgaggatgagccctgcaccaaagtcattctcgttggaggatccatctacataaagcttccaagaaggtacataatcttcctgagctgcagtctcaggcatgtagttctgatcttaatagatcatgggttcatcttcttcgaggccaatgcattcagcgatgaaatcaactaatgtttgacctttttgttgtgtgaggattataggcgatttcaaaatgaccaagctctactactcatttgagtagacatactaatgtttcttgattggacgccgaaagcatacttaaagggattaagcttcatcctgtaagctcatgggatgttgaaccattcctctaaattgttgatgtggttcttaggtttccttgatttaaccaacatgtcatacacatagacttttatattattcctcattaggccgtggaacatacggttgactagtctttgatacacagcacaagcattcttaagtcttaagggcattacctcatagcaatatagtttgatttctgtttggaagctagtgtgctcttcatcaggtgcatacatgttaatttggttatatccggagtaagcatccataaatgtgaggagttcatgaattgctattgcgtccaccaattgatcaatttggggaagtagaacacaatgtttaaggcaagtcttgctaaggtcagtgaagtcaacacacactttccagtttccattcagtttgggcaccagaacagcgttggatacccagaccgggtaaaatgcttctctaatgaaattattttcttgtaacctttcaacttcttccttaagagctttggagcgctctttgttaaagagcctacgtttctattgtacaggcttgaagttctctttgtcaatgtttagagcataactaacaaccttggggtcgatcccaatcatgtcctcatgcgaccaaacaattttttttttaatttttcctgaggcaagccataagatatgcacttaattcatatctcaagtttgtaggtccgttgttgtaaagagaatttccttgagttcctcggtcggaccaactcccgagtcaatatccccaaaatgaggatcaatatcgtccccgtctaaggcacaccttcaaatagaattgggtgcggtctttgttgtctccttggttgcaaccttggaggtcttcattgtctctctggtcgtgggggaaaaggcctttgtcatccctcagttgttagaacaactgaagaggtcttctttgcgagtgtcaatgatatgttgtagcactcgcgggcaaatctttggtgatcgaggaggcgactgatgccagatattgttaaaaatttgacagacaaatggtagatggataagatagctcggaggtcatatagtgttggccttccaatcatcatgttgtatggatatttggtgttggccactatggaagttgccataatagtgtttttcctcgggttggtgtcgacagttagtggtaatttgatcttacaatagggagcaatttcatctccactgaaaccatacatgagttggggcatggttctaggtcttttaaagacaaacccattctctccaaggtttgcttaaaaaggatgtttgacgatactccgtcgtcaatcattactctagccaccatcatgttggctatttaaacttcaacaacaagagaatagttgtgaggatagaggatgtggtctgagtcagatttgtagaatatgattggatgacacccaaagcgtaaaaatttaagaggtctctctgcttcctcaaaaattttcgatcttgcctcatgttgtagagatttagcatacctctctagtgctcttctcgagttacctgcaagatgcggacctccaactaccacactgagtctgcttgccactgatgtaggctggagagaaatgttgcctcatgtaggcgcctctagccttacatgaatagaataagtggtgaatctaggctcgtacgccttgtcggacatgtctctagttctagctgttttttttttttttgctagagaaagcctatttactgtcgttaaacgaccttttaccccaaattttcctcctttcccactttccctgtacgcctcaatgtcaagggtaggggagtctcgcgatttcttcttcttgttttttgagttttcaacttaagaaacaactttctcaaatttgacaaagccatctgatttataaagaaagttgttcaaatgtagacttctttaacgaaagtctgaccatatggaactcatctccttgagtctgactgttagtgtcataacccttgcgtcctcgctaagtatttttgtcttagcagctgcctctaagaaatattggatgtagtctttgaggggttcatcatcttgttgtttcacatcaacctggccatttggttcgatttgacattgtcaagatggaacgaatcaactgtcaaaggtatccacaagatctttccatgaatctataaatgtagggataggcttgaggtaccatcgctgaactaagtttgtcaatgtggcagggaagattttacaccaaacctcactaagcttagcatacgttcatcattgaaccccatagtcataagtaaaacttttagtgatacagttatccaataataattaagagaaaactaaactcaaaaaaagtacccataaaaactaaaataataattaaaaaaaatcaaaaatcaaaaacataattttttcccccaaacgtaaaatagatagtgtttctacagtgcaataagaacaaaggaaagaaaacaaaccaaaatagctaagactaagggtctataattgtaacaccctaactannnnnnnnnnnnnnnnngatttttaaacatgctgtgcagcttgttgctaatcaacgaggttta

SEQ ID NO: 111938 - DNA, 10193 bp, Cannabis sativa
aaaaggtaaagaggtaaggagaatgaagaaaattcaatccgatcgaatacaattttgacgtccgctagacaaactcacactcagtctttctctctcttctttctctctcctctttcctttctatctgtgaatacagcgaggtacagggccgtgtgtttgtgtgtacttctactcccatggaagaaaaaagagagaagaagacatatacagctgacaaaccctaataaagagtttaaactacttcaacaacaaagaagaattaagaagaagaagaataagagtaagaagttgagctctttggtttggtgtattcgttatttgagatttgaagcgtaacggaatgaaatccgagtttgggttttcttttttcgatcagtttggattggaatatctattttgttttagaacttttttttttcttagtctgggtgagttcatgatagtctgttatttgtttctattaccgttttggatcgttgatttgggtatatgaacggtccgatcgaaaaggtattaatgtgtgcttttcacatttttttttctttctttcaatggctgtggttttgcttgtgtttgctctagtgtgataaagtttggatgttttattcttttttcattgtcactttcattttgtgttgaactggttattcggccttctgggagtgtaatttgggtacgacgttgtgaagtacgggtttatctttttttattgtacttgtataatttggttcaatttatttattgtgttttttgttttttgttttgagttttcaagatttgttttttggctttgaaatctgatttgatttgtgattttgttcagggttttggataatagaagtgaggtacgttataaattggaatcttaagataggccgattgttttgccttttgtgctcaatggttgaggtaacagtggatctggaacttagtgtattaaacagagattcacgcgacagccggaggaagattgtttgttttgcggagatagtgcaactctagaatgttcagaatcaaagattgttttctggttttggcttgttttggtgtctggcttatgttgtgtaaaactcagcacaatatgctctggcataaagctttaccatttctattggtgcacactaatgagtctgaagcctttggccttggattttgggttgaaatactatctgggatgaactctgttccctgttctgtgaaacttgttatgtaatcttagtttagtcaattcatgttttagataattagtctttacttggttcagtgtttgtatcttgttgttttgagaagcaatggtaccttccgggccgacccctcctattggtggtgcccagtctgttcctccttctcttttgagatccaattctggtatgttgggagctcaaggtggtccactacctggacagacagcttttccttcacttgtctcgcctcgaactcaatacaataatatgaatgtgcttggaaatgttcctaacgtttcttctttccttaatcaatcttttggtaatggggttccaaattctgggctttctggtcctggaagtggccagcgtggtggtattgatacagggtctgagtcagatccacttccttctgttggcaatggaatgaactttaatgctccttcatcaacttatgtatcaccaaatatggctaaccctggctcttctggtcaaggtcagggtcaatattctaatgcttctgctaaccagcttttatcggatcaacagcagtctcagcagcttgatcctcagagtttccaacatggccagccgccaatgcaacagttttctgctcctcacaatacacagcaacagcaacaacaatatcaggctatgcgaggaggcttagctggtggacaggtcaagttagaaccccaagtgaacgatcatggacaacagcagctgcaatcccaacaacaacagttgcatcccttgagaaatcttagtgcggtaaagatggaaccacagcaactacagagtatgagaagcttaccggcagtaaagttggaaccccagcattctgatcagtctttgtttatgcaccaacagcagcagcagcaacaacaccagcagcaacagcagcagcagcaacaacaacaacatcaacagcaacaacagttcctccacatgtcaaggcagtcctcgcaagctgctgcagctcagattaacctcttgcaccagcaaagattcttacaattacagcagcagcaacatttcttatcgactatgcctcagcatcagcaacggtctcaactacaacagcttcaacagcaaaatttgccattgagatctcctgctaaacctgcatatgaacctgggatgtgtgcaaggcgtttgacaagttatatgcatcagcaacaacaaaggcctgaagtacgatacactcaaattctttgtctttgtactatttactccagtatatattctgctgtttttatcatcatggctactttccatgcaggacaataatattgaattctggaggaaatttgtctctgatttctttgctccccatgcaaaaaagaaatggtgcgtttctatgtatggaagtggtcggcaaacaactggtgtttttccacaggtatgctgcagccatactacatttttacattttattgccaatgataggctcactcgaactgtggctatctcttttcttggcgtttaaatgcatgtgcacttgaaagatttacatacaaatttaaaacaaaagaataaaacagtataccaacttgtggatatcatttttacttgtctcacgcttattgttgctcgctagtaatttcccggctggtgctcaaaagaaaaaaaaattgtagctcagttgtaacttaaattttactttctacatttgcaggatgtatggcattgtgaaatatgcaatcgaaagcctggccgtgggttcggtacgtaatgctttatacattttagaattttagtgcttattgcctagttttatggtcgtagtgctttattttttttttattcatttttcaatactgcagtgttaacactatgtattcagtatgttcgcataaagtattttttttgtctttgggataactgatatatgcttggtaactgataattttatgcttaatgtactttcagaagcgacagtagaggttctcccccggcttttcaaaataaagtatgaaagtggtactttggaggaacttttgtacattgatatgccccgtgagtaccacaattcttcaggccagattgtcttagactatgcaaaggcaatacaagaaagtgtttttgagcaacttcgtgttgttcgtgatggccaactacgaatagttttctctcctgacctcaaggttgtgcttagcaagattgttttcacatatcctatggcttcaattctttcaaggcattacttatgtatgttcattctttataccagatatgctcttgggaattttgtgcaagacgtcatgaagagctaatccctcggagattgttggtacctcaggtaatttgattgactatatagtttggctttgtagagtacctgtacataaatgggtgatctgagtatgttttaattggtaacaagacgacacgtaatggtcaggatgagtaatgagaatgacagggaactttaaatggggctttagttgatttaattgcaagtgttttggattgcaatgaaaaatgtatttaatttctagaatgtccgtataacataatatatatgtactttttgctaaagaaatttagtgaatagtgttcaagattatgatttcattctacatattgtattattttggaaagtttgtcaaaattaaaacaagttttcacagtttttagtgctttgtaagtttgtcatggctttcaacgtcttaacttagcctgatggggtgtttggatgaagtgctataagagttttttgatattttgatgaactcccaatctaagttacgttactaaagaattacttgttatggaagttgtagtgatggtaaggggtttccatgcaaatgatcttttttagtttctcacgtcttttgtattttatgaaaacaaaagtgaatttccaactgtaatgtaatctgttgattcaaattttgacattttttcgtataagaactcaaacttcattgacgggtttggtttatttttctctcaaaatacactttctgaacgtgattttaaaagttattgctaatttccattctatatctggaagcagtgtaagatttttttttcctaaataattttgtgatgttttaatatttagcgtgttgcatttatgattattttattaattaaagtacttgccgaaaacatgagtaaataagtgcttacttttggacagatttttgaatctagaaagtgaagcatataacataatgtggactgttactgaatctgagtatattatttttccttgtacttgaggtgctctgtaaattacaatattattaataaaattgtatatattggcaactatttggtcctttacaaaaatctagaattgaaatatattagaatttggatttctgaattctgttttgttcataatgattatagtcggtaattattttgattcgcacttagatctggatttccttgtagttctttttggcttttaaatgtggatgaacatgaatcatatggctctttttgctctaatgttagtccagtagtggtggtcaatttgatgtatccatttaataataagaatgcttctgccattgagtgtatgctagtatattatgcatatctaatgttctttttaatgtacaggttagtcagctcggtgctgcagctcaaaaataccaaactgctactcaaaatgcttcttcgaatctatcacttccagagatgcaaaataactgtaatatgtaggtttccgtgctgtgacccatttaataaatgtatttattttttcatcaatgttaaatttttgcagtttatgagtaagttcagacatttctaattaggcctagtattataaggctaaagttctttatagaagcatgcatgtgtaatggttttcccatttattatttttgaagcacctccctttggtatatactatatagattaattctgtattaaaattatttattttgtcatttaggtgttaatgtgaagtaattctggctttctttttcttcaatctctgtttgtatgattttcatactaataataaggatcaaatatttgtataggttatggttgtcaatttgttgactcctatttattataacttttaatggtttgacttgacttcaaatgtcctgactggatttaaatggggctattgtatgctaggtttgtggcgtcagctcgccaattggcgaaaactttggaggtgccattggtgaatgatttaggctatacaaagagatatgtacgctgcttgcaggtagttttttcttctttaaaggaaaatgtgtcattattcagtttttgtttatgaatgacattgatttaattaattgtgggtgtgtttcggggatctgctagttttttgtgagatatcattttgatgttatcaacatagtggcaaaagtttcactttcaccgttatgtgtcatcttcctatcgctgtgatattttaaatagtttcttatcacatctaatatttccaaatcggtttacggttctaatacttgtcaatgcatattgagaagactaagaaatgttgatcaggttcaactctaagacaactttcacattagtagctttttgaatactgtttatatatttttgttttcatttttgctcccttttaaattctaattacattattgcctttcagatttcggaagtggttaatagtatgaaagatttgattgattacagtcgagaaacagggacaggacctatgggtaagcttaatgtagtttatcctatatagttgtaacttttgttttaattatccgtgttttatttttttccatgtgcataataacttaaagttgaaatctactttcgatccatttactcttttaggctatgtttggaagttggattgtggtgagggaaaaaaattaaaaaaagtgtggagaataaaaaaaaaaaatcaatttttcatatttggtatgaaatttgttgttgaagcaagtttttttccgtacatattttctttccataccaaacatgagaattttatttttttaaattcttttatgtgccactttttttccctgtaatttccttactaccaaaatccaactttaatgtataaatcaatcaaagaatttggttgcagattagaaactttagcattttatgttgccatttgccttccacatttctttttttgatttgatattacccaatatatatattagaaactgtaagcaatgaaattgcttgggaatttgagtcagaaaatgtgtagtgcatagtcgacagataagttctaaataaattgctactgccaactctgttacacttgaatgcttatattagtttacaagtgaagttacagtaacggttaagcttcaggggacataagaacaagtgatttagtatataatttgttagctatctaacatgagtgactctcctccacataatttaataaataaataaacaataaaataaataaaagttcatgcaggctttaacatttgggttggacattaaattggacatatgatagtattatatcaacgtcttttggcaagttgagccatccaaggttgttcgtttattggattagatattttatgacaatgtagagtgagttttattcttgattgcatgcagttttatatttgctgcttatctttatttattttttcagagagtttgaacaagtttcctagaaggactagtacgtcatctggggttcacagtcaagcacaacaatctgatgaacagcttcaacagcagcaacaacagcaacagcagcaacaacagcagcagcagcagcagcaagcaatgtcccataattcaaacggtgatcaaaacactgttcaaggtactatgcaacttgctgcaagcaacggtgtggctagtgtaagtaatgctatgaatacagcttccacatcttcctctccaagtacaattgttgggctgcttcaccaaaattccatgaactcgagacagcaaagttctttgaataatgcaagcagtccttatggaggtagttcagtgcagattccatcacccagttcttctagtacgatcccacagccacaacctaatccttcaccatttcagtcaccaacaccctcgtcgtctaacaatcctccacaacaaacatcacatggtgccttgtcagctggtaatcacatgaacaccgcaaattcacctggaaatatctccatgcaacagcctgctctttctggtgaggctgatccgagtgattcacagagttctgttcagaaaatcctacatgaaatgatgatgaataaccatcttaataatagcccgggaggtatggccagtgttggatcgatggggcatgatgtgaaaaatgtgaacggtatattaccaacgaataacaacacaggtataaataatagcaactgcctagtggggaacggcatggccaacgctaattcgggtatgggggttgcagggtttggaaatatgggtggtggacttggtcagtctgccatggttaacggaatccgagctcaaatgggaaataattccatggcaaacggaagggtaggaatgccgtccttaggtcgagatcagatcatgcatcatcaacagcaagatttgggaaaccagctgcttagtgggctaggagctgttaatgggtataataatcttcaatttgattggaagccatccccttgaaaaaaagctcaatgtgaacgccattgacattgtggtcgttgattatggctgcatgtgcagcctgagcaaaatgacagaattgcccctgggtgggtggtggccctgtggagacatagatgatcaaaaacaagagctgctgatatatatttaacagggctgctctcccactttgtactaatctcaaatttatatataagaaaaggaaaatctggtggctggtttgtgttgctgagggctaatttttcttgtgttttttttttggtacttctatatattcttttccttttttttcttttttaaatcttaatatattacagtaatagattttgcaccttccacagtctctttgtttttccttgtgttagcggattgggcagagcatatgattgaccaaaatagtatattactatattctagcaaaacaagctctgtttttcttttgtagcttcctaaatattgctctaattccaaatttaaaatatatatttatttatgaatatatatatttatatagttgacccaacattgctaagaggtacatgtttgtcttattatactcattatctatatgtatatattttgaagagttgatcagaatttagttttggagtttgatcaaacatcacaatgcaaagtgattgcgtgtaattataaaagaatcgaataaagaataaagctaacaattttaccacttgtctcacttttaatataacaattgacatgaaagattttctttattgtgaggaactgatataaaagaattggttaccaaaaaaataataataataaataaataaaagaaactgaagcataaaatgtcatttgccaaatcaaaatagttttgagaaattaaatagtactaataactttaaattaaatagttttgggagaaaatctgtctttctaaagccgaaggaatggatttttaaatgtcagtaattggaacaaagcagccttgatgaaaaatatatggacactagctgtaaagaaagataatttatggatcaaatggattcatagtgtctatttgaagaatggagattgttggaaccacaaaacttccatccatagtagttggtattggaggaagcttgtggaaataaaagatgagataagaaaaaactgggattcaagtcaggttcatactttggagtataaaatttcagatggatacaagaagcttcagcaacctcaagaccgaattcactggtgtaatcaagtttggtctagacttaaccatcctaagcatagttttattctttggatggttgtgttggacagacttaagacaagagaaagactaaaaagaatgcatataacagaggtagatgactgttgtttttgcagcaatcaaacagagagtaaagaccatcttttctttcaatgcagcagagcaggcagcatactccaacaagtgaaagaatggatcagttggaagacccctgcatcagacctgactgctttcatctgaagcattagcaggtccaagagaagcaagttccagcagcaagtcctttcggctgtcattgctggtttggtatattttatatggctgcaacgaaatgaagttttatggcagcagaacccgaaaactctacacattcaagaacttaaatggcaaatcaaaacaagaatttcttgtgtattatcaaagaaaatcaaacaagaagataggatgtggtttgatagtttgtaaacattgtttgtatagatattttgcatcctttcataagaatgcttagattgtaaaaagaagtttgtgcaatgaaatttttgattcataaaaaaaaaaaaaatactttaactttgacatttcaccttaaacaattgtcaatcacggaaaacttccggcagtgtctatattattaaaaatttaattacaacatttcacttttttgtttatttacatctaaccttcattttttataccatgtatatataccatatataacttttctattttttttttacattattaaaatattatttctttaaatgtattattaattgaaataagagaaatgagataaaagaaaatagtaataaatgttgtaaaatattgtataatatatatttatagatggctataataatgaagaatcaatcatttaaccaaagatgaaaattatcattaatgtttaattgtattttcatttattaaattgatttagtttcttattcttttagtctcattcttgtataaaggagttcaccttattaaaaaaaaaagaacttagagaaaaatctcattcattcgctcattctatttgtcttctctcttctcttatttcttactctattctatattattttatagggaaaaaaacagaaaaataaaaaaaggaaaaaaaaattacaaaaatactatgggccggcccattaaacatttatacagtccacatacaaata

SEQ ID NO: 111939 - DNA, 7280 bp, Cannabis sativa
aacaatcttaatagttcagagagaatttttaacggccaaaaaaatttagagggcatgattttgtacatgtcaaagttcggagagaaaaattgctaattgaccattaaaataagttaaaatcaataaaaattaaagtaatttgtagctaaaccctccaatgtctcaattcacttgcaattatctaaactcaaattttagtagtaaaactctccaaactactaaactattaacaaatttaaggtgacatccatttactacagtcaagtgtcaacatggactgcttatgtgtacaatcttgtacacatgacacattgatagtggtacacatcatattattattatttaaaaattataaaaatttattttaaaattaaaaaaataatttaaagttagaaaattaataaaataaataaattatttttattttctcttattttattctttcattgttaatgactctctctcctcccatgctctcttccttcaccatcaccattgtcaccaccccaccaccatcaccattacaacactaccatccacaaccaacacaatcacaacctttgcaataacaatcacttctaatcaacactaaaacaccatgacaaagtcaaacctagatttgaaaaaaaagtagtcgaaccagagttaattgcaccaccattccagatttagcctcatcttccaaaacctagaatatcacccttcctcatggacgactaaggcaaatagaggtgtcaatggtggtgtttttcacttcgtagttaacagacagtggtcaacaagtctgatgaagtttgcaagctgtcgagatttgcatgtgctcttgtcgtggttgttcgaagagcccaatgacgacaataaacaattaacatcccgatctcgatctcgaccatgccaccgttatgaacacttttagactcgacaatctccgtctaaaatctagatctgatcggcgaaagtatgaatgtgatggaaatatatttagatttgagatcctcaactattcgacgtcaacctccttaatcttcttctcgacgatcttggaaatgagcttagccttgactacgaatggttgattctcgagcaaagagatcgagctacacagatctgggttttgtccccaccgtcgtcgcctgcattccacctcccatgcttcaaacaaaagcacatgtagaagaagaagaacatattcaaatctagttttttttttcactctttcttttttatgggtgtacttaacgaaaaataagatacttttttttcttttagtttttctttttgtttttttttaatcaagagttatgattgatgaacaactgaaaataaaagaaagaataaaagaaaaaataattttatttttattttaatttaatttttttaataatgaaaaattattatttttgaactttaaaataaattttgaaacactcttttataaattttaaataatacgattaggtgtatcaatatgaatgtgtcacgtgtacaagagtgtacatatataagcaatctatgttggcatcaaactgtggtaaatggacgataccttaaatgcactaacagttcagtagttcggaagattttaccgctaaaatttgacctatgagggttaaatgcaagtaaaatgatagttgagagggtttagccaccaaagattctaaaaattaataattttttaacgctttacaaaaaaataaaaataaaaataattttttcttctctttccccattacatcatcttcttctttttatcttaatacagagaccccacctcactaagagcatctccaatgggagacaatacctattatttatcgagatttttgaaaatcaatataacagagcttaagaaagatataaaatagtaaataatagacaagtaattttcacgtggttcgagcgttaataattcctagtctacgagtctattgtattagccttacaggcgagtgtttgaatattacaagtgtttacaatgtaaatcctagctctatattccagctgtttctcttgaagaagaagaaagctagtaggaattttagcagaagttcggtaagtatgaaattgttcacctcttgtacataaaaaatgagggtattcataggcttacatgtggttaagagcatcccttttacccacctagggcttcgtactactgcttgttgcaagggtaaaagaatacaactggaaatctgaccgtccggcaatgaagaaacttcttgatcgtgtggtgcgcagagttagtggctaataccatttggataaaagacacgtgttgcgcaaaggtttctcctttgcagaatactctctagataggccgttgagcaaaaggcatgtccagaggtgcgtacacgcactacaatggtttgacatggaggacaagatctaatcctgtgtcagaaaaagatgtaaccatctgtaggtcgatttccatatggagctgacgtggccattcaccttcagataacgattacggtctgcggccagtccgtagaagtcttcacccagaagtcatttacttaagtcgtgttctaggacttcttagagctggggacgaatatggttcttttgcgtcccaaagacactgcttaaactggggatggctctccccatcaaatatccataaatctcctcccggatgaccaagatacctctgcgaggaaatttggtagttaactctactaatccgggaggttgacaaatcttcttttctaatcatgccatgtgtctcttgtcggaaaacacaaataacatttacaccctaagctttcgggactttttgagttctgggaacttgcaacctttctctagaactgactattgacacgtgctaactattagagtcgtggacgcatctttttggtgagttgtaattgtttagggcaaatggaacgttaaagcctgctaacgtggaaattatgtggtacattagatgccctggttaattcattacgcgtgtgttggggcgtgtctgtcaaaaaaagatgaaactaacggggggtgatttgaaatgactcgtctttatggcttgatggacccgaggaaaatcatgattaataaatgcttctgaccctttcaacttcccagccgttagatctaatgaaagatctggaccgttgattttgaaaaagtcgattgtcttcttgaagtataaattgacattgacggcgttctttttactttttccacaccacactttgaatttttcccttataaattttctctctcgtcgttcttattgcatgcaagaagagtgtgatagcttgattcagcgattgatcaaactccatgcgaagctttttccagacactgagtccctgcaaatcgaccaaccccttgccagatgaaggatttgatttttagaccagttgtgatcgccttattgactgggttcagagacttcaaacgagattctacgacagcaacccatctcctttccaatgaacacgtaagtacactaactcttggttgaacttttattatttcgtatctaggatagaaatttcttattcaagggagggctagaactgtttacatgttgaatagcgaagtaggatatgcgaaagaaacttcgcaattttaggaaaaatctgtatgagaatcgaattgtcgtaaaagtgaacaatgttgtctgggcatttatttctcatcataagaggtttcataagtgcctgtacgtttgtcgatttgggtacaagtctggaggtttttcttttacaagtcagttgcttcaaaaagcttggtttctctttgtttttgtgctggtagaaatggacctgaactaggatctccaattcggcgttgtgggaaccactgagaatgcacttgttattcttgtaagggaagcactagcgaaagaaacccaagctatggttcccattaaagtgcctcaacaagggacgactatggaaactgtcccagaggatggacctactgcggaggaacgacactccgcgaaggcaaaaggaaaaaagaaggctaagacacccccaattgcacatgtttttaatgactccatctgggagatggaccagaaagccaactatttccgctcctacggtatgttgacagcctatgctaatggtgatggtcttcgaaaccttcctgggttgatgtggcatagactgtctaccacaggagaatcaacttgcacaagtatagagggattcagtgcttggagttagtcccacgtctccaacggagcacatcttcccttaaggacctactttgcaagtctgatggccaatattgggatagctcctttccagttaatcccttcatcatatagactctgggtggtatgtcttttgtaagatgaataagttggatgtaccttccccgaaggagatcttttatttctacattgtaaaggctaatcccatgaaggcaaacaagaagaagttggggttcttcaggttggacaagcgtccagattcttactgcccattcagccacatggactatactcatgatctctgagaaaactagttcttctcctctgagttccctgtgaaaagggtgccttctcttcaactggacttccagctaccaggtattgttgccactcagccttgatttttcatttctaaaaaattctttgttttgatttatttgttgatgtctttaatttttaccaaaactcctttcccaaagcattaaaactatcaaaatagcccaaaaggaggcctagtacaaagctttttccgaggagcagttaaaagtcaaggatttggctaagactgaactactacgtaggtttggcttaatcgcaaagttttagaatattgaccctattaacctccggggacgtcaagctcccaaagaggtcaaggaaaacattgcaactgaaatagtcgttgctataactaaggcgaccaaagaagacaaactcctagagcctgattggctaatctgccatccaaatcctttatctgaggaggaggaggaaattgctgagagattcactaccgaaatagcccagaaggaggctcaatacagagctttttccgaagagctttttctgaggagcagttaaaagtcgaagatttggttaggactgaactacttcgtaggtctggcttaatcgtgaagtttcaaaatattgaccctgttaacctccggggacaacgtcaggctcccgaagaggtcaaggaagccattgcaactaacctaactgttgttataactgaggcgaccaaagaagacaaactcctggagcatgattggctaattcaccattcaaattctttatccgaggaggaggaaattattgagagatttgttgtagcgtagccggacatagggactccaagtgccaatactacaggaagaggtaatagacccttcttcatcttccgtatccctagcctttactgcatgtcttgggaggatcaaggggggatttgataaatactttttgagcttagaccgtcatagattattccatgaaagattatatagacagagtagaccaaattgttaggagccctagtaatccggaggcatcctcagacactgttagggtggatcctttaatgatcatgtcattgcctaactttagggaatatggcaacttccttgatcaaggagacataatttattttgctcgtggagaaccttatagcagctcactgaatggttgcactcacgcacaagtcttcttagtggatcttgttgctttacgattgtccttttatttgctttggtttggcttgtagcttctaattgcttatattgtagttatgtgtgtaaatactctagagtctaggatgttgaagtcgttgagtaataaaattgttgccaccttagccaaagctgtagacacccaagaaaatgggaagagtaagaccaaaactcgggcctccaggacccgaaagtcacgtcttccctcaacctcgtcattgttagatgttcgggacatcactcctcccactaaggtgagctctgtagctccgggctcttcagctcccgtcgaggtggagaaaactctcaccacttccaggaaggcgaccgaggtaccagttgctctgggggagcaaaccttgtgggggaatcctccggtgaagggagcgactttgagtatcccagagaatacgggcggttcagatgacaatctatactagcttacctttccaaggaaggatgcctccgcatgcttaagcacaaagggtccaccgcttccccgagccaaggtgccaaaaagtaaaaatcatcaacttcaactctaaacccaaccttatccaatccaccatctacaacaccgtcaccattgcaacaacagcaacaactacaacagcaacaacatcaacaacaacaaattccaccacaactacaacagcaacaacatcaacaaattccaccaccaccaccacaacaacaacaacaaattccaccaccccagcaactgcaaatagttccatcccagcttactccacttcaagcacaacagttactccatctgaatctagcagggcagcaacctcttaggcccacatccgctaacccatctcctagaccaggcacaaccttgggcaaaattccaccattgggcttttccttccccatgaggtcagccgtccttagccacaattttcttactaagacgtgcgagtttgctgccaacctaaagatatgtcatgaaaaggaacaagtaatccttcatagaagagctagtaggctatcctccgtgaagataggaggagatcgctgaagggattcgtcagccctcatcaccgggcctggtacttgacattttgacacggtttcgcctctaggatcatgttgagaatcatgaggttccatctcaaaatcaattagtaatgggaggagtaacccatttctcttatatatactattatctttccacacattaacaatgtgggactctcaaacatccccctcaagatggaggctattttatatgctcaccatcttggacaactcgatcataagcggctctttttggctcactatccccgaatcacaagtggcattttttgactttttggctcttggattaatttttttttttttttggatttttggtggcttttatttttagctctacttcgatcgattttttttgagtcggatagttgctagagatttttttttgctctcataccatgttagaatttgtgataaggtgaatggggttccatctcaaaaccaattgttcatgagtgaagtagcccatattcttatatatggctcaatactttaccatttattcaatgtgggacaatgtccacaatattccccctcaagatggtggctgtttt

SEQ ID NO: 111940 - DNA, 2306 bp, Cannabis sativa
  modified_base (1988)..(1988): a, c, t, g, unknown or other
gcttgtaaccatcaagaaccaacttaccaacttgattgattgtaactcatttcagcaaaagagatatacaatagcatatggatatagcttgtttactactccacagtcgagagtaaagtggtgtaaagaggtttgggcaaggctgaacacaccaaaacatagtgtcattctttggttagcaatgattactcgactgaaaactaaagagaggttgaaaaggtatggcatcttatcaaatgatcactgcagcttatgtggttctaatttggaaaatgagcagcacttattttttgaatgtgatttatcctcttactgcttggatgaaatcaagcaatggcttgactggaaggcttcgaacccaggtccctccctaagcctggttcggtggattggcagggcaaggctctcgaactttaaaaaaatggtgttgtctgctgccattgcagcagtagtttaccatgtttggcttgctagaaatggaatcatttggaatggaaacaaggtgaataaatgtcaaatggttgaagacatcaaaggaagcttaagaacccgaattagtatggtgattccaaagaaaatacaaagtatagatagagattggttttttgctttatattgatttgtaaagtgttggaatgatgtgagaaaagaattatagaaattgtataaattgtgaagcccttgtatattagcttgtaaatatgttttgagcaatacaaatatacgtacacattgatcaaataaaaaagatacacttacatataaagaaacttagagattgaaatatattatctatataaaacaaagttttttaatggcattatttcatatatgtaatgatttttcccatagttgtaagtttttttttttttttttaagaaaatgccatatttagtgcattaagtttttatgccatataagtcaaaacttttattatttttcccatatttttgtaaatagtccttttgcttttccctcattgtctgtgtaatgggcctgtgaatgggcagtgggtgagtggagcagtactaaagcccaattcaatgagaagagaacgtacgtgtgagcatgggagtcgtagtatgcatagagacgaaaacaacggtcgtctagtgatctgttaagtgctaagtatagctaaaaagttgaggaagatgatgatggccaagacaacccacgcccttcatgctctcatcgcctcgtgctttctcttccattattattgtctttatttgtcccccttcttttacgttctcatgctctctctctcttataatattaatagcagtgatatactgctcctactagtatagtttattctgatatatttgcattaagctaataataaaataatggattaccaaaaaaggttttacaaatataatagtaattacattaatgtaccattactattaccatttcttctttgtatattaatggggaataataataatattaataatccgtggtcgtttggtttagctgcttctttatccaacaacaacaacactaatagtagtaatgttttatcaaggacgatattcagctttggcgattcccttttggacgccggaaacaaccacttcaacaagaattgctcttctcaagctgatttccctccttacggctccactttcttccatcgccccaccggtagattcaccaatggtagaacggttgtcgatttcatttgtaagtgggtaacatcaatatatatatatatatatagttgtcatttatattattcaaaataataatatatggagtactaatagcagtacgtatacacatggtgctggtgcagcggaatatattgggattgatttgcagaaaccgttccttgaggcacagatggcagtttccaatgggacttggaaggcttatccctccaatggaatcaactttgccagcgctggcagcggtgttttgggggacacaggcagcatttttgtatgtcatcatcttcatttataatatatatatatatntatatatatatatatacatggtttcttataaacatcatatatctacattatagattctttaccatatacatatatatacataaataccaaataatgagggcaaaagggaagatagtctttcattaacatacataattttaggttgtgagatcaaatagcgtactttttatcattatatatctattttatataaattggggctatatacacgtaaagagtcagtatacatgtagttagttaaacctaaatataattaagggttttttcatttttacactttaaacaagtttttttttgcatttttatagaattctacat

SEQ ID NO: 111941 - DNA, 1743 bp, Cannabis sativa
gtagaaatatgcaaggattgctgataccacgcacaaaatatcgtgtgtcattttagtttttacaattttattttctgcagtatattttggatctaccaggttttgtttttgatagaatagatttcaattctattcgaacaattttataagaattctgcatcaattaaattatttgtaaatttcacttgataatattaaaaaatagaatttcaaaagtcgtcactaaatataaacatcaatgaggacataagctgtcactaatatatttcttttttgttttgtttaataccaacaatgtcgttattgatacccctataaatgataacattgtcctcactaaaattatatgttttaaaataaataaattttaattagatttcactttttttctttatttttataaaaattatttattataatggcctttgatttgtcttcttgatcggatgaacactttacccaatattataattttatactatgtagtattttactatattgagtttctttcaagtaatatgttagaatacttattttgtttaatatattttttttctcacaaaactgagtaagcaacattcatatatttgaaaagatgatgcaaaatgttttaataatttcactaaaggagaacattaaaatcatgttaacaatgaaactttaaaaataaataaataaaaaaaaaatactagaacgtgcatagaggaaataggttatagaagtggctccagagaagtaataattcgatctgtcgccaactttaaaccccaaccaaagcaaagtgatgactcaaaagggcatatgtgcgcgagtaggccagccaataaaaaaacacaaatctaagaagtcgcgtatggagatgttggtaacgtcacactaagtggagacgccttcaaccgcggattagagcaattataggacctcttctcgaagacgactattgagctgcctcgccgaacaacgagcgacactagcaataaagaataaagttagcgaaagagaaaaaaatagcaaagagagatgagtttccctaccattttcagttatgaagagtttaaagtgtgaaagagagagagaagatgaataatggagagaaggttaattaatagtgtgaaagataaatagtggagcctagggctattatgaaatgagatatcaacttatatatgtatacatctatatatatttattttagaacattgttgtaacgagtgcataattagatatgaaaattaacaaattattaattgattaaatagtgattttgttaatatatgcattagtagaaaataagttctattgtcaaaaataagcactagaaaaataatttttcgattacggagaattgtattgagttctaggcatgtcatgtatttatgaattttagcatctttatgtcttatgctcaacaatagtggaaatcgaccacttagccaataatgtcacttagatacagtaaatatatcggagttatgcatagtattggattatgacaattttacccttagttttagacataactacaagctaagtaaatggtatttttgtaatttgccaaattaagttatatttggataatccttaggggattttgtagtaattaaaggaataaactgatttattctaaatgttttaagagattgcaaaataaaattaactaaataaatcaatcactctctctctctctctcagccttgacctcactctctctctctctctctcagccttgacctcactctctct

SEQ ID NO: 111942 - DNA, 1920 bp, Cannabis sativa
ttgatttttaatttcttaaacaacgaaaataacaatacaattttttttttctaacaaaaatgtgtttgtaagtttttttttaattaaatgaagagagaaaaagtaaagttgtgtgaaaaaatgattaaatagttgttataaaaaatcattaaatatataatgaagtaaatattatattttagtcacaagtaattttttattgtgattaaaaatcacatttagtcataaaaaaatttatgttgtaattaaaaagttgtcactaaatgtagtcgtaaaaatcattctaatgaatacatccacacataatatataatgtttagataccactattcaaaccctacttcagaccactttgaacctatttctaaattatttttgaacaagtttgaaaacaattggaaaaaaatctaaaatggtatgacactacaaaaaaaaaaaattacttttagtaacaataaaatttgtgactaaaagtgaaaaaattgtgattaattataaattattattttatgttaggactaaaaagtatgtgactaaagttacaaaaatcacaatttattgtgactaaatatacttttagtcacaattaaaactaaattaataataacttatatgttttagtcacaactaactttttgttgtgataaaatgtcacatttaataacaaaaaaaattatgttgtgactaaaaaattattattaatttttttttttgagtgtgatataagtaaatatatctatacgtgtaattaacaattaacattgtgctaaaatctaaatggtctgaaatcaatctaaaatggtccggagttgtttaatacatacaacataacatatgtgaaatataggatcaagttcaatcaatctttctctttttctttatgatttcttttcttcctaaaattgcttttactttattattatgattaattaataacctaaaacagtgagatctggctctcagtgataaatttagaaagtaaaaatcaagtactgaattgttgtttgttggtgtgacataatctttagaaagaattcaacttcctaacacaacagcctaaccaccagaccactataaaagctactaaataattaaactaattggtgactctcacaacacagccaactattgtattggatctaacaactaagaaggcatgttttaggtagttcaataattaggttaattattaaaatatgtgttagtaaataaaatcttggtaaaataattcccaccctagactcggaccacgaccttgacctaaatccgaaccctgaccccgaccttagcccctgacactggcaccaaatcgagaccccaactagacgcggaccctggcaccgaacccgaacacagaacccgaaccccggcactaaactcggatccagacctggacccgaactgcagactcgaaccccagatgcggaccgaaaccctggcaccaaacccgaacacagacctttggaccccaaaccgaacttggtcggggacccatacctggccccgtcctcggacctggacccatggacccaaaccctgaatccggaccttggccatagacccgaaccccgaatccagaccctagccatggactcgaacctcgaacctagatcccagcattgaatcacggacgcaaacgcagacactgacctgaactcgaacccaaccccgaacacaggttaaggccttggacccaaaccctagaccatgagcccaaccataatgagagaaagtgatgaaagattaagttgtcaaatagaaaatgagggagaaaaaatgtgagaaagtgatgcaagagaaaatgtgagaaaaagtgatgtgaaagaaaatgaatagaaaaataaggtgagataaagtcaaaaaaatttgacaataactcaattgttttttaaaaaaaaaaacatgaaaaaaaaaaaaaaa

SEQ ID NO: 111943 - DNA, 6811 bp, Cannabis sativa
  modified_base (29)..(38): a, c, t, g, unknown or other
  modified_base (6739)..(6742): a, c, t, g, unknown or other
tccacgtgtccctgtctggttggtccacnnnnnnnnnncaaaatcaggggcaacactaataatttgcaactaattaaaagaaatgaacttagatatatttgaaggaattatacgccagaaataataaaagtaccctaaagatgaaaaaatattgtaatagtttttagaaaataatgaatctgatcgtgctacaattagtaaacttggaaagaaggaaagaatttaaaaacaaaaaacaaaaaacaaaacaaaaattgtggtatagttactccagatgtaaagatctccaaaaaatattctggttatagaaagatagatgtatccggaagggcgttcccaaaagtctaaactaaccatttggaagtagtgataggtgtcatccgaaaaagttttccaggatgcctatcatgtccacctggaatgagtcttcaggaaaactagcctccctcgagaaaagagttctagatggacagttgttccctcttggaagggagatcgaatagtcgactccagttattgcctttcctatccaagaagtcccttcagcgtatgttttggtatgtctttcagaaagcttatgtctcatctggaagtacttcttcttgtgttgacgttgagatactgttgcgagaattttgttaagcttattaagtcataactaactaaacaacttatcattggcagccactgactttaggatctatttcttggatctataaatactatcaatacttaacattcgagggagaacaaaagaaggagatcgacgagttttgagaggtgatcttgagagagaaagattgagaggtagaaagagtggtatagataaaagaaagagattgtgtttggattttgtatgaagattcttctgtatgaagaagattcttggataagagtgtgagagataaacactttgagagaatccatagagaatcgatctcgatttcggtggtgtttcagaactagagtagagttatagattgcattgatctataagacttaaaccaatatatatcttggtgttaattttatagttttattgccttatcatttctgtttttaatactttgttcatccatctctgattgttatgtgttatttgctaatcttgtcattgctaattatttattatttaagttttagttgttttgattttgcatattagttgtaatttctccacaaattagagcttgataatcgatcaagaatgcaaaatccagattttatttgttgcaaatcttgaagaaacaattattgtcatcaatgggagattcaaattggagaaattcaataaaacaggagacttcgtcctatggagagaaagtttgaaagggatcctagtacaccaaaaagtctccaaagttctcggagatgagaagttactggctgagaataagaaaccaaaagagaaaccagaaataaaagagatggcttattaaacgatcatcatgtacatgtgcaacagtgtgaggagaaagcttgttagagaaaagacagcaaatgaaagtgggacaagcttgaagaattctacatgaaaccatcaattgttagcaagattaatttgctaaagcttatatagttttagaatgattttttctctttctttagatgataatattgataggtttaatgagatcattgtaggagtggctaatataaatcataaagttgatgaagaaatctagaccatcattttgttaagatctcctccaatcgcatatcaaaaagtcaaagctgccatcaaatatggcagagatgtactgattgtgaagcttgtgttttaggaaaacaatataagcttaagttcactccgaaaaggcacacaactaagaagatacttgaatacatgcatgatgatctttggggggccatacaaagtccccactcacttcggtaagcaatattttatttctataattgatgattatagtaggtgtgtttgggcctatttgctagaaactaaaaatgagtgcctggaataatttagaatttggaaaactcaggtggaaaactaaaccgatctaaaagttaagaaacttaggatggacaatgggttaaagtttattaactctaaatttggcattttgtgttaagagtatgggatactaggcatagaactgtagtgaagacccccagagcaaaatggtgttgctaaaaggatgaatcaaaccctgttaaacaaagttagatgtttgttgttcagtttcgatttagagaaactattttgggagaagctctagatactacaaactaccttataaacagaaacccaaactgtgttataggctaaaaatccttaatgaaatatggtataatagaattatgaacctaatgcatctaagaatctttaggtgtacgacatatatgtacaccaatctattgacaagatggaaacttagattagttaagagaactttaggttatgccttaggtgccaagaggtatataattttcatttctaagaaaggtagaccaaaggttatgattgctagaaatattaatttcaatgagttagaataacctcacttgacatccaggaaaggtagtgtgtccccgtgtgatgcaaaaaaaaaaaataagaaacaagaacactacacgcatggaaatagaatacataacgaaacatccaaaagtgcgcagatggaagctgatgctgagttggaaggtaacgaagaccaaatagaggttccagaaggatttagacaggctggtttggaaggttattagttgacacgtgatagaactaggagagagattcaccctccagcaaggtttgtagaagctgatttaatagcatttgcactggcaacactacaaaaactgaaattaaagagcctaaaagctacgaagaggaaattttaggtggaaacaagtcaatggctccaggccatgggtgaggagatggactcactccaaaagaacaagacctgggtagttgtaccaaagctggagaacaaaaagattatggagtacaaatagattctcaaggtgaaagagagagtcaatgagaatgaaccagtgcaattcaaagctaggttagtggctaagggttttactcaggtggaattaactatactgaaatcttctcacctatggtaaagtagaaaatgataagattgaaattttctcgctaagagaatgcttattgaggagatgtcttgtcccctgtgtggagagggagaggagacaatggaacactttttcctctatttcagttttgctttccacctttggtggtcctccccttgggaggtgatgcctgtaatggattcaggagctcgtgtgtgggattggactaattttttgtggaataaaaaatatagaggggtggatactgaaaagttgtttctttatgcttcgattgtggtaaatacaatttggagggcccaaaatgacaaggtacacaataactcactaggtaacattaaatattatattgactttatctcattttgttacacaaattatgggtcatgtttatttgtctctccaaaggctattgggcctccagcttggtccccgccgctagatgtttaggtcaagatcagctgtgatgtcaaagttggcggcgacaccatgtgcgcagtggctatagcaatggatcaaaatgaatctattttgtgggtggcaacaagcaagctcaatttctctaaccccctcattggataagttgtggcgtgtcttttagccatggagactgttgtctcgctgcatcatccttttgtcataatggagagtgattctgagacagttatcaaaactctaaagagaacttgctctaattgggggattgataactatgtgtgtcattgtaaatatctttctatttttattattagttgtaatttttcgttttatttttagaagttataattttacagtccataatgtggctaattagacttttgttaataatgcaactggtatggtagatctatcttctataccaattaatgtcttttgtaaccatatgaggtaaaattttagtttattttataaacatattttttcaaaaaagagagggagagagagagagagagtgagagagaggaaacgaaatgtgagaaactaaactcttgaaagcttatggtgttcacacgtgtacagtgtagatcccatttgtgcttattccttcattattataatcacgtctaacttaaattttatatataattattttgggatcgagattgcttttgttccatactaaacgggttttatttattgtatatcttatgctatataaatggataatgcaatatatcggaagatgattgaaacacactcaaaatatacataattgatgtgtaattaatcttaatcttacaattaaaaaatgatatggtgtcaatgactaatattaactatacatattgtgagttataagtgtatataatttgagtgtacatccaaaaccggccttaggcatgcctaaaaataaaaagataatttaaaaaaaatacaaaaataataaaaaagtttcaaaaatacagttgtacggaattttaatatttttatggtttttaaaattttatttacgtaaaatacgatcttttgatatatttttatattgtactttaattattttattgttattttttgttatttgtatattatgttgttgttgtttttttgttactttcatataattttcttgtgtttttatataataccgtaaaaatataaaaaaaataaaataaatagaaaaatgttaaaaaaaaaaaaaaaactttaaacgtaaaagtataaatattttattaaaaatagcaatataatatttctaacattaaaaggccttgttagaattttttttttttgtaaggatctcgttagatttttatttaaataaaattaagtgcactataaacaacaaatatttataatttgattggttaaggtgtatggtcgaccctgtgtatatctaacattattggtattatatattacgacttgcgatcatattataactcagttcgggtcaaggtcccaagtccatattcaagtccgagtccggatctcgagtcctgggtctgggtacgagtttatgtcctagatttgggtctcaggtccaagtccggagctgggtcccgattccgagttcgggtctggtttcggtttcgagttccatgtccgattctgggtccaagtcccaggttcgattttgtgttcgaatcggagattgggattgatctttgtaaatattataataaaagttaatacgaatcatttgttatgtattaaataatacaacttacattgtactaaaaaatttgatcataataattaatataatacattactttatccaaatatcatattatttattatttaatacaaaacaactctcatactgcctaccaaaccaacccttactctctttaattatagatgatctgtataatctatcaatatggtaatgttataacatagttgtatagacgcatgtaagtgtacatatatctatatatcttatctattcacataaaaccaaaccggtggtgttggctacatatgaggctggatatgacgccgttgcctttacgaaaccactgcatacattaaatattgtcattactgtcttagcttagctaatcttggtctatgcaattataattacttcctataaatatataaatcataaaatgtagcactggcagagtaatgtgcatgtttttttctttgggaggcaaaatgtggatgaatttaaagaatgagtattaagtacataacgtagcgtaatagactcaaaattcattttgagcatctaattactctcatacaattcatggactagtcaagtatatgtatcttaatcttaatattcacccagcctataccagaatcatttattataatatgttcttccagtctctgcattaattatcctaaaaagattgctacctcaactaggggagtccgtatatataaatatataaatacatactacaacctaaacattagatgtgacttatgaggaaaaatgcaactatcaccacctttgaccatactaagccaagagttttaagcaatcagctttgtaatattcacaatagattctttaagagatattttaagttaatagactactttaggttcttaatatagtagatgatccttatttggagaatgaaaattgcatccagccttaaaaccctttctaatattaatcttccaaacagctttcgattgcctttggtttggggttcctgccctttcatgatacacaaggcaactagaatgtttgataaaagtgtgcaaaatgattagcataactatgtaatgtagatgcagtttcatacatcttttttaagaaacataagctatgtttggatgttagattgtgattaggaaagataaagttaggaaaaatgtatatttagtatggaatgaaaattgtatagaaaaacactcaattcaacaaaaaatttcatattaaacttgaaaatttgattttttttttgttctccacattttttttaatacgtacattttccctaccttacttgggttaaggttttaaacttcttgtgaaatttaattgtgttaattctctgacaatctataactaaacaataaaacactaaaaaaaatccacatatggaaaaaaaaaaaataattgctgctgttggaaatagtaaaaggcctactacgattttaatcaaattcttccgaagaacaatgtcaagttaagcatattggggtcaccaattaaaaagaaaagagaaatgctaaagggcannnntggtgcctaacaccctcctatgtgttaatatcgctattgctccaactaagtatcaggtctcatataatt

SEQ ID NO: 111944 - DNA, 2457 bp, Cannabis sativa
gtatactatgtaaatttccctagaattattatttaaaaagttgcatagatattagttcagaagcaatattacatttctacccttttatatatttatacgtatgtggctaccacaagaaatgcacacattatgcacacattatggtgccaaatgggaataaggcttaggcccatatgtgattgaatgtgatagaacatgttttcccattgctttcaccaatttactctcttcatcatgaacatgtacaaagaatcttaaattgtctaacaaacaaagttagtggcttttgctgtcatcatctttacttaattaatcatttttcaattatttattattatgtaaattgcactctttttattgaaatattcacctatgataataatttgatactaatttcattggtacaaattgagcccaactatttgtaatcatctctagatagaatgtcttccacttataaataactcttttttaagtaaaaaagaataaatttgagatcattggcaaaccttttgttttatttttaatacttattcttgaagtttcaattttcaagtttccaattagataataacaatgaatttcacacttttaggaaaaaagatcattctaacaccagttgtattttgccaattagaattatatttattaaattatgaattatatttattaaattataatatatgagatttgatatatgctaatatttagagttattctgagtaatcacttaaggctacttaattggccataaagagtataagaggatttgtgtgtaatgtaatgtatatataaacgcttcaacaaaaaaaaaagttattatgactatgagtaaaggtgcctacataattacaaatgcccttttttgaaaaatgtcatttataaatttgatgtaactgttaatattttttcttggataagtatttctctttataaatctcatctttaatgtggccttatattattgtaagctctctctttcgaacaaattctaaaaaatatcattctatgtataaaattatacattatattttggctctactagtagtagcattactattaagcactatttcatagtggtgtattttataaaatatattatattaaattatatgtgatacaatatttaattatattaataataaaataatatatttaataatacatttaaacactactagtatcttttagtatttctcgtagtatatcgtggaattgataagaaccattgtgcttaagtacttgataatattttagtttttttgctgagataaaaacaaaaacaaaaaatccaaattattccaaagaaatcttgtgaattgccaaaagaatagagatacaattatggtagagatgatcattattcattgcctttcacctcacgctttttctatatttctttaatattattttcatttctattttctaaggttccatttctaaaaccctattaagaaactttgacttaggtggctaaaaggaaacctaaataaggtacctttgaatacatgattggtgcatgaatccacttataataatacaaagttttgcattactaaatctacctttttaagattgtgaattacaatttaatttaattcatctgtccatttcaaaaacttccaatcatataatataatacccttttatctttattaattgccttatatgtcttttatataattgagttgtcttgtcaattttgtgtgttgtttcttcagcacaaatttttggtcattatcttagtggtttttagaatattagacatttttacatttatccgaatgtaaaaccaattttatgttattttattttgtttggacaaaaaatgacaaaccaaatttagtttacacagttcattggtttatcaatcatgagctatatctatggagacatttgaggcttgcagtgaatggtgagtggaacctctcatttagatttcttcaaagtttttaattggagttattttatatattctcactttaacttgtctccccacaacttatataaatatcttaaactatgttttattatatttaatataatttgttttaataaatattgtcatgcccatatttcgagtagcaatatggtcatatacaaaacctaaaaaatgaaccagctcggatattgaaaattaaacacgttatttatgttgcctcagaaaatactagtcatgattataaattgaagtctttcttagatgactaaagataaattaaaataataactcactagtagtagaccaataaaattaacaacaaccatctcgggaaaaccgtacaagaaaaacaacacaaaagactttgttggtcgaacaagatagtataaaggagttcgacttaaggagcataaatgatataatttgaaaagcttacttaaaaggttttataagaattatccaaaatttcatcacgaatgatcaatgaaagaagagtgtgttggaaattattttac

SEQ ID NO: 111945 - DNA, 1491 bp, Cannabis sativa
ttgtaatcaaacatttaacaataatacaatacagattctttcagctattgtttctctctacatctctgttttcttgttttctggttttgtccattttcgttacagtcatcaagtgtaggatgaggacatatttgagttcgagaagcagacgacctagctagccaaattgagtgaattgagaagaaaattgtttaaactgacaaatattgttttgattagattgaatgtagtgtaaaaaattcaaagtgggaatacaattttttgatgaaccaattatcagtgtcaacacagcgtatattgtagttatttagaatttatagtctgaaaacaaaatataaattgtttaaaagtctatagtcttataccttagtaaaataagttattttgaagtaaattttgtttaaattatttattgaattttcaataataataatttactattttaatatacatacttataaataaaataaggtttgaaaatatttttcttaagaataatttaaatttttttaagtaaactatattttgtaattaatttaatacttttaataggttttttaattacttgtattaattttttcaaaattaataaaacgttataatttttaaaaatattttttttaataaaaaagggtaaaattttgtattggttaaaatttaagggttaaaaatattaatttataaacagtaaaagaattagattttaaccaaagggacatagttatatacctgttatattttaaggaaatttttaataaatactatattttagaaagtatgatcaaatagtgtcaaaagtttagtttgagtagtcaaaaatactaattattcttatttatttctttcagaacatctatctctctcctttctctttctttttttcctctccaaactccaatatctctcttcatttttctctctctagaggcaaaatggttaacattttcttttaaaatatattgtaactttattaaaatgaaaacatggtgcaagctacaatttgtaacagtttggaatacatctattccaaacaatttctctcgccctaatgcttttcgagccaaattatgagcttccacatcaatcttcctatatatatatatttatatatatagcactggatattttggttgggtttgacatggcccagccaacctgtccaggccaactctttcaggcaggtttgagtctaacttttgctaacatgtgggttcgggatctgtaccttcctacacgaacccagatgactttttttttcatccagagggtgagcaatttagtttttttttttctatttaaatttaatatatataataaaataaacaatatatttttttatataagattttactaaaaattatatgtatatgtacaatgaatgtaaaaattaaatataaatatgattttttatatatattttatttatgggtaaatactattttagattctgtgttttgtaaaagttatcaattggattctctattttgttaa

SEQ ID NO: 111946 - DNA, 7518 bp, Cannabis sativa
  modified_base (160)..(175): a, c, t, g, unknown or other
  modified_base (7470)..(7476): a, c, t, g, unknown or other
aaggagaatcgggctcaaatcttggtgatactctgctacagaaaggatacgagggttagagatttgagtggaatgagtcatttaattctgctgcagcctatgtaaggtttcttgcactttatatgtgtttaaattccattgttttaaaaattcatatttnnnnnnnnnnnnnnnntacatggtagtaaatctagatcctagtaaaataattcccaacatattcatattatcatgtggaggtacaaggacccaagttcggttctttttatgtgcataaatctcatcattcatggctcaattccaaccaggatgagccaaagcctcctctacaaaaggtagttatgtactaatggagttccatatggattgacgcaagtaagtcttaggtttaaatacccctgcttggcccgtgtaatcatgggatgtgttagggccaaaggagcaccatagggagaagcaacttttgtaatgggattagatgcctgaggagtaagtttaggagaagcttggggcaactctagtgatgctgcagtagacatatgagagccagcaggtgatgagtgaaattattgtacttgattttgttgtaagaagggtgttttaggtgatggtattttagaggatgctttaggtggatcagaaggttgtgaaggagtgtttagagatgtctttagagatggggaagagggagagaatatagaagcagaccacaaagggacatgaatatggattgggtgttcaggttggcgtgtgttgaggaaactagtttgaaatggaattcaaattcattgaaaatgacatgacgagaaatgtagactcgaccagtattgttaaggcatttatagcctttatgactatcactatagccaaagtttacacatttggtggaatgattttgaaatttgtggaaagcaagttttactaaaggtcttaagaaattggtaatttggaagtttagaataaacaactttaaatggagatatatcgttgagtatgagagtgggaaatctattaattaaatagaaaaatgctaaaatgcctcccactaatatgtttgaggcatgctagcttgagctaacaaagtaagacccatttcacctatatgatgatgtttcttctcagttcgaccattttgagctgagtcatggagacaagagtgttgaaaatagataccatgctcaacaactaattttgaaaaaacttgatattcacctccccaatctgtttgacagattttaatttttctttcaaactgattttccactaaagttttgaactgaataaatgtagaaagagcatatgatttcacttttaatggatatatttaagtatatatggtatgattatctataaaataaatgtaaaatgtagtttaaattggacataatgggagctggcctcaataaatttgtatgaatcatatctaaagaaaactgagtatggttttcattaatttgataggataaagaatgagattttcccaagttgccaagtatcacagaaatgttgatcagtattttttttaacttttaacactaattttacttaaaacaagatctaagacacgattggatggatgacataaatgtttatgctatttgtccttcattgaaggggaaaatttctctgccattggctgagtaattacattggactgagacacaaaagaaacaccaaaaaatagagtaagttggagagtggaatggatgttgagcttggagttggggttaggcacttcgaattgatataatccttccttaagcttcccattcccatgaagtaccatcatctttgttagtttttccttcacaaaacaataatcaacaaaaaattcaataaatactttattattactgtttagctttgtaatactaattaaattctttgaaatttagatttaaattatttctagttgtagtaaataaagaaccagtaccagcatgagaaatttttaatttgtttccatcaccaacagtgagattttccttaccagtatactccatcttttgcttcatgtgtcctgtgtcagtaatgatatggttgatggcacttgaatcagcaaatcaaacatcatgttccacaatatcaggggtagcaacaaaagctgaggaaccaagacgagtaggcttatttgagtttgagttcttatcaggtgaaaaccccatataagattcatcatatctattatagcagtgagttgccaagtgaccatacttggtattggcttggcaagttggtttagatccagtaggaccaaatttactatctcttccttgaccaccaaatcaaccacaattgtggttattgttgttgtagtctcctctatttcttacaggttgattgtttgttgaatgtccacttgatatagaacctttatttgcaaggttggcaggaggagaggttagacctgtctgtgtcttattagcacctcaaacagcaaccaacctctccattttgttgtttaaactaagcagcaaaaatcttgtaattctacccaagtggtggaagggcgtgcttcagagataaaaacaatacgaagatattctatatccaaactagaaagtacattaacaacaagcatttttttttcaagatatgggtcaccttcttgtgctaaaatgtctaaccactgacacttatgttggagatattttggcattatagaagctccctttcatgagtctgaatcttaattatgtactcatccatcttagccttcgaatgtgcttcgtatagttcttctagtgcagtcaatagctcagctaagaatgcacatcccataaattcagtggctatgacttctgtcatagaaccatatagccaaccattaaaagttgggcatgaaaaatccattgttcaaactctagattcacctcaatgtccactctaggttcttcatcatttatatgtattgcaggaataaactttgcaagttgaacacaactactattaatgaaatcatccaagcaatgtccttttacaatggttgaaaccattgtttcccaaaagttgaatttattctcgttaagtttaaagttaaaaagttgattcaaggtactcctaaactgaggtaccacaatgttagagagtctgccattctaatttgttgatcctagtggttggttagcaccattgctactagttggatttgatgtagtcgccctgggtgtagtattgtcatctgtagacatattgaaatacaagaaaaagaatagagggcagaaacctactctaataccaagttagaaaattagcagcaatagaaaaaaaatgataaaatcagctcaaatggagcttgatggattgcattgtatttatagtatgcaggaaaatattttagaacaatccttacaaaaatatcttcctattattagcattaatacaaaaagaatattctaacaaaaataaaggtgcccagtgataaggtggtacaactgtaataatactagtgactatgttgaggtacactggaaagaattcgctgcatctcttcgtattttcatttgttaacactataccataagttttgttgaattaattgtaataattagaaagaaataatcgagttgtctcccataagtcttaagcttgaaatggtaaatatcacacaacgcacatcaacaaccttgttctctacacattgcttgcatgcctcacctccatgaaaaatgttgggtttgtctccccagctccaagcatttgggtattgtaaatacatgccgaatattttaacatgacacgaaattcgtttaaatttaagaggtacgagcacgattcaatataaattggcataatatgtcatgaaaaatataattttaaatacgatatgacacatatgtatgaatagattagcccaaaatttttattaaatatataaaaatataaatgataataaaatttaagtacaacatagtattataattctatattaaaactattactatatatcttttttcttaaaaaataccatttataaacactaatttcgaaaagacatggtttatctctcccaccccgttggtggttgatgtttggcgccattcccctcaagattggctcaaactgaattatgatattagagttggattggagagcatgtgtatcactgtggtagcaaagaaccatcttggtgagtggtttgggttagaacagaacttttacattttgttgatgctctaactagggaagcgacaagtttttttaatatggtcttgtcttttgacatggtttctaaggttcagtgttaaggtttctatcaattaagtctagtgttgttttcagattctcgtgggtggtcttgtctttgcttgttgctgctgggagtaagcatggcatcaactagttggaacagaggaagtacagaggaggaaacactgcggttccagattgaggaggaggatcttgaagaagtagcagtgattagagggggaggagatgatggtatcgacgataggtggtatttggttggatgatttttgactaatcgtgtgatcaattttgagaaaatgcaaaatatatttgcttcattatgacaaccaggtatggggatatttatcaaatgattggctaataataggtttcttttccaattctatcatgaagtggacaatcaaagagtcatcaatgggagtccctagacttatgacaaaatgcaattgattatagaaagattacaaattggaggggatctgaaggcattgccattgaatactcttgacatctgggttcaactccatgatatggagcctgggtgtatgtctgaaagtacagttgaaaaggttggtaatactatggggaagtatctagaatctgatcctaagaattttataggagtgtgaagggattttcttcggattagagtcacttcgaatattgataaaccgctacgacgatgtatgaagctaacaaaggatgatggaagttagttttggattaatttcaagtacgaaagggcccttaaataccacattatcctctttagtatttgattgtgtaacatgtaacaacgaaaaagttttcagtgatggaaaactaaatgaatgagtactatccaactttactgtgctcaattccaaaatagtcaaatatcttgcgttgtttggtattttaggtatgcaataatagaaagtcttagccccatcaagatattttcctcctaggaatagatatatttccttaaccttattctcaacaacaaaagataacaatttatttagtaaccaagccttacgacatccataataactaggcatgttaaacttaaaactagttatgctcgaatcaacaacaagatccatacctttcttgcgattttccaaaaattatagacataatcgtaaaacgtttctaggtcttgtctccaagtaatgacatacttaacctttttgaagaaaaagagtagtgtgggaactgaataccatatgagtttccaacgctttgaaagaatacatgttcgaaccacatcttcagttggtagaaacgaaagaatgtgatggattaatgcatcaggaagttttaaaattatgtcattatcatcatcaataacacctcccaccattgatgatgtcatgatgatgatgatgatatcactataacaagaaagagaagaaaaaaaagcttaatctcttagatggaatatatgaatataaaaggttaatcctttaaggccaattttttttagagttagggtttggcttaagtggaatgtgagggtgagatataagtacgtacaagcacaacaataaaatattttcaatgataatatttattttttttcttgaaatttcgctgatattttttttaaaatttttataatatgaatttcgctgatgatttttattagctaaaaaaaaaaacttctgtgttatcttaattttcgttgccaattgatcagattgtgaaaccttatggtgagttcatgagagctcttacccaacgaaggcacagaacattggttctcgatggcttagaaccaaggggtggagtccgcaaagacgactggtggtgctgggcctgaagggatggagtcaacggtagttaatgtgggaagatcctctggcggtagtgaagtcgtgaatgcaggagttgactcaagacacaatcacgtaaatggtggagacattactactgacaatcagatcaaagcttctatttctcttcatggtactcgagtcaatcaaggaggaaataataaagatacgggaaaggatattgtggataattcaaatgacagcttggccatttttgacaataaaaaatgaaaagtgttgagtgagggaagtaaagaaaattttgaggtggcacatttagttagtgacatttcaaaaaactcatcattggcgggccttcgcaatggggctcatcaatcattatgaaaataatatcttggaactgtcgtgggcttgggccaccatggaatgttcaattcctaaaagaacttgtggttcaaaaaaggcctaatgttgttatcccgtgtgaaactttaagtaataatttgaagatggatcaggtctgtaggactttgggttttgaggggtgttttgttgtggagcccaaggtaggagtggggggttagcattattatggagaaaccaagtagaggtcaaggtggagttgttttctacgaaccatattgacagtgtaatttcgattgatgggcaaagggagtttctgtttactaggatacatggggagcctatagaagcttaaggaagaatacatgggatctcttaaggacccttcatgggcgttctactactccttggtgtttaatggggaattttcacaatgtgcttagtcaaggagaggagcttggtggactaccttacccctcgtggctgatagaatgctttcaagaggcggttcaacaatgtgggttgattgatttggagtaatgtggccatccttatacttgggagaagagtagagacactactagttggatagaagcacgtttggacatagcaatgataagaaatacttggttaaccaatttctcttcatctaaattgtttaatcttgagatatctcctttgaatcattgcccccttcttttggatatcctatacagagagattgttgctcaagtgaggccttttaagtttgaaaatttctggactagtcatcatgattgtgaattagttgttagaagcagctggtctacgatgatggggtatgaaatagttcaaaaaaaaataaatgactgtggttgtgaacttcagcaatggggaaaagaagtttttggcaatttctttactcatattaaacattgcaatcgtgatcttaagcaatataaaaagagaagagatgaggaaggaaagagattattttttgaagataaaaaggaactctttgctgttcttaatcaaagagaggtgttttggagacaaagatctaaacagttatgactctaagtgggagaccaaaacaataagttctatcactctaaagctgttggaatttattttaccnnnnnnnagatttactaccatgtatgttttttaacatcctaaatatgaa

SEQ ID NO: 111947 - DNA, 3079 bp, Cannabis sativa
ttttttttttttttttttattgtcgcgtggtttaatttgagagagagttgactttgaatggtacgtaggggtattatgatgcatagcaacaagttttccaattgtaaacgctagtgatgtgatgtcatgtttacatagggaccaatattttgggatcggattagattataaagacaaattgaatttggattgaactataaatcaagattttcaaatctaatatcttactgaaaagattgaattggattcagaaaaacacactctctactagaattatatgtatgggtgacattttattattttgcaattagacataatttataaccggagttcagtactacatatatttataactactaatactatcacacacaactcattaatattcttcttagttgtattaccaataaagaagagaaaggaattgattccaactttaacaacgtacgtgtatagagagatatggataccacccccacatgcaaattaaacatttcacgagacaaccagaaaatattttcttttatttatttttgcaatttaatgaacaataattaattttaaatttctattatataattaatctataacaaaagagaatatatatctttattttctcttttagttaacgagagaacaagcttgttatctaaatatataataatatttatcgatcgttacaagacaatgaatctaatgttttaaaattagcattaagaaacaaagatggatgtgtcgtaaaatatagatagtacacccaatattcttggatgcatatatacgaaaatagtatgcaaagtacatgaacactttcaattaataaggtcaattttgatacaccacttaagaaatgattgaacgtaacgaaagtaaacacaattattctatggaaaatggtctgtttttaaatgaagcatcggtccaattttatttaaacttcattatatgatgtgaactcatcaatagttatcttagtattacttgatacgatttgttaacttaaatgtacctgtatatatgtacaaaattatttactatatatatatatatataaaaaagcatcacggcaaaaggtcgaagcatctggtaatcattaatcataatcacaattgtccacaacttctgatggaggagattgataggtcaatgaaatacaaaacaaggcattgaaaacgaatccaagttttattgattgtttacttcttattttcttatctttgatttatttattttttacaagccagaggtaggaattggagggtggacttttctaaagatgaattacccaagtccaaaagggaaccgacctaacaaaaggtgcttggtgggacccttaatatgacagacggcagtcgtacacccttgaattgaaaggatcatttttcctttctctctctctctcttatcatttattattaatcatctttctcaaataaataaaataaaataaataaataaaatagagaaatgaaaataaatatatatggtggatgttcaacttattgccacttaaaaatctccaaatggatggacaagactagttcctaaacaaataaaggaaaacaaaagtgtggagtggggttccagaacacacactcacaggcacacacccccttaaccaccatcaatggtgctcaaacgcccgaccccctctcaataattcctccacaaccaaccatttatatatatatatatatacatattctaattaagtcttatttatattaaattctaatttctttctttttttttttttcttactttataattgttagatggtaatcattataatcctactatcaaataattatttttacactaaaagtgtgtttcgatcaaagggagagcgtatagtgaaaggagaaagaaaatgaaaccaatattgtttgatatgaataacttaagggttcggtatggtatggctctttgtttgtgacgcggagaataatttatgttaaacttgctccctctaatgacgtgtatatatacaattgaaagtcctaataattcagaaaactaagtaattgagttaattgcatatcttgatgaattaaagtagaaagataaatcaatgaacactagatttataagcttaaattctcagcgttggaaacacattctaacccgcttaggttcccaagaaccggataaagtaacatttattataaaattattttaattgcattcactagttctgtttttacaaatcaaacaatataatctgaaatgactttacataagatttacctaactcttaaatacaatcaagacaactgatctaagcatacttagatccaagaagacaagctccacttgcttccaccaagttgaaattcctccagcagatcagtttgaactctgaagatctaatgaattacattatgcaaggtacaatcaaagaaacacagaaaaatattttgccctagtagagcaagaattactcgaagattctatcaaagatgagagttagttagaaaaaagcaatatcagctcactataaatcaaactttggaaaaaatgcctcagctaaataactcaacagctcaagccagttggcaccgacttaaactgaataaaaaacataaatgctaaaaagctaacatggcaaacaataagagataacagacaaagcagataagaccaacttagatgaacaattcaaaagatcgagacagcaactagaaaacaatatactgaactagtaaactaccatataattttccatacagaaaacattgcacttacaatctcgcccttggaaaattatgatcaacgaccaagcacaatattcaggaagagagacacaaaatatcaaaacgcgaaagcaattaccaataaaccaaaaaataataattacacagtttaccaactgacaaagttaagttcaacagacagaaacaaaaacaactagtcaaaaaactgttggactttgtgcctaaataaaactctatttcaatataattttttcttaaacaaatttaatttcattagttgtttaatgtgttatttggttcatgtgatcatttatttacttatttgatttataaatttatctaaatccttatcacactgatattct

SEQ ID NO: 111948 - DNA, 3960 bp, Cannabis sativa
  modified_base (33)..(52): a, c, t, g, unknown or other
  modified_base (1531)..(1535): a, c, t, g, unknown or other
attgttttagagaattcatattaggatgttaannnnnnnnnnnnnnnnnnnnatctaaatcctggtaaaatatttccaacacttatatatagtgttatatttattctaagaaaccttttattcatataatctttttatattatattattatttattatgtacttataataatgagtattgttattgagcattagtggtgcatagcacttctagacatgtcgttttacaattgattagcgatattttctaaaatttattacattaaattatatgaggtccgatacttaattggaccaataataataatataatatataggagtgtattagacaccactggttctttttagcatttctctataataatagattttcacctagcctctatgcatgcatatgtaaccctcaatgtcaataatttctttttttttttgggataaaaaatgaaaatagtctctccattaacatgttgattattagggtgtacattaatctgttactacattttattcaacctatatgtctcattccaaaaatttaagtgcagttcatctaattaaaaaaaatagaataataatgatattagtcggtttcgtcgggttaactgactcaaaccaactactaatatatttttattttttatttttacattcaattattatattttaggtaattgtaataataagacaaatatatagattgaattcaaagttcaaatcaactaccataaaaaaaatattaatttaagctttatattttttaaataatcatataatatacaaataatgtataatatatattacttcgagttgattgggcagattagtattatttttaacttgcctaatataaagattaagcgagtttatatttttatcaggtttttcaatttatatttttagttaaattatctcagtttaatttgaacaggttttgaaaatctctttaaaaaaaaaaatactacgttaacacaaaaattttacttttaggcttttaacttttttatttataaaaatacgtatttcaatcaaaataataaactattttttttttgtcatattgttatatagtttatttatagttgtattatagttgtcatgatgttgtttttcgtcttattttataatttatttataattgatttatagttgttgtaaagttgatttctcgttgtcttttagatgtttacttatttttgctgaaaaaaacatgttttcataattataaaattttaaaagcgtatttttataaataagaactttagattgtaaaattataaataaaatataaaaaaaatggtatttttaaaaatccctcaaaataacacctacctttaatggattttactattgtctaatataatatagtacatttttttaattgcttagctgtatgatttaggacttgtttggtacgccgtataagcgttgtattgtactaaataataaataacactgtgtttagataaagtaatgtattgtattaattaataattattacgaccaacatttttaatacaatgtatgttgtannnnntaatacataacaaatggtctgtattagtttgtattataatatttacaaagaattcatggtcaacaccaatctccaacctgaattcggaatcgggacccgaacccaaacccgggacctggacctgaactcggacctagactctaacccagacccggacccggacccagacgctgacccgaacccaaacctggacccggactcggccccagtctcagtccccgtcccagacccagacccgagacctagacccaaactcggacccagaccctgaacccggacttagacccgagacctagacttggactcgaacccggaccccaaacccaaacccagactcagacccggacccggacaccgacttgggacactgacccgagcacggacccgaacccggacgcggacccaggttccggacctagacccagatcgggacctagacccaaattcgaacccagacccgagatcctaacccaaactccggacccaaacttggacccagactcggacccggacccggtcccagacctggacccgaacgccgacccaaacccggaatcggactcgggacccggacatggacccggacccggaccccgactcgggaccctgacttgaacacggacacgaacccgaatcgggactcgggacccaaacccgagacccgaatctagacccagatttgaacccggaccccgactccaacttgggaccccgacccgaactcctgacccaaacccggacccatagttggtattggggtcgagtgtattaaaaatatgttataattttacacaatctattaatataagtcaattctaaacataatcatgtattaaataatactaatttaatacaatacaatacaatataatacaatctaatacaatataatataatacgacatatcaaacgagtttttagtttttaatattttacttattggagttaatatttgtgaatgtgatgataatttatttatgatttcttcgcaagaacaaaagaaccgtgttgtgatgattcattgagaattaaagataataaaaattccgctaaatttaatttagatattaatagtttttaatatataaaggtttgtctaatatgaataattatgcgttacaaattaatttgtataatataccagtaatgtgatgtttgtagattttaaggcataatttgttgtttttttttttaaataaaaaatttgagataagttgaaaactatctttttttatgacacattaactaagtataacaccaaaataattttaattgataaatacttttttttttttatataatcaaagtatcaaataaaatctcacataacttattaaaattaaagtttctaacgaacatcatagatatattatatataaaatttgatatatattaaagaataataaaataaaaataaaagttaaaataaaaaataaaaaaatgagtataaagtgtaattttttaaaaaaataaaaaattagcctggttgaatataatttgtattttcttttcactctcttgatgtcattctttataccagtcatacctcctgtcctgatattcaaaaatcaaaatttgacatcttatcaattggattgggctttatgtacatttgagtcgctatcctcatttagaatgggcctcattttatttttgtagttatattactactaattacttaagcaaaaaaagttattttaggagaaaatctaaaagaaaagtcaaaacatatggggaagaatatataaagaaaagttattttgaagatagtaactggttatcataaggagagataactagttatccttaattacttttctctctttttttttttttcaattcttttcatttatttttcccataaaatattttttcttttatgataaaaaaaaccatatttttgcacatatatatatattttttaaataaaacttagcaactttattaactagcaatcgttaataacaatagaacgcatttagttggaacaatccttcaactgaagcacaggacctgtagagaaacaagaatccctggccaaaacatgagtcagcttgtttgcagatcgtttgacaaaacataactcaacattacgaacatcataaactaaaagaccaaaagaggatgacaaagtaatttggctttgcgcggcttgaacacaaactaagctagctatcagtttccaaaatcacttgtccccacgaatgacagtgaatccagcttaaagcttctttgatgccaacaatttcagctattttaggttgcacccgccccatcttttccatcgtgtaagcttctaacaaattaccgttggaatctctagccacacaaccaaaaccaaaccgaccttctcgctcaaacaaagcaccatcaacattaactttgatcttatttatagcaggtgtagtccaacgctcaagcacac

SEQ ID NO: 111949 - DNA, 8097 bp, Cannabis sativa
ataggtagtaccaatcaatccatagtctcatacctacaagtcttagaatcatcacacttgacctttccccaggcggtgtgggattgcacagcctctgaagaagatttaatgagaaaaaagaaagagccaaagaaaaaaagctagaccctgtaggaataacatgagaaatcatatcagtgatcgcattcgtggaagagagtattcaagtgacaaaactcaatgcttggagtgcaaagtcgaggagttggcgaaaatcatggagaagatctctagaaagcaaaatggcactgtatgatattctgagtaagaatatacagaatcctatgtgaaaagaattatagatgcccaactgtcggagcgtttcagaatgcctcagatggaacaaaaattcccagagcatggaacgctgaccatctgcgccgatactatcagtagactgggggtgactagcttctttttcatttttctttgtttttatttttatgtctaatttccatgtacgcctcagggaaggaactctttaaatagagaaggatttttcgtttcatatttggtgtgtgaaaattctgtcttgtaacaagtgatcaaaagtctaaactcttaatcacttgggggtagcatacattatatcattatctcttgacagggaaccggaagtaagccactgcctaatcatacttaaaattaatttaggttaattcgtaattaacaacttagaagtccagacttcataactgactccaattaatgtaactttgaagatcaggcttcgtaattaactcaagttaatttaacttaaaagtttagacttcatagttaactctggttaatttaacttagaaattcaagctttgtaattaactcaaattaaaatttaggctctgtaattaactcaagttaatttaacttagatgttcaagcttcatagttaactcaggttaactaaactaagacgtttaggtttcttaaagaaattaattaattaagattaattaaatatttatgtttgaaaagtcctagaagtaagtaacatttaccaaagaaggtttgattttgttataattaattagcttaaatatttacatttcaaaatcttaaagtaaaacatacttactaaaaattttctaaaagtaagttgtcaaaagtatcaaagtttaggccattggaaccatgttccaagaaatacaattgacttatgaaaaagaaaaaactaaatctaagaatttaattgaaagtccaaaggctcgggcctttggaaccagaacctcaggaggctggaaataagattaaaacatagtaagcttgatagataaaaacatgaatatttaaagagttaataaaagtatacaaatgtctaaaatgtgaccacgtacttaaaagctcctcaacaagggcataaaaaattgtctctgcatatgcaaaaagagagatcattatcccccaaatgataaaagtattaaaagtaagttaaagttggataaacttggataaggcaaagttgggtcttttggtggctgagcatcatcaagccggacatcaatggagacctctaggatcgcagagtcagtaagggaagcagcatcaatagctggaagagctggttcttccaagttttcaccctctaggagggaagttctaggatcgaccacttctactaccattgctgccttcttggcttcgtctagttcatgtagttcaagaacttggggcattagtttttctctatttttgtcatctagaaaatccatcacagatttattgagcttccaaatggtgtacaaagagtgtacaaaagcttgttttaacgcttttgatgtcctaaccacttggtcttgcttcccctgggtcactttctgaagttgatcctctagctatgaagtcttttgaattttgttctctagctctaaagcctttttcttggactcttcacaagcttgagccaaggattgtttggtaaactttaattcagatgcggtgtcctaagcctctttgacagctttcttctcagcctgttttgccttttgcctcaagtcagtatgaagtttcaccttcctctccaaattcattttagcaacaatcttgtcatccaggatgcgagtctacttgtcgtactcattggacaaaaaggtaagctttcggtctgagtccttaaaatctaactttgcttgcttcaagtctgcctccaagtcactgatctgagagagagcctgagtatatttctctttgtacatgtccccacggtttttctgctccttgatggccttcttttcacgagcagtagtcttctccaaagaatcatttatccatttcttaatgatggactccatcttggcaggcatctgctaaagctttggtggcctcttctctcctttgtttggcattagaatgttcaaacttcagcaaatctagtttgtaggccagtttattgaccaaggagtagctcctctccgccatcaggctcacctaagaaaagaattataaataaatcagacaaaggaaacaaatgtatctttttccttagacaatataagtaaaacaaagaacttacaacgttggcttgagtcctcattgcatccactacataaacaggatccctactcatcatcattgcgaatctgtcagccccacgtttgcaactagtggtagcaatctggtccaataaattagacaagaacagagtcacatcagtcccaaccctaggatgaagtctcttcatgaaaagactcgtccacttgtcataatcagcaaactcagcattgcgcctggagaagatacttttggccaacttcttcactttatcatactcacttccacgccttttcacataaaactgttcaatagcctctatgtgcgctttagcttcctctatcattgatgtaggcctgacaggaagattgaagtatgaagaaggtaatggagggaatgttgtcttctcctaagacaactatgtggcaatggcaggaatgattttgggcgctgggggtggtataggtggatcttgattatcccttgttgttctagtgcttctcctaggtagccttccactctcgaagacatcagaccccttttaggattgagatttagcagcttgtctcctcatggcagccaactgtcggacttttttcttgatctccagcttcgcctttttgttggcctctccatctgcaatactcgatcgctttctgggagccaagactggtccatcactgtttgagcttcttcctcaacgttccccataggcacatgttgtactggtgccacatcaagagcaagttcgttcagataaataaggaagtagacaagtattctagggctggaacctttagagcagcctcctggctcgaggcttgaggtgctggcttctaagatctactcctagaggcttatcctttcttgcctttgtttttgccttccctggccacctcacggatctcgtcaaatctagaactgatggcatctaggaagttattgagcagacccatttggaagtagtcggttgctctgtaaaaagagaaaagatacactatgtcagattacatcagatataattacagatacaagttatcaaataatatgaaggatccaaaccatttatcttagcataattggctttccctctagcaaaaagggtaatgtcatctcgacctaaatagtctcgcgttagaaaaaccctagaaaataaaattttactaaattcgtccactctaacgtgatgctgcactgggggaacaaagtggttaggactccttataatgcaatctaccttatttatgaagtcactacaagggtatctatgttgatctaaacttaaaaaataagggtcgaatctcccttagttagtattatctaagtatgctaaagaaggagccctaattatatgaaagggtgtctcacaactatcggacatactcgctcccagagcacctttatttgggattacatcactaaagtgaatagtgagctcttcagcttcactcaaatcttttggaaattgtctcttccagtcggtaagtcactattcatcaaccttcatagctttcaaggcctctttagcagttatgatcgcgatggcttccctcatctcatcgggatctcctcagagtgattcttgaacagtttccttcactaaaatgtggtcaactttttaatgggatgtaatgaggcccactttttagagattttcagtggtcacaagctggcccacttgcaattccttgcgtggtaaggacttgtaaaaggctatcctctcctctagctccagagtcaagggtgattggggaaaacaatatagtagacataaaatgcatatccagacataacaaaaggaagaaaaacaagatgtgaagtttagggaaaggagagacacttgctgtgttaaaatccaagctaagtgtgggaactctcttcaataggaagatgaagtgtagaagtagtaatctcggaacttgtgagtatacttcgtcgaactcatgggacatgctacactcttagaatggcattccagcctgtaaaaatccaacttttctttgtggcccctcatgggatgagatttaatcttgtagaagtacaagatcttatccaacatcagtgcagatttgttgtgttgagcacaaaggatgtaccatcctgacaaaagatggtacacgtggggaatgaattcgaaaggttccactccgaccacatcacagaagttggcaaaataacacctcaatggaagatgagcacccatttttatatgagcccagctccaaatgttgaagccctcatttgtgcacctactgggcctttcattatgaacagagagtttgttctaatacagatctagaacacttttgagccctcgttgggtctcatacttccttaaattgttgtatatcccaaatttattaacatgttggtccatctcccatggactatcgttgaggaccaatttcggagaatcctcttgctccagaacttccttttccatgtcaatctcatcttgctggatcttcttagacataatttctacaaaaagaagaaaaataaagtagtaaactacccaaactacctaatatagaaaaagaataggggagtcctcccccataaactgcttggagaggtcccaattaaacttactatccagaaacggaaacctttaggggtcatttgttacagttggaaagttaggaacagggaagaggaggaatagagtaaaaatcaacgaaagacccaaaaccagaagaatttttggcatagaaaattttttccagcacttctactacaaaatgattaatcttaggaattcctagcacttgaacataaagtcaacatggcctacaatgcctaaatctaccaatgataacaatcgcgcaagtagaaaaccctaatttcattcaaaacaaaacatgcagatgcaatgtgcagctataaattcaaaaaacttaatcaaaaagagagaaagtgaaacgatacatacttgatagtgaaaacaaaggtgccaagctgatcgtcactagattaggttagggaagttgagcacaccttttgcgaagatgaggtgtgaaagtgatcaacaagtcgatttttgtattgaagtccagagtcgcagtctcctctagcatgaagttagcgatcactaggggtggatggtttggaaactctcgaaccctaatcctccacagaagttaaatgtagaggtcgatgacacattccatattaatttaggttgttcagctctgagttcacttctaattctcaaagaatgtagagaaaacttgaggttttgaaaggttaaaattttgaaattaggggaaaagtggtaactagaagtcataaattaagagtatttatactcgaagtgtcaatccacgtgagaaggaatggacaatccacgattgtctctccagaaataaaaacttcatccaatggttggggattccaacagtcaaagcgtgtcacacaattaatgctccctggaatcaaggtgcagatcaatgatgaagatgctactttttaatttttgcgccaaaaagtgaacagttgttaaaatacaagcatttctagaaagtagctcctccgtaaatgtacccttccactactaagcaactgccacgtatatgcaccatgactgaagatggaagttaccttccatgatcgattaacacctagaaagtcatgatattacttctaattctcctcatgtccatactaatggaatgaagcaagcttttaccatacacaacattctggaagcttaggaggtaaagttatccgtgtttcccataaagagacacatggaatccaggtcagcatcaaaggtccatcaatgggccccaaagaaggaaatttgggccaagcccaaaatgtataggaccttctaggaacgtaccgtagctccatgattagatgatcttctgatagtcacaactcgcatctagaaggaggttcagtaccgtgattctagaagagttatgcagcgtgttcctagaagaccaatccaatttccctttttattcctacgcacaaataaggaaataaatgctcccaaatctcgacaaaagaccgtatcaagctaaaaggggaaacttcctaaacaaagatcaagcaattaattcacgattaattttccacaattataggacactattttgaccaattcaaccgtatctaatctacctagtcagcatatcatcttcttcatgggctgtacttcacacaaaggcccaagctaggtaattcagtataaactccccaatagagagaaaagggaaacttagtgtaattctctaaatactataaatacccaatgaatcctacagattaagggttgaattctctcaatatatttgctcaggcaaacttgagaacttacgctcattgtattcccaaaagctttcctagctcaaagttatgtagactaaggctcattaacgccccaactacataaaacctatttgtgtcattcttatttttctcttttaattatttatttcttcaattctaattatttttaattagttttctgaaaatcttgataaataagagtctttttagaaggtctataaaaaaattcccctatataaattgtatatatgagtagaagatatattccaataaattttaccaaaataaaaatatgagaagaagtagtaagaaaaaataaaagaaaatatttcccataaatttaatatgagactttttattttttaatcttcaatacatatatgtataattaatttaaatttcataaaattatactctatattctcacaaatttactttttctaaaatagaattttgtagttggccttgtacatcatgttggatctatttttttcaaatgataaattagattttgtattttttaaaatcatacaaaatatcccttgatttgattctttatcaaaataaaagttaataataactcaactagagttgttatgacaaaattggatacattttctgcatctgttcttgctaaaaattattttttaagttggttatatataaaaaaattaaaaattgagctcatagtactatttggtataattttaaaaaaaatacaagatctaatttattattttacaaaactaaggatccaatcaataatatttacaaaacacaggaaactattaatcttttttaatttattgattcaataatgatatacatatactctcaatttacacaccatgtaaatacttatacatgttagataaattaataataaacccaagatcaatttgtatataacatagaacacaataatactatataataattaggtatgcgtacttgattgatccatagtaattaccacaatttgatagtacaatactatcaattaagtcttcctccctaggtctctaaatcagaagcagttttacttttctgattatcaaaagtatacaattatgatgagatgatatgtatttatagagttagagagcggacttagctacataaccctagttagattgggtctgctcttcaaaagcttcagttaactagaaaagctcacacttctgttttacctagactttatacacaaatgctaattaacccattaactattgatcaccaacaatatgggctaacacagcaaagaactatcca

SEQ ID NO: 111950 - DNA, 7298 bp, Cannabis sativa
  modified_base (7262)..(7272): a, c, t, g, unknown or other
tagtgctaattgcctttactaaaccaaattactagagcggtcattacacccaagctccaattctatgaagctcgtggagggggaatatttatatctatacttggaagtgtttggtcatgctataagtgtcacacttgtgcgagaggaagaaaaggtccagtacccggtctactacgtaagcaaaagattggtgggtgcagaatctagataccccatgattgataagttaacattttgcttactgaccgcatcttaaaagttgagactatacttctaagctcacaccataaaagtactgaaaaatcatcttcgtcgggtgcttcaaaagttagagtcctctggtatcctattaaaataggatatggaacttagccagtttgacatctagtaccaaccgtgagtttcaatcaaaggccaagccctcgctgatttcatagtagagtgttccaccctaaatgacctcccagaagagccagtcctgaaactacccatctggaaggtctatgttgacagagcgtcgaatgagaaaagagctagagcaaggatcattttgatctctccgcaatggcactaactctagagtgccctacgttttaatttccacacctccaacaattaggctgaacttgaagctatgctggaaggcttaaaattgactagggaagttagagcccagcacattgaagaacatagtgattcccagctggtggtaaatcaaagattaggtggtactagatggaaggtttaaaatggctgtttaagtcataatgtcccaggagctactacaagggttcaaaggctacaacatccgccatgttctaagggacagaaattcatttgtggatatgcttgccaaacttgcaacagaccctgagatcatccaacacgaagtagtcttaatttttcacctacaaaagccaataattgagatctaggggataaatgccatagtcaacaactctcattcttggatggcacccatttacaactttatgagttcgagagagcttcccacagataaagccacctctaggaaattttagtaccaagctccccgttatgtgataatggatgggaagctttactgaagaggttgtcaatgccatacatgaggtgcattactggaactaaaatcatcactgtaatccacaagattcatggtggcttttacagagatcatacatccagacctaacttatcaaagaaaatccttcaccatgggtatttttggtccacaatgaagaaggattgtatagagtatgttcagaaatgtgagcaatgccaaagatatggtaaggttccacgtgcaccaccaactgaaattatactcatgagtagcccatggcgttttgcagtttggggtatcaatttagtaggatccctccccacgggaaaagaaggagtcaaatatgtaatagtcccagttgattacttcactaagtgggttgaggcacaaccaataaacactgtcacctcaaagaagaccttagactttgttatcaagaacatcgtgtgttgttatagactttcatacaagattgtctccaatagcgaaaaattgtttgagagcgaacacttcactgattttgtgcccagtatggaatcgtgaaaattttctcagttgtagtagtaatgccaatagaggacgcaatcccatctcatcgacaagatacctacgaccctttgtgaaaccattccctgctccaggtatcattggacctaattgaggtactccaagaacagtcacatgttcagctcaaaatgcaccaacgaaagattgtctgacactttaattccaaagtgaaaaatcgtatatttgatgttggagacctcatcttgagaagagtatttccaactttgcaagaaccaagagtgagggtactcgacccaaattcgtaaggcccatatgagatacttcaaaaagtgggtgaaggaacttttcaacttaagatgatggatggattgagggtccctcacgcttggaatgtagaacacttgcgttggtactaccaatatgctgaggtgaccaagccttgatgtatctcttaagttttgtgtaatatttttagaaagtctcttctttatgtaaacctttgggtacaatgaaatgaaaatagaagaagtttacaattaaatttacattttttgttcttaagccacaagctatgtttttaacaagtgaatgggaagttggagacatccaaacttcccagcacacttaggggttactatacctagctttgtatacccctaaaaaatgtacagtgtgctatatctatttactttatttatacatgtcaatttttctaatgtagcttgcatttaacccaaaaacaagatacgttttcagccaaatttcccaagggaaagactttcctgaattccttcttgagattaaaaattagtgtaagccctaaaatgagatgcgtttttagccaaatttcccaagtggaaaaattcgcttgaattccttctcaagaattttagtgtgtttcctaaagtttaatatgttggatgttttgaaaagtgcaaacggggaagcctcgcctgaactcctatgtgtttctagacttaccttggtcaaagagtattgcctaaaatccataacgtgtgcggcttgtgccctagtttgtgtattgccttagtggcaagagactctattcgataaagtccaggccagggaaagtcacctaaatgttaccacagttaaatgccaatcgttgaacaaggggcaacacttgaaatttgtaacattctcaaacacctttcccaaagcccaactttataagagcattggtcaaggaacgcttaaaacatggaagctcgccattttgcgagaaaaccatccctgatctgcatcctttgtgtgacattacaattaagtagttaaacactgaaggcactcaaaaggcgctaagactctgcgaccactcaacaatttgggaatagtctaaaagcccctttacgctgtcagggtatttaactagcttaaatttataactaccaaaaagggtcttaacaagaataatcctacctaaaaataggaaacaagtgtttggcccctaaatacttcctaaatcagtagagggattaaaagttaaccaaggtctgagttcgaagttttggtcgttggaaccaaaaacctctaaacaacctaagatagcaacccttaaaatagtatagcatgcaaataaaacagaataaaagcttagaatagaacaagcaaataaaattaaaaggcctaagtttatcttagtgctctgcagactgggcataataaaatgtctctacaaaaagataatgtcatatactattacaaattgccccgcggaccaggcatgaaaaaaatacttctgcaaaaaattaagaactgtcttaaaaaggatagtaagttaaaaataagagtaaggaatgatcacgggtggggagggacattagacttaaggttttgcttttggattttctcttcagaattgtccttctagaaatggtcaccttccccaaaagaaacctccccatgacctctgtagaatgattccctccagcttgtttgtcctcagcatccttagtttcaacttcatcatttccattttctaatgcctcatctttggccccgtcataagtatctaagtactcattgatgtctctcttataaaatttgacccaattagaaaagtcctctacatcttcaccaggatagcagaagatgttggtaacactctccgataagcgcgctaacatgaggacatgggctaggtttactgagtaaaccaaggcttgatgatgagacttttgcttctgtttatgctcttccttcttgttcgcaagctccttatgcaaggtgctgacctcctttagggcttggacttggccttattggaactaagactttatgtcctataaatcttatatggtcttagtatttgtctcaatgagtctatccttctcctcaataccagcattcaaggtaataacctggtcttctgcgagctagcaaagtgcctcagctgagtcaactttagcctgcagtccctttatgatattgtttttgtcctaaagttcttgaagtttgacggacatatggctgtcaagggcctccttgagctcccgagcaagaacaaagttagaagattctagcttaacatgtttggccttgaatttttcctccatttggttctttaaatcctccttgtaatcattaaacttccgcaaatacctcttatttgccttagcatccgcttcagcgcagtattgttcggcctcttggatgttcttatcaatcatttccatgacatccttcttgatactctcgattggggcctctagtgttcgtcgagtggccaaggaaagatcaagttgaatcaccatagagctcacttccctacatgtacgctttgcgagaattgccatctaaaataagaggaggagagtcagcaaaggaacaataacttacaacaagtaaaaaggagaagctagaggtcaaaataccccaattatctgttacctcatggagttagccaatagtacgggattagtcctactgcctatcgcccacttctcagtggtcaattcactcacactgactgctatgcccgctagcaagtcatcactgaatggtgccaactccctacccaagcgaggcacgagttgtttactgagaataggaaggtccatgatgggtgtagaatgccctgggttacggatgccttcagttattttggccctcataattgcagacagctggtcagtcctagtttggacgatgctacatttcttagcaagtcaatgtttcaaataactatcagccttgcgcacttgttctgtgacctcagcccctatattagtagctttcaagagaaacttaaatggcaaaggtgggattttgggcaaacaagtttggaactcttgggtttgtttttccttatcagttttggtcgaagaagatgaagttggaattagttggttactcgggggttgttttagtggttttattttggaaagttgtttgcttggttggatttgtgttaaggggttagtggacatgagaatgatttgcttctcattagcatttttatctgcaaatggtgaggtgtgttgacagcttgagtcatggagaggtgatgggactgttggttcctagcaggaaggccatctgccctgacggacccagaagcctgatggtctcaagccttccaggggataaatctctagccctctattcttcccttttgggatgaaagtcagtgctagagtgttttagtgttgttgctgccttcagaaataccaagccttccctggaatcgtcatcgtctgaaggaatcatgggttttgtatcttgggtcacaacattagtaaaaatgggaaattgaactattgcgttgcttccaatgctagtggccagttgagtcttttgattgctcttaactttgggttgaatggctaaaggatcaaatgtatggctggcctcttgagcgccagaggtttcgagggcaccaaaagctttggccttcttggacctagctttcttctgcctccctttaccatcgacctcagcattgaccttctgaatggaactcatcaagtcgctcagcatcttggactcgagtgtatttaagaagatcaaaatacagcaacaaccaaatcaattgaaaaaacataaaatggtaaccaaagcaagcaataagtaacacagactaaagcagcagagatgcaatgcaaatgcaacctgaaacaagtaactatatggttcccctcttgcaaataaagttatttcttcccgaccaatgaagttgacgtgttccctgaagcctgagaagagcatgttaagaaaggtatccactctaatgatattcgcgaaagactcaaggttatctgggttcctaactattttatctaccctatcaagataatccttcattggatacttacacagatccaagtttaggaagtaattgtcaaaatccccttggtctctcactaacatccgagataggctggggtgcgaattacgtagaagggaattttacctcttccagaagtacttgcctcagaagcatttttgtccgcgtatgcttccaagaaccttgcatgtatctcttcctcctcaataagggggtctggatgatgactttcccacgtagctacgagaagttcctcatcttttgctgccttattcatcagaatagacaagtccaaagaaatttgttctttgagattattaggggtctgaggttgacccctgccgctaatgccatggatcctctggaaatttgcaatcacaccatgctggagcaacaacttagtggtcaccaaatcctcaactttcagttcttcctctgaaaaagcctcatagaaggttattcactattttaatttgtctattagcgttgtttattagcagagacatagggacgaattctttaagaaaaaaactgaagtcaagtacatagatgggactgcattttaaactttcacaaaaaagtcacagaaagatgagtcttatacttagaattttgaaatctagtgaaagtgctgggactcgttttagagggaaacctgtcgtggagaaccagtattcacatagatctaggaaatgcgaggaggtgctagttgggcattgagtgtgcttgtacttcttgaggcattcgaacctaacctttgtatggtgcccctgcatgagatgcagtttcacctcataaaaatacagtatctcctctggggttggagcgccttggccctgagatttttagaatacgaaccatccggagagcagtttatatgaaactgaaagaagatagaaaggtgtgattcctgtcttaacgcaaaattgagcaaaatatgttctaagtggacggtggggtctggatgaaatatatgaccaactctatgccccaaaaccttccacactatgggatggagattccccgacaactgacatcttatgccacataagtctaagaatgttttagatgccgccatcattggaatacgcctcctgtaaaccataattcctcagctggttgggtcgttgatccatctcccacatagagttgttcagtgtcaaaggggatggagaggtagctttgcctttgcccttttcctttactttccctttttcttgaatgtctttagaaggcccctctcctgggagctaggtcttcaacacccaaacacgcaggggtgcgttcactgaagatgctctagggacctcttcaggcccatatttccaattaaaagtcactgttgttggaaattattttacnnnnnnnnnnnatctactcacaagtatgttattaaca

SEQ ID NO: 111951 - DNA, 7635 bp, Cannabis sativa
atagattaaggggcataatagtatattgtcataagtacagggggtaaaaaagataattattcttaaaattaatcaaaaatagcgtttgattggaaataataaaatgaaaaggaaactgttattatttcattcttttgattcgttatattttaaagtattaaaataatattttaatattttattttaaaaaataaagaaagactattttaataatatttattattatttcttatacgttttaaatataatttctattctccttttcattctttctaacccaataattttttgggtatatatatatcatacaataacattaacccttctttttgttctctattggaaaattcaaccacgattataaaaggggacattgttagcaccacttttggaagaaaaaaaaatccagtaattgtaaaatatagaagtattgcaacgaaagtgccaacaccagtatacagtatactatcactaaaaaatatatgccgactaaatataacataagctgaattcgacacaataaaattttatttctttttttgctactaattagcgttttctttttcttctttttatttatttgtctatcaataaaattaaataacttttcagatataaaaattggactcttaactaatttttctgtatactgcggattcgtagattcattaagaacgacattgtttattaagtggcagaccaaaagtgcatggagataatacgatctccaattaacccaataaaagaaatgcacgtgcctacatatgagactaaaaaagaaggcatcaatcatcattacacactggtgaaacaacgatttggtttaggactagtaagcatcatcatataaaccatacaacgcatcaacagcatattttgattatcatgggttccaattttgatagctttatttcctatttagacagttagaatggcagttatttacaatgttacaagtaccctgaccgtgtttcatgcacactactcctcccacttactccacccaagctgctgtttgagccaagatttggaggcatctgggagtgcatctcagccaactgcctcactcgtagcaaaatcggggcagggatggggaccgacgcatgtttccgggaattcatctacatagttgaccacagaaaaacaaaaacaaaaattaaatcaaaacaaagctaaattatttatttaaggataacccagtatttggattcgatatcataaattaaacagtctgacttaaaaaaattatctccagatatctatggaaaattctggaaataatagcccaccatgtcaaaattgggtggccaaatccaatttccaagtgcattctacttgactgacaataagcagtcagtgctgatggccgcagataagtaataattcagggacattttgtgcatatttgattcagttttggccaagtgactagatgattaatataaaattctcaatattatgcaatgagttaacatcaagaatgcatatgcagacatggtcgaccatcacaaatttagaaccagaaccaacataaataaaggtgattagagaaaacaaacaaaaaatacgtactccatcatcaggaggtgattgtgcaaagctagctttcagtaggttcctccacttgtcctacaaaataataatcaggtttcaggtttccgccaaaaagccatgatatcatatcaacatatagtggaagcgtcactgttaccaagtagcaccgatatagcattacaaacagcaaacaagtaccttaagatcaacagaagtgcggtaagaatacgatgcaaaagcaagtcttttaatttcagaccatctcccagcaccacatttggatacaccttccactaacttcataacctcaacaagagtccaagctctatgatgtttccttctcattccacctttcacagtgggaacagttgttatattatcatctgaagtgtcttcagatgaatctgtctgttttaaacccaaagtcttgcctgtttgaactctatcgatggcagaacattgcttatcattttctgcgtcagaagtaagctacacaatagacaaaacaatcaggcatcatacacatacatcagtaaggagatcaagggaccagaagaagccaccgagctacaaaacttcatattatatcaacctgccattgggttttttttttttttcataatactggattttacacttaacgtctctaaaaactataagacttgttatgcaaggactcccttagactttgtgtagtaaaccacatgtctaacaatttgagctatcctgccacttcatatgaaagtaagatttaacttcagcactgactacccagaactccagaagaccttgatcatgggacaatgtatggctgcgcatatgaactatggtgtcttaaaatatccctattttccttcgttcaggaaatatattatatatcccttaccattccagtaaacaagcatagttcacccacatatgactgaaaaatatattatacgacattataaatactaagttggactcaccagtggctcaatctgttctgaagcagatattgactctgagactctattcattaatacactatcaggtcgagaactaggtactgcaagggccttcctcaccacttcagttggcatgcccacactactaggatggaatctctatgcaattgtaattcaaaatcacttcagttttctctttcttttgcattaaataaaatctagtgctatttaattttcatgataaatgaggaatgaataaaaatcaagaaagacaatgctaaatttataatgacaacctactctaatttctaccctcatcaaaatcttgattagacaaatttatacagataaacaagctcccaagccaagaaaaacgcacttttaagtttcaacaatatacaatacatgctcaatcacctaaatttcaagagtcaaaagacaacaaatgtctaaatttaataaggttagtaaatttattccaaagaaaacttaaaatcgccattaagtccctaatattctatatccgtaatgtagtaataactgtcacagatatttaacaaccctgtacttttcagatgatatcagctagacactttttttaaaataaaagcaatgatcatataattgagacatgtagaacttttacgtaccataagagccttaatatttttccttggacggcttcttcgaattcgagaaacgcatggaacctgaaccccagatccaccaagagagtccaaacgtgtcaacatgattctttcattaaaagagacactcttaacaggcctgagacaggactttggagaagtacttccaaatccaacatgtttggcagagctatgcacttttgggctatagtctcttgattcagcttcagaaagctcttcaatatatctttttgtaggcttcctaaccctctttgcagctctctgttctgcatgaagatcctcagtttcaaagtcgaactcaacactttcattgaatctctttcccgaaacaaaattgtgatcttccatttgagcatcacagttagttggtgaattattggagttgttgattgtttcaacttccaactccacagaaccttctgcattcttacagctttcttcattttccttattgaccaatttattgtccttgattgtgaaagttgtggttgcaacatcacaagaattagtcaaccccattgtaatcctcctcttaagccacaatttgtctttgacagtagtttcccgcccaaaagttgctttgaaaaattcatgaagttctttaattgagaggttgtccaagcatatttccccattcaacttataaaaatcaggtttttgattattgcagacatcagaagttgatggtgcactatctggttgttcatctgaaggtttagacagctcctcaatgctccctgataaattcttgcagttgtcatcaacaattagtgctgatgaagggacaacttcctgcgtgcagatttaagagtagatttcttaccaatacagacaatttaacacgctaacgaaaaaactctgctgtctgctttaataaaagcagaacaatcatcaggagctccacaggattcgaggagacacttcctattacttttggtaacatcaattaaatgtacaacaaaatagttttacagctgagaaggattcaagaaatttaattgatcatactgaagtttagaattgattttttcttgattataatgaatatatgtatatagcaattaacaatgaacaacaggagtcaagagtcaagacaaagctattgcagcataaatagaacagtaaacttcaagcattttaaactggtcattactttttactagtactatctctgccacaatccaaattaaacacctaaaattcattagagaccaaatttccatccaattggaaattcttcctaaaagtaatttgttgacacccactaatcaatgaaagctcataatgatgcacaagcaaatccacaattaaacataaaaatgctcgaagaagaaagcacacagatacctcaaggctcgaagtcaacttttcatcatcagctttcacatttccggaatgaggcaaacctgcaacatagtgataattggatgtgaaacaaaacgtaaaaaataaaaagaaaaagcctaggcgaaacataataacttttggaatgatagcgaaagccaatcttcatctacaataccagataaaccatctatctcattatgagtatatttctgtaataacaacactgcattaaattgaatagagatagagagaagaaatctacaaaaaaaaaaaaaaagcctcagtgatgttcttaaaaacagcctaaatattcctgtgaaattagataaaaacgatcaaagccacctattcagactgaaaatatgaattttaagacatctacaagaaactgaagtggaagagaacccatcatttacccccttcttcaaaaaacaaaaaaggctagaatctttgcagttgatagatacagaagtcttgatttgattctgaaaactaaatacattctgtgtagcttgtatagtttcaagaccatcatagtaatagtaaaggtagacataaatatgtattaataaaaaaataatggtaaaatgaaaaaccttctgaactgtccaactgaagcatttcactaggaagtccatcatccgacgagcactctgcattcttcccaccatctacaagcatttcagttttgtcatctacaagaaaatcctcaacttccattacttcatcgtctgttgcagggacaaatctcccatcacattcaacctgaatcacagaacattataaatagaagaacaacaaaaaaaaacagcaattcatagagcttccgtattaattcaaaaatatcctatacagtaattctaatccctagccctgtcaaaaacattgcacttaacaaataatggctgcagtgcagtcaaatatttcaggacatcaaaatcaacaaaattaaccattatacaagataatagatatctgttttaaaatacctaacttcatatcctacctacacctacactttcattactcatctaagattgggcctgtgccacatccaactctcaagaagagaaggggatttcaatacattttcctgccttcacaagcatacaaaaacacatttttgtacataagtgaagtgaacaagattaaaaagaatattaaggagaaatgtacccgaacaagcttgtatacaactggatcggcaatatacttgggtgaagacaaagaagaagtactgttttcaaaaaacccactttcctcaaacttccattcatcactattctcaactccaaccactgtttccatgataaatccaccacatgcaactcaaacacaccaactgtaaaatcataaggataaacaaaaacaaaatgacaaacttttaaaatgcaggctggctactataattaatgcaatgtgtgtatataattcacaatttagcaaataacaaattatagattttttttttaaaaaaaaaataatcttatcttatcttatacaaagttaataaattagaacaatagcaagacatgaatctttggctcataatactaaatacaaaaaaggtagacaataaaaaatcatcaaattcaaactccattaagaagaaaaaaaaagattccatatttgcagccaattattaaacttaggtaaaattagcaagaaattgaaagaattcagtcattcaaaataaaaatttctcaaagttaaaagtaatgacccgtgacccatgtacaaattggtcataaataattagaaagtaagagaagttataccaaacccagtctcgaaatgctgtaattcacatgcacaatcgaaaaaagctcaaaattctacccaaatgaaaaattaaagagataggtggggagttctcaccatagaagtgactcggtccttgcgagtaggaattggaatatcagaaggtccgagactgagttcgagtaaccgagtcgctgagcaagaattaggccaataatcttctgtggcacgatctttttcttttgtgaaaaagaattggattagcgtgcgttcgagtcgggtcgaatcaagttgtagtgagagcccaagcgtttaatttgctttttttttttggctcgcttttttagtacgctgtgttttgttttccaattccggactcgaaagttggtatgaagcaatttggataaagagttgtcgagtccggaagatgtacgacgatggtcttgcgtctgctgtatggaccttattccaccaaagtccaagccaactttaggtcatgaatataggcccgttttagtaatttgatttaaaaaaaaaaaaagctatttacaaaaatatgaaaaaatgaagatatattttgatagatatagcataaaaatttaattatcttaaatatgatatcttttaaaaaaaatgtcattacagatttgagtcaacatcaaaattcaaaaatagtacttacataaatagtctgtaagtatcttttttgatttattctatgagctaatacacttcgtctttgtgatattttcctctagattttgatcttgactaaaatctgtaatgacccttttttaaattacataaaaaaatctgtacaataaattacataaaaaatatatcagttggtgaactttattaggtcacatttctacttcagtcttcacagtcttcacgctgcggcttgacttaaaagaagacatggtaagattttagacgtgaattaattaaattatttatatttaaattttagattttatagtatttaatttaaaatttatagttaataattttaaaatttacactaaatataattttgttttttaaatttaaatttgcaatatttttattgggttggctggactactttttttttttttaaagtacctgaaaaattaaaagctaaaaaaaaaactatactcaaacgagtcaaatccaatcaaaaagtactactagaacttcaaaaaccaaccaaccaaccagccccgaaatggtataaaccccacgtttagaaattagaatatgctctttgcactaggactgcacaaaaaaaattgtaaaccgcctaaaccgaataacccgcccaaaccgaaccgaaaaaaccgataaaaattacaaaccgaaataacccgaaaaaa

SEQ ID NO: 111952 - DNA, 3131 bp, Cannabis sativa
gtatttcgatccttattcatagtgtatatatgtttgattaattccgcacttaatacttaaacatatacatttcagtttatatatataaatgtctaacaaagtagggttacataattcgcaaatgattacaaaaagagctgtcaaaatagtaaagataaaatctgcacaagggtaactaattagtcactggtaactatatcattttctaccaaaaaaaaaacatatatatttgacatttatcttacgttggttgttttaaatataatattgacgagatattaatagaattccaatacctcaataataacatcagctaaaataatggtttaaatctagctagtatagggagttaattatatagaatatatagaattaaatttctcattttttattcttagcttaggttgacaaaagagctaaattagataaatatttatttatatttaaatggtattgacaaattttctaaaagctgaaaaccaatatattttgtatttttttaatgaaggtcatcaattctttcaaaatatattaattagtaacttaaaagaagtgtaattatttatgtgagtgtgacaatatgattattaaaaaaacatagtttaatttaattatttatgtgggtgtgtcaatagatacatataattataatttttatctatatatatatatataagtgcatacatggccataaaatgtataaaatatttattactgagtagtagcaaaatgatgctaacataattttgacaaaacaaaaaaagacaaaaagaaaataatttgactacgtacccccaaccaaattattattgaaagaaacaaaatcaattataattttcttctcataattatcaagaaacactcttaattatttttacatatattcttctatgtccacgaaatcataaatgattttatttttgtataagaaatataaatattgcatttctttaatctttgataatcgagaattataagtggtatagtatagctaattaatgggacttaaagcatatacaatgtagtaggatattaattaatttacatttacttgtgtaacccgaatatgcatgattcccagtccacacaacataaatgtaacaccacttgcactttcgaatattctactttaccaaaacaaaacattaatcctcatgctagatattgcacaaggggcatttgtcccttcaactttatattttacaaaataaaaataattatccttcaaatttatatatggcaattgtgtgtattattaataaatgaataattttaaaaaattaaaaaaaaaaaagaaagtatatttatatgtcggacgtggctggagccctttaattgccttcttctgttcaaagggtatcaaatgtttattgtttcatgcaccctcatacataaattataaattttctacttataaaaatcaggaaatatcaagttggtgatattaatcaattactttttttttctaataatttgaataattcatattatatgatcgaataatataatttagcgcatgggatcatttgttatagtataattcaaacatttcaaaatgcatatgtttctcaatatatgtttatatataagttataatatactgtgtgctcacttattgttataattattatttttctatttaaagtatttgaaaaattaatgataccatattttttgtcctatattttattgaagtgtataatatttcaattgttacaacactatatcatgtaatgtaatgaattcaaaatcaagaatgttaattactcaggttaatcgacccttaaaaaataaattcaaaaacgtgttgatgcttttttttttaagcaaacaactgtgttgacttaattttctaactttattatttttttattaaaaaataagtatatatataatataattaatgattctgcttgtggaaaaccacacgctcacacgacatgctgcgtgtcaaaaaaacgtacgcgctaactgtaatttttatccctttttatcaacagcaacaaatagtaattaaagggatacaaatttatattatacactaaacactaaattctcttctctctcatatctaattaataatgtatttaactattaatccagtcctatatataaagaccagactcttacatattattcagcaaaaaagagtgagctgacatagtacaatatactagtatcagcctctggatatacacatacttgaactaatttgtttcaactttcaagagtactgaattaagtaactacttagctatattatcaaaaatgagtcccaaatgtagtattctgattatttcaccatcgtccccatgctactattactattataagattaagaagcagggtgacggagatgatgatggtccagattacgattatgcccccgccgcatgccttcccggcctcctccctgtccccctcgacggagacgatgacgactacgacgatgatgcccccgactatgattatgcaccggccgcatgattaattgcatccaccacaccaccaccctccgccaaattcatgctttttgatattatttatatcgaccctaattaattgtgtgacatgaaaaagttttctttttttatttattttattatattattgttttatttactaaagatacttcattccctcctactaataaattcgttttctttcttataataaaaatatataaattaatatatgaaagatgaccttttcttatttaacctatactgtactacgtactgtattataattaattacttgttcatgtaatatgttctttaattataattttgtttaataataattttctgtgtcaatttcttgatcatctactgttataataagtttcattaattattattagagggtattatttgactctaattttatatatttataatataatgtacgtacgtatagttaccgcaatctcagacgttgtcaaccattaattactactcagaaacacaaacactacagtgatcagtgtgtaactagaaaaatctacatatatccaggcatgtccacatcagattaactggtatggatgaatatagatagatatttatacgagtatcactacaacaaatatagttattaccggcgggtttattgccggcggaactcacccg

SEQ ID NO: 111953 - DNA, 3927 bp, Cannabis sativa
atacgataagtaaataattttaaataatacatttttattgtgtttagaataatcaatttctaaaattaaaactaaggtatcactggcattctaaatcaattgcccatgagcccatcgcaatatatatacgagaaccaaccgactcactatacatactagcacatgtctgtcttattaaagggcgagttaaaagctcaataaagaaatatttttcatatacaataccatatacaatattatatagagcaatttgtggcgaaaattctttatgttttaatttttatacacttaactcccttatcttttttttttttgtggcaaaacctccttatgttttagtttttatacacttaacccccttatctttttttttgtggcaaaattcccttatgttttaatttttatacacttaacctctttatcttttattttgatgataaaacctccttaagcttgctttcttttgcaaatttaaagttttagtaagatattaccgttaaatactaactagattactactcattcgacttcgagatttttactgttacatatatacaagtgtatacaatggtcatccagttgatatttaacgataatatttaactgacgtgttaaatttgcaaagaaaaataaacataagagggtttcaccaccaaaaaaataagataagggggttaagtgtataaaaattaaaacataagggagttttgtcaaaaaaaaaaataagggggttaagtgtataaaaattaaaacataaaagggtttcaccataaattgctctattatatattattaatgtactaattaaattttagcaaaattatataacttaattaataaccataactaaataattttacaaatagaaacatttatcttaaatatttatactatctattcaaatcatacatatatagagatcataacttcaatatcatacacatactcgtaacataatcatatattaacactataaaagtataatgtcataatcatatcgtgttattaccataatataggtgtatcatagtcattatatacataacttagatctaacttagccctacaataacttggacatgcgtagccctaccattgttataggatagggtatctctacattcaacaacatcgtcgtatcataatttaatgatcttatcccgtatcacaccccaccgtggcccctcatatgtactcgagatgttagcatacaacatacatcatatacaattcataacaactataatatataatttatcataatccatatcatctccaaaactatacattcacaatatcacgtacatactcataataggaaaccttgaatcatactctaataaataatctatatttatacaatttaacacacaaaattacctaatttccttaccttatgctcgttataaatgtaagctctcgatcaccttctaagtcttatcattaaataacaataacttacatttagcaattaacttagcaatttcgtaaccccaaaactacaaaaaatttaaattgaaatttgactatgaaaaccttataatttgccaaattaatatttacaaaatacgtagataattgaaagagttttccattggtatccaaaatattaaaattggagttataactgaggagatatacatgttttaccgaactattttttaaaaatcctgaaacgaacggatttcaaattacaacaaccagatgataattttttacttagaaaaactctgaatcatagagaattctcttcatgaaaaatgtagataatttattaagctttaaaatgatataaatatctttagaaacaaaccaaggctgagagagttatcataattttatggaaataatttcttagcaggaatatagagtaacgaattacatggcacaacaaaaaattacaaacttttgacatagaaatattctgaaccagacaaaaattacaaacttttagaaaatttaattccatttcaaatgacacaaaatatttaaaatcagacttatattcaaagagatattgcaaatttacccaaactgattttccaaaaaaattaatgaaatgtgattacgagatacaatcgaaaaacataaatttttattctagaaccattctgaattgatataagacttcttcataaaaaattataaataattgaataaactttctagagacaccttgattgcgtgaattaaatataaattgagagagatatgcctcctttactgagacatgtttttgaaaatgaaaattataatagatataaaccctagataattctaactattgaacaaagaacatgtttcttacctctttaaaaatccttaatatgatattttaagcccgggtcttgattaataatccaaaacttcatgaataaaggagaaaaataagaaaataataggaaagttttgaaatggtttggcgaccgtgagaacttgatgggttggtcaaagatgtcacgacaacaatagaatgagttataatagaattatatcagactaatttaggattttgagttgtcggtttagtcaggatagctagaaagtgactaaaatgccctaggttatattttaacttaagtgattttggagggtaaaatagtcagttcattgggtagtatgttaatttgtcttatatggatttattttaggctgaaatagggttaatattaggttttttttttttctctttttaatttaattaaatatttaggaattgaagataaaccaaaatttctcatcccaaatttcaggccaattcttgttagaaatcagcattaggtgttctccaaaactttgaggtaaggttctccaccaatttttgatgatttctaggttgtagattgagtgttgtttggggttttgcttggtttcgaggttgtgggttttgtgagagttcagggtgtgattttaggtttaaattaggattatttaagtatgctttggatgcattacatggctgttaggactagaatttagagaattaagtttaaaaactcaattttcactcaattatggtggatttattattttgaggtattactgagtattgattgcttgaatatattatttttatattgttgaactgttcaagaaagtttgaataggtttggagaagatttggttggatttttgaagtaaaaattaggttttccttttctactagcaggaaccggtggaccggttctacatgtcactgaggaaccggtctaccggttggccaacagggaaaatcctagtttttcttcgaagctggtttttactcgagatgtttttctagaatatagtttagggtattttattaatgtttaagctatttctaagccaatgggattagggtttgtctagtttcaaatttaagattaaattcaaattttagttaagttattcatcaagtttcgttgccgtgacataggaccctgggatcgtcgagcattgttccacttaggtcgatccgtacacctgatattggattaaggtaagaaaagccaattgcacagcttagcatgtcaaatgtgatatgattattatcgtttatgactcgattatgattgaggtaaagatacggtaattattagggtgagaaaaaaatctaagaaactgaccaaaccgagtacaccgcccgcacactgaaaaaactgaaaaccgaaaaaaccatcttcggttaaaactgcctttgcactggcaaaccgaccgatgaaactgagaaccgaccgaacatatataatataattatttttgtacatatttgatatacaattttattaaactagttttactttttatcttttttatttaaagtctcaattatttattactttactttattataatttaatgtatttacatattatatacacacattcataaaataatacgagttttttaatataactcattaccatattagtagcacaaataatttga

SEQ ID NO: 111954 - DNA, 3378 bp, Cannabis sativa
taccgcctgacagtatttttatttttataaaaaaaatatttttataaaaaaaatagcaaaaaaatagcaaaaattagtataccatgtaaattttcctttatattctagctttttaatacgtgtcattaccatattatagttgttggaaatatgaatatatcacatatgtaataaataaaacacaaaaaagtacatcaatacaacaaaaattttaaactttattttcataccctaaaatattcaaaattttctatgaataccatcatagaaaaaaatatgaaattaaatattccacggtgttaccatataagaacgatacgtagtatgtaccgttagcgttacaaatttaaagagggacgtacactttcactataacttgtaaagaaagaagcatgtgtatgcgttaacttacaactaggtagtttgacatatatacacacttccatatccaaaccaaagtacatccaatccaacaaaaagaaaaaacaataggaaaagggtatccctatatcacctactgctgacaagttacgtttcgttatcagtttattgttttgtgagttaaaaaaggaaagaaagaaagaaattaataataataatggtgtaaaatgttaaattcaatgaatgcttaggcgggaaagttggtccaatttgccgctatggcatccttttaattaggtattgggtaatgtctcgttttggtcttccaaaccccattttaaccataacaattaaccaacccccttccttctttaattacactataatataattggctacttcttcctaactctctaaccaagtatcatcatcatcaagtagccgccaacccttataatattagaaattttttttgtactctcctacctacgtctagatagttttaaaattaatgttttatataacagtttaaattatggttatttgagatattttatcgaattttaaaaaatttaaaataatttataatacataaaataaggttcaagctgtctatttcacgcatgtataaattaaaagagatatttgcgcgacaacttatttaaaccttatttttaatacgcgttatattataatatcttaaataactatgatatacactgttatataaaaaatttattattaaaactatctagatgttcaaaaatgaaagagtctattagtaaaagtaggtccataataaattattaaaaaatatacactaaaatatattttcacagtccaacaccactaaaaggtactattatattattagtataatttaatataaaattttatatattttaatttaataattattattcaaaatccttacctacttgtaaatgccactttataagattattgtactctataaatacctaataacatgatctttatacattattgcatttgcacattcatttcttcctggtcttaaggcatggtttcatcacatggatgaaaacaatttcaaagtgtcactttattattttgttatacataatctaatattgtaaactatatactactcattactcatacatttttcgttgggacaactaacctacaagagagcttagatttgggagaaaaaaaaacagtattatggaactgaaacatgttattgaaaaagccttgtttctttggaaaacgtaaccggagaccaggcgtgttatttgacatttgtctttctgtactaatatatttttaattttattacaacttattattggttgagtttatcaaattcaaataaattattattattattattgggggagtgaaagaaaaaagtcaaaacccatttaaagggtgaaagaaacgacgtaccatgcttcacgcaacattaaattaatgcattaatttgtcaatgactcgataaatgaatgctatataactcttatctattatagaaacaactagtactactaatcagtaacaattaccccatttcaaaaaagcgaaaaatagcaactattattattaaattttttcacaagtcccaacatagggagagttaagtgacgatgaagtaatagttattatagttttgtcataatggcattcaataataattcacaatcatttgtgtataaatgctagaaggtattagtagtgtctattatttttttatgtgttaatatcgctattattggtctaactaactatctgatcttatataatttaatataataacttttagggagtattgctagtcattcgcaatgcaacatgtcgagaaggtactaggcactactggtgtctaatatcaatgctcaaaaattatatacatttttagtgaagaattaatacattttcagttatttataaaacaagccaattttattctctataatataaccaaaacacatgtgtaacaggttaaaaagtacaatatatatagtttcctggaactttcaatattttctttctcagaatttttagttattgtaattttttttattcaaaatttatttaatgaccccctcattttgtttttttgcactttgctcccatcacaactacttaattataactcatggaaaaaaaaaataaagcttaaaaaaaggtttttgcaatatgtaaagaatttcccgtggaccaagtgataagttttttttagtagaaagtctccaccactaaatattaagagcagcaagcactctaaaaagttaggagtgaggatttattcagatataacatcagctatcaatagttcatggataaaaataagattattgcgctcccaatcatactactactacaaaataagttttgccaaaaattgagtaacaacattacaatttctaaatcaataaacaaaattaacatctttggacttattgcaatgaccaaaatatatctaaaataagccccaaagaagtaataaaagacacattgttcttaattttaaaaacaacactcaaacaatcagattcaataataatgttgtcataccaggcattgagagccaatgcttggcggatagctaaagcttttgcgacttcagggtcgaagcggtcctccaatctccaacttgtcgaagcttgaactgcaccaaactcatcacagattatcatacccaaaccactacagttgcaaccaaatcaatggcaatatcggtgttgactttaaggctacctagagaaagactcaaccatctatgacccgtcgaagatgcttcaggacacactgccgatcgagaaaaagaactagccactgttgggcttgaagaagaaggaatcaccgtcctttgctttttattttgaaagtctcgaaggtaatctcagtacaacatttgacttcattagcggcggacaactccgccgctaataccccctaaatcggtcgttatagggtattagcggcagatttcagccgctattggttcgccgc

SEQ ID NO: 111955 - DNA, 1962 bp, Cannabis sativa
  modified_base (54)..(57): a, c, t, g, unknown or other
ggtacttacgccgctaaaaataaacattgggtttatgccacttacaaacttaannnnttgggtacttatgccgctatttacacttatttttttttatcaaatccacatatctaaaaaaaattatttctattattattttccttttaaaaaataaaatagaaaaaatatttatgtttcttaattagaaatactttagtgaagccgttacttattacaattacaaaaaatatatatatatatatatatatttttattattatttaaaaagaattaaaaatttgaaaattattataaaactaaaggattatggttgaattaaaattataattaacaacaaattttgaatattattatattttctttttattaatagtatttaaattaaatatttttttgaaaaaaataatattctttattgaataataacattaagaaaacactaattatataactaaacaatatgcataattaaaataaaaaattaataaaatataactaagtatatatatattattaaaaaaatgtaatttaaaatattattaaaaaaaatgttttttaaaatcgaaacaaacataacacttatctaaaataataatggttactaagtatacacatataatagcaatatattgtgcatatatatttagtttaatttagaaaatattcttttatttttattagaaaacttaattaacaaatcatataaacatcaatctaacgtaattatttttaataatttgtttgttgtataaaaaaattgatgacaattgattaacataatcacatatataaaatgacgctaaaaattacctacacttgctcgctagagtggcaagatgagatatgagttaagtaagtactaaaaatcatgcataatttatagtaattcatttctcatgttgtggcggtaatggagcaacgtctacttcgagttttaattactcacgagaattataaaaaaagtaactaagccaagagcttggatttctagaaagtaaaactaggaagagatgctctgaccttttagggactcagctcaatttgaaaagtgagctagtagagctctcctttataggcaaggaggtccattaaaatattaataaaataacaccaaaaatgggaaaaatatttctaggttgatctagaacaatgaggatgatctaatggctaaatgacttcagatgataatcgtcaatttttagagctcgaatcgcacccattggatcattttcaagctttttgtagataaaaattacacttgactggggacgaattttcaacttgaaatctttagaattacgatatgattgtgagacatgtcttgaaagatcttaaaaatatctttcaaatacaagttgaatcgtgttaattgtttcatattgagtgagttatgataacttaactaaaggttgttcagcaaccagtgccgagattgacattctaatgtgaacctagacattgtatgagtagaaaaatgtatcagacttgtatttttatgccaagtaatactttgactacttagtcaatcttttagttttggtgaagcgagtcactagctataagagatgttgcatttttcatgaaattgagtagacttaaaacttctcaatttacgactagttcgccgatattccactttgccgaaaaggtgaaataccaaagtgtgaattttacttatcacaagtcgtagatctcgtctactatgaaaaaaatagtcagatgctcaagacagaattaaaatctgataagcaaaatctaacacaccaggctatacatcaacctaagcgctgggtgctccttagtgagcttctcaggactcgttttgttacttctagtacatttgagtttgtgaacgtggtctcctaccctgttgttgctatatttttaaacactacgcaagtatacgcaatcaagtagtaaatctcacacaggtgaggtcgatcccacagggaattggattaa

SEQ ID NO: 111956 - DNA, 2425 bp, Cannabis sativa
ctcgtgtataagagccattcattccgtgggtgtaagggccacatggaggcttgaagcggggacgttacacatgagatcattaggacttgataaaggtatgaagaagggtattgtataagacacttaacacatgaccaagaccccatggagttttctccaccttggtggcacaagggtttattgccaaccttatgcaactaggtgttaccaaaatggacattcggttgttgcattttctcatccttggttccttcagaacttgttgtctctatctttccctagcaggttaggatatttcaattggaaggaaagagaaagtgtccatagactttgggaggttgtcccaagagtttatttcccttaccttggtggcgtaggggtctactgccaccaactttgcaccactagatgtttccatcatggtgtgtgtgtgggggagagttgttcattcagacacttgttccttttagcccttttggtctttcctttccaactctcgattagtgacaggattttccttatgaagattcaccagttattagtaccaatataatttgtgtggtgttatgagttttctaactaacttagtgcttgctaatttaacagtttttagcttttaaagtttaaatattaatttttttgttaaccatatatttattagaaattaaatattaataattgataaatcaatatttgtaggctgatactttaattatcctctttattacttattaataatttgtatacttgtgtaattaaaatttcacaataatgagggcatccgttttgcctttattataggagcattttacatatttggcaaaaaaatcaacaaaactgacaaatgcaattatggtggtgtttggttggaggtaacgaaatagaatggaatggaagggaaacaatttttattctattcctttgtttggttgcatataatagtattggaatgtcattccaatgaaatgacctttctactactttggtggaatgactattccattttaaaataaaaggaaagaccaatccaatgcatgatgagaaaaaatttaataatttttttatcgatttttttatacattttaaattttattacatttcattcctattcttattctcattctcattcatattcttatgttttcattcgtcctaacgaaacgccaccttaagattatatacatagaataaaaaacaagaaattttgggggatatttcgtatccattactttcctcaaacaacctaaaaacaccaaaaatcaatatcttctccgtccaaaaatcttcgtaattcttgtgatagttggtgtctcaacaaaatagggcagtcttttagtgagttttggcgtctgaaaatgaagtgggtaacatgagttcggtagagaaaatagagagaaagagagtggagtttaattgtgactagggaatttgtaaaacaatagagagattagcataaaattgttatggggtcaaattgggagtctttttttttattattctaaatgggatgtgcactttggtagaaactcaaatttcttataaaaaagttactattccaactatactatatgaataaaaagaaaacaaagaaaagtactaataacttgcgttgggttggtcaagtacagtaagaaattaaccaaatgtatagaaggtataaatgcgaagatgacctaacatttcactttattgcctttttattattatattgttgaaatacaaaagcttttggtggtagttaagttaaagactgatcaaagcaaagacacaaatttatcacactcggtaccatttgtagctttaattaccgacacactttgtaaagtctttaataagagtagaaaccacagcttctgaaataaactacctttcctttatcaccttctcttcatatttattcattattggttccacaaaaacgaagtacgtagaagagtggaaaagtagcacagtgtgccacgtttggatatcattacagtcacattattacgacccacatacatatcattaagtagaaaagtataataatatatttttcaaattaaaaaagtataataatatatatgtgttgattaataataataaaaaaaaaaaagttggggaattatttatatactattttttaaatttactgtttgagtttcttaaacagtttttatgtgggttgttatgtggattttagttgtaatttaggtagtacagttggttgctatgtgggtttttatgtaaatttcattaaaaaagaaaaaacttctttgaagtgtaaaaataaataaactacaaaaaatataatatatatatatatagaggaggttccaatggttacactaaaaatgtagccattagattattattgaatgattgtgattaatttgaaaattaaataaaaataaataataattaacttataacctaatagtcacct

SEQ ID NO: 111957 - DNA, 1416 bp, Cannabis sativa
gccacagacattttactcacaacataagaatgatgatttataattagtcacaatttttattgtgattaaaagtaaaaattttgtaatgtacattataaatagtctaattagaacaattttttatcctaggaaaataatatgtacatgtttatattagtcattatatcaaatgtacaaaatattgtactaaatacactaaaagataatttaatgcaccgaaaatatattccaaacagtttatttcacgtatgcttttttattttatacacgtgtgaaatagaccatttgaatttttctatattatgattattttaaattattcaaaactttgcaagctttattaaataattacaatgtacactaacatataaaaaatttagactaaaaatattgactttagtcaacgacgcggagtcaaatgaaacgataattgcaagcgtttaaatatgaaaaataatcagaattatcaacgacacacaagagttatagctagagattctaccccaaaatcgataatgaactactctcttttttgttgtatcttcaagaaatagcaagatcacatgaacttggtcaagtgagtttcttactatttttttaaaaataatttatagtaagtaataagaattttattgctcactaaaacaccaaatacaactacaaccaagtacaactaactagtcatacttaagctatccaacaaatactatcgtttatactagttttctctttataaaaataagaaaacctcaaataaatttttgatcttttgatttttaattgaaactttgtagtataaacttgactattccataaagagttattataagcctcccaaatattatagaccaaaatattataaacaataatatacacattttttctaaacttttactgtctacatcttttcacacatttcacacaatgctacaaatcgcttttatgcaaattgacctcaatctagttacaaagctccactcattctctcttgctagacctacaatcgaaaaagagatgatggtgtgtttccctctccatagcacaagaaagacaatttgcatctaaaatgcaatcaaaattaagcaaatggtatctagttaggagacgattccagcaagctaacaacacaatgaacttatgttttggaacgatgaacctgctccaaataatggaaaccatttcctatcctccctactattcggccacaacttgagacatatgtttggaatactaaaattcaagtggctgaactcacgggtagctactttttttctaattaagttctttgtattcataattttcatccaataccaataaacactcgtaataagaccacctaccatactctttcacataaacaatattcatgttgagttttgtgccctaaataaaactcatgtcaatataatcagattt

SEQ ID NO: 111958 - DNA, 5100 bp, Cannabis sativa
  modified_base (26)..(53): a, c, t, g, unknown or other
cttgatttttttataacaaattagannnnnnnnnnnnnnnnnnnnnnnnnnnntagaggttctactgtatttataatttatattaattttacaatataaataaaaaaatactttaaaatgtatagatgaacaaatcccttaataatatctacctattaataaataagaatatgaaaaagtatatcatagaaaatatcatcagtattctttttgtgcaaaaaatttacaatattttttttatttgttctatagattgtaaattaataataaggaacatggaataaagaaaaagacaatcagtcttccaaatggtgttacaagaatgttgctgagagtcatctcggctggggctatgtttttcccttaataacataactaatcacgctctttattcattcaacaaaaaaaaataaataaataaaaaaaaatcacgctctgcattctgttatctttttttcacccttaattaattgtgaatgttgttttatgttacagttcttctaaaaaagaaatttcactgttcttaattattaattgctttattccaaattagcttgccttggtattcacataataaaattccaaatgtgaaagacgaatacaaaatctacactttttgatatcaattgggaaggtaagcctgtctgtctcccgtgattggcgacgtgatttagaagtagtgctcccagaacctaactttactgcagttttttacgaaaatggtcaatttggcaatacgcgctcaaattcgtcttttgtgtgttgtttctaatatacattttcataaacatatatttatataatcattgattagactcttagtcttggtggtagcatataaccacttactacaactttgagacgaaaagcataacagaatcagttggtcagccaaaatcttcaccacagtagggtcgcctttgcaaagttttgtagtctagctgttagtcaaaaatatttcatatttaaaatattaaaatatttgcaaaatacaatttcacttatgtcgaatttatagcatacaaatttattaatatacgtgatctatacatgattaaaagaataatctcttaaatataatttttttattcaaagaaaacactttttattctaattacgataatattaaataattgaagtaaactttagaaaagttaaggtgaattttaaattgagctgaactcactaaatttaattaaacaagctgcttatatactttctttgtgaaagatcaatacacttgtagttcgaatatgatatttttaaatttaaatataagaatttcgatagatgactactttcatgaattctttgctatttacaaatttgagaaaattgctaagtggatgaccttttatggaatcttgagatttgtattttatacgattttgtggtattggcgactacacttagtcttagcaactcagttgcctatgtatccttttataggaatcaagttgaacatagttcaaattttgtgatgcttagataattaagaggtgaataacctctttttgggatgttattttttataaccttgaaacacgatttattatggctttttaaagttactgcacttttgaattttgaagtaatattaccattaaagtgtgcttgagtggggttcgtacttttctctgatgcagttgctcctttctagtttttcccctgttttcccttgtttctatcttcttcttcctcctcgatctgactcccatgaacccacatccccactacccttctggtttcccaatctggctaccacgatcttccctctctgatggaatatacatatgctcgttattctataaatactcaaactcagactctttttgatctattccttcggtttcttttttctttcactgaatcaaacattttcatggattccataataaacaacatgaattcaacattggctttgccttataaagagagggtggtacataccttttctgaagcggatctctgtgatccaaaccaaacccctaaattttttctcgtagcccaatgtctctctaactattaatcccaaaatcttcattaactgaatgggagctttttggtcaaacaaatgtcgatttgaggttattattaatgacacatactgaactgacttttctaaggcaaatgtccacccttttttcactttcatctctaaaagagccattagacaagccatcccggcactaaggttgcaatcacaatttagctattgggaccataccacatcccttacctcttacacttgctgaatcttcgtccaataattcatcaagttcccaaccattagatttcatacccgaattttcttctcctttttctgcatattaccaatccatatcatccccttttactaatgacattcacaatgttcctcttacatgacactctaattccccaattattgccccctccatttccattaatccttcacctcactatataacacttatccacctattgatgctatttttacaagctttccagttactttaacttcatgtctattttcccaaagtagtagctctactaccaatgtttttgtgaacaaaaggaaaggctgttgtttctagtgaagaggattgtgattatgaggtgcataatagagtttttaaaagacatgttgaccccgataattttagaagtgtattgaagagatgcaaaaataataatcagtgtattttagctgttgatggtcatctcactcaaccagtttcttgttcttccatggattctactgagattttgccgtcttgtccagcagaggttgtcgacctacaaacccgctctcagccatgaatgtcaaaagctggaatccacagggtttggggaacccaagtgcattccgtcgtcttcacttgcttgttcgtgatcattcttctcaattttatttctgatggaaacaaaagttcttgatggcactcttactcgttttaaacagtctttacatttcaacaatggattagatgtatctcatgttggtttgaaagggaggattatgttattatggcaagaacatgtaaaatgtaaccttaatttcaatgagtacaaatcattttgattgctatgtgtcctttaataatggccctcgttggcacctctggtgtttatggctttcctgaagctacaaataaaaaatatacttggcctttgataaatagattggccgatgtttctccattggatctttggatgttaattggtgatttaaatgaaattttctctcacactcacaaaaatggtggtccactttgacatgataatcaaatgattgcttttcgctctactttggacggatgctttctgcatgaattatcttatgatggggataatttcacttggacaaaaaataacaaaaatcctttggctttgaaagaaagacttgattggtgctttattaatgatgtttagaataatgggtttagcttaccaactctaacttatcttgattactatggttcggatcatcgtgctatacgtgttcatgttggtttttcatctataactgaagcaaacaataagaagcaatctcgtgttcagtttgagagaatttggttaaaagaaaaggattatgctgatattatatctagttgctggctgcataatagtcagggggatccttgtgtggatttgcttaatagcttacacaaatgtgctcaaagtttgcaaacttgtcataaaaagaaatttggacaactcagaactgacatctccaatgctcaaaaaagggtaaatcacctccatactgtaaccacacctgctcttaatcattcccaagctattgtctcggctgagaaaattctggatgaattattggcttatgaagagcagtattggcagcagcgttctagagttgaatggttgcaattaggtgatcaaaatactaaattttttcatgcaaaagtctctgctaggaagtccaataataaaatcaaatgcttgtaggaccaaaatggttatactattactttaaaagaggagattttgagcatcatttctttttattttgagcaactttttactgctactgaggaggatcattgggtttaatcacatgtgctctccactatttctactaccatcacagatgctcataatgacattttattgaaggattttattacagctgtggtccttatagctttgaacaccatgggattagataaaagttcaggcctaaatgctatgtcggttttgttttatcaatataattggcatattgtgagacacttagtcattatagtggttcttcatgtattcaatgatggtggtaaccctacggttttcaataagatattgattactttgattcccaaaattaagaagcctcttactatgaaagagtttcgtcttataagtctttgtaatgtcatttacaagtttatttccgaaatgatagttattcggtttaagaatgttataccctatgttatctcagagacccaaagtgcttttcttcccaataggttgataactggtagtgtacttgtggcctttgagctagttcataatctgaagcatcgaaacaaaggttccaaaggctatgctgcacttaaacttgatatgagcaaagcttttgacagagtggaatggtcttttttagctgctgatagaagggggagtctaatcttaaataaaaaataataataaaatcttatatatatatatggtcacctggtacaccacttactggggttatatatataaatatatatactatttatgtgtatcaaacagtggttttagattatattatcgtgcttatataaaaaaagctatgaaactgatttttatttgggaaatttgaaattttatgcttacattaggggggaatttttcccttaaactctaaataccctatattggtaagatgggacaatattttattaatccccacattacccccctcattcaaacccctctctctttcccctctttctctctttctctctccgtctcgcgaatcccacacttaaatttctgggatttcaagttcgggtccgatgggcccgatgcctctgattgcacacaaaaactacttaatttttttgggtttttaaggtcgggtccgatgggcccatcggacccgaccttaaa

SEQ ID NO: 111959 - DNA, 16978 bp, Cannabis sativa
  modified_base (4828)..(4858): a, c, t, g, unknown or other
  modified_base (10174)..(10178): a, c, t, g, unknown or other
acatattacaaatattgattccgattatttttcatttattccgttacatttttcctttaaattattccgattctgaatactgtatagtaaacgtgccataagtatgttttgttgctcataccttagtaagatttggaggacagactatccttcttgtattgatgaactaatgaataaagtttgtattgaaaaaaattattattctactttggtttgttagaactcatcttatataattatttaatattttaggttttatgtttggatagattaaaatagtatctttagtttaatttaaattaaaataactttaaatataatttttataattgatcatctttttcacttctctcacagtcatctattttttgaagatttttataatgtgttagaaaatataacaaaatacccatccattgactaatattcaagcatttgaacaaactttgaaaagtgccaaattgagctgtttttttttttctctttctcaattcttaagagagacaaacttttcaaatgttcttaatgtatacatgtacttttattacaaaaatactaaacttataataaaaagattaacagataatgcttacaaaagaatcccacaaaaattaatcaaccaattcacccttcttctaagaaaaagtttctctcttcatgagtgtttgttgctcctgcaaatttcaagaaaaaagaaacaaaatcagtaaacaaattctatcaacaaccaaagtagaacaattagttaaaaacatcattaaagaacaactatcacaaaaagccaaaatatactagtcacccagcacaataggattcctgaagagacaaaaacaagaaaatcattagcaaataaaagggataaacacatatcattaaacaagttttgaccacaagtcaaaatcaatcactacccaactcattaccactactacccaacaatttgatcttaaagtttcaaaacctggagctggaaagaaagaaagaaacaaacaaattataagtaatccaactttatcaagtaaaagatccacaattaatgcattagcaaagattaagattgagatcttaccaattagagagctacatgagagcctggcttgttatgtcttccaaaacacgtttgatttcggctttagctctcttcacagattgttcggtaggtccttcaataaacaagtaaagtttgcggtctcctggtcctgcaacttgacccggcgggaagtgcttccccctagtagtaatggcagctccggtccactcggttatagttcccaaagttaacttatgcgtgactttccagcgagcgttttgagggaaatcgtttatctccagctctgctctgtagtgtttaggccctgcatcagcttgaattttctctaggatatgctgcaagtttaccgatacaggcagtttagtttcgggcaccaatgcttctgttctgcctttggaggaagaagcggagccatctatgtcaagttcttccttgcagacaccttcatcttctgagtcggacataacttcgaaaccacacgctttcgcctgtgctttttttgctgctatcatcaactcatcttcttctttactaaacttgtaaccatcatttctcacatagccactttgtggttgttccaatccttgattcactttttgcaagaaactatcagctagtgcttttaagtcatctggaacaacttgatccgaaagctcaagtgcttttactatatgaggagcatatctagaatcttcctcagatataaatgttatagcacaacctttacggccagctcgacctgttcgaccaacacggtgaacgtagtcctcatagtaaattggcacatcaaagttaatcaccagttcaagctccttgacatctaatcctctagcagcaacactagttgcaatcaacaaattgcaaacattacttttgaaatcggaaatggtcgactcacgatccgtttggtccttagcaccatgaagagataggcaaggataactatgtttgagtaaatccctgaacaaagcatcacacttttcttgggaatggacaaaaactagaattttccctttctcataccattctccaagtatttctaataatctaagaaacctctcattttcaggcctcacttcaaccagctgcgtgatgtccttattaacagcactccttccacctacctgtatttccacaggtttgtgtaacaaactgcgagctaacttttcaacttgacgagggaaagtagctgagaaaagtacattttgtctatctggacgaatattccgaataatcaaactgatttgaggttcaaaacccatgtcaaacatcctgtcagcttcatccatgaccaaatatgtaactctacggagatttgtaatttttccactgcttgtgcaaagcatgtcaatcattctgcctggtgtacaaacaacaatttcagcacccttttttaattcactaatttgttggccaacatcagagcctccatatacaggcacacacctaatacctaataccttggagaacatttttatatcaccatgaatctgtttaacaagctcccttgtaggtgccattataagcccgataggcccctctcctgaaacgacaggcggctggtccttaatatgcctcaacattggtagcacaaacgccagagttttgcccgagccagtttttgcaatgccaatgcaatctcgaccactcataattgtaggcagtgcctgaacttgaattggcattggcttttcatatttaagtttctttattgtctccaatattttacttgtaagtcccatttggtaccaagtcttaactggcttcggtacatcctcaccatgtgaagtcaattccaattcttcacggtatgcagaaacctctttcgaagtcattcttgatatttctttcacttcaatatagaaattcttcctaaatggcttataatcaattttcgaatgatcaacaatagagagtttttcagcttttgtcttcttaactcttttcatgaattcatcatcatcttcttcatcatctaccaattctccatcatcctcaagatccccataatccgaatcagaatcctccccaggaattattctacccaaagatttattcttcaactccatacttttatcatcatttagtttttcaacttcaggcaaaaccatagtatttatataagcatctaatggatcaatctcctcatcaacagaaaccccatcaaccccattctgcaaaccaattttcattccatccctaacttcatcatcactaacttgatcgatttctccatcagattgttcatcttcaaggctccaaatcttcctatcattcacctcccaaattttctctcttccaacttcttcattctttctcctgaattcttgccactgctgaactctcttcctccgcttctcaacctcttcccctaattttcgctcttcatcctcaccagtacttctcctctttctagatctagaactctctctgtacctaccagagcttgattcatcctctctctccttaaaatcaccatcattccttctcctctctctttctttctttaattcttttctcttaccattacgcttcaaagcttccataatcaaaattattgcacgaattaatacaggcgcacacccaaaaaccctagcaaatcaaattttcgtaatacctagaaaaagaaaactcaatccaatccaatccaaaataaaaaatcaaagaatacagacgatcaaatgaaactatggaattctcaaagattcgtgtaaaccacagaaatcaagaaattcgacgaacctgttagtagatcaagagcagagagtatcgcaagccaaaaccctaaaaagttttcttctttttactgaattgaattttggtttaggggaaacactgagctcttatataggtttcgtctgtgcctagttttttttgtataatagaattaataataaaaagatattcattcaaaaataataataaaaaaaaagatttttttttttttatgtttttatattaaaaaaaataatgaaaattttaaaaatattcttatatttataaaattcttttaaatctttctttgagcaaaaaaaaaaattatatatccaacacaatttttatctaagaatactttattcaaaaattatgaaaaaaaattaaatctataaaaataatctctcgaaattttttctatataatttaataaaaaatatgtatagattaaaaatttatttatgtaaggttaataattttattttgaattgtaatacatgattatatttatttaaaaataattttattatactataatattaaaaattatctgtagttattaacttattgttgttatatttgatatttttagtattttaattaattttttctaataaatctttattcagttataacttctaattgtcatatataatatataataaatatctataaaaaaaatacgaatatatcatagctatggacctatggtaaaacttatgagactaaaatatttgatcatgtttttatggtaataaaagtttgtaaacggaattaatggtggttatgaaaatctgaattaaaattcttatggtaaaaatttacaaaagaaaaaacgttggttacaaaaattgattttaatatatattttttttctttttgaaggggattttaatacttttagtgaatgaaaaatgttttttttttagaaaataactatgaatttttttatttgtaaggattggaattatataaaaaaaaattaaagactcccaaaataattacaaatttttcctacaagaatggagcaaattaataacccattattattattattattannnnnnnnnnnnnnnnnnnnnnnnnnnnnnntattattattattattatgagatagaataaccatctattctcctcaaacacctcaatcattcacagccactaataacaaaagaagaacaataaccaattaattaacttcaattacttaataagaaaaggtcaaactcttaattaattaattaattaattattatttcttcaattaattttctcaagagaaaagaaaagagaaagatcataggaaaaacaaaagaaaacataaagagagaaaagacagagaatttttgatgattgatgatgatgtttgagattattattatgaatgtgtaataagaaaagaaatataatatatatttatatttatttatatttaaataatggcttatagtaattcaagctccattaatgactttggaagcttttcatttggagatagccaatgcagagggagactcactgagctattcaccaaagtggctattaatcttttgggatttttcttaattgctggtctttgtaatgcttttcattacattttgaagccaatttcacaaccaaggatcacctcagatacatttgtatgtttttctctttttaatttatatatatatatataatttgttatacatgttaaaaatctatgttaaaatatacattaaatttttgtcatttcgcgaaatcaaaatgtatttttgttattttttacaaagtaacttttttgacacactcgatattttgttaaacgcatttatacccttctcgtgattataatctaatgcaccagattctatcagaactctatagtttgaatagtgcaccatgtctgtgcttagggcccaccaagcccagaagcccggaaagaaaagtcactttctaatattttcgtaaaattattatattacccaaattttcagtcttcgtgttgtaatcctaaaatttttttaattagcgaaaaaaataagcattaataagagcctatttcattatgctaatatggtattctctaaagtaattggaacaagtttgtctcattaatagaataaaatatagtaatgattaatggctttaattgtgtgattaatgttttttttttttcactatgatctttatgttatacaggttggtttactaattggaaacttgggatttgtacaaagagcagtaaactactcatcagcaaaaacactaagattcataatagattttggaatgatttgttacatgtttgcattaggtatagaaatggatccatatgcactctttagagtaccaacaaaagatgcaaaagtagcctatgcaggattagtgtcaaccttcatcttagcatgtgctataatcccattcatgcattacacaaaccaatttgaaacagctttcacactctcactctccattgccctttcaagcacagcctcaccggtcctcactcgcctcataacaagcctaaaaataggcaaatcagacataggaaggcttgtgatcggtgcaggaatgcactctgatttcataaccactcttgtattctccctagggtacataatttacccggttcataaagatggcgatcatgatctacatcccgctacatttactcaacttaaaaccgccatacaaatgagttgtgcattgttgtttcaaacaattgttgcagctacattgtcaccaattttcatgaattgggttaataatgaaaatccagaagggaaacctttgaaagggtcacatttggtgctttcggttgctttcatgactttgatttgttgttgctcaccggtgtatggatatagcccgattttgagtgcttttatggctggaatttttatgccaagagaagggagagtgtcaaaatgggtggttagtaagattaattacttgttaactactttgttttacccaatatttttcttttggatggggtatgaggctactttggtggattttgaggttggtcatttgatgacttgggcaaggttgtttgtgctatttggtgtagctactattggtaaagtttctggtacaataatttctggtgctatgttgggattcaattggcctgagtctattgcaattggcttgcttttaaccactaaaggacattttcacatttacttggctattgctgcaaaaacagttagtttctataaccctttctctttttgttttggtaaatatagtatgtctcaataatattgttagttcttactgttcatgtgttatgatataattggtaaaaatgcaggctgaagcaacatcaacatcaaccacaatagtaatgataattgcagtgtttttcactgttgttcatgcaccatcagtagtagcacaaatcatcaaacgcgcaagaaaacgcgcaccaacacaccgaatggcacttcaattgcttgatccatcaaacgaattaagaatcttgttatgccttcatggacctcacaatgtgcctagcacaataaatttcatggaaatatctcggggctcggctgatcctggcattgttgtgtatgtaaccgatatgattgagctcacaaacgaaatttcagccacattggtgaagggagatggaccggacactgtgactgtgaccgatgctggtgtggttgagaagagaaatcaagttactagcgcggttgaggcttatgtcaacgaaaatggcgatggtatcacgcttagacgaatgcttgcactctcaacatttagtggattgtctcaagatgtatgcattttggcagaggatttaatggttgctcttattatattgccttttcataagactttgaaagctgatggaacacttgatggtggcaattctggttttcgatatgtcaatcgaaaggtaacattttctttttcttagaatgatcacacaacacaagcatctgcatattaaatagacagctttgatctttgatatgttataatttgtcataacatatggagtaaagggtctcaattgaaattatgtaaagatataaactttgtataaactaacttaaaatcacaacttagaaatctttcatagactatggaatgaagggtctcaattgaactagtgtaaagatatgaactttctttaaactaaccaaaaatcatcacaacttagaatttgtcataaagtatggaataaagggtctttattaaagttatgtaaagatataaactttgtataaactaactgaaaatcttcacaacttagaaattgtcataaactatggaataaaggttttttattgaacttgtgtaaagctataaactttgtataaaacaacttaaaatcacaacagaaatttgtcataaataatggaataaagggtcttaattgaagttatgtaaagatataaactttctataaactaacctaaaatcacaacttagaaattcataaaatatagaataaaggttctcaattaaagttatgtaaagacttttataaactaacctaaaatcacaacttagaaaattataatttgtcataaacaatggaataaagggtctcaatagaagttatgtaaagatataaactttgtataaactaacttaaaatcacaacttagaatgaacacacaatgcattggcatatagtcctatgttattatcatgtctaaaagaaatgaccaattaacatcttaatttacatcttaattatggttgaaacttaaacaggtgttgaggagtgcaccatgctcagttgggattttaattgacagaggttttggattacaagacaaaatgtcaaaaccttatgtaacactcaatgtagctgtgatattcattggtggtaaagatgatagggaggcattagcctatgctagccgagtagcgcgccatccaggagtgaagctcacagtgataagattcttagtcgacgccaattcagaaaacgcgatgagaaggacaggaaactatagaatcaacatcgacgagcaacaagaggaaaccaaccttgacgacgaatgctttgctgatttctatgaaagatttgttgggagtggtcacgtttcatacatggaaaaacatcttgctaattcagctgagacatactcaactttgagatcatttgaaggacaatactcactcatcattgtagggagaggtggaagagtgaactcagttttgacatttggtatgaatgattggcaacaatgccccgaattaggccccattggagatgttctttcggggtcagatttttcggctacaacttcagttttaatcatccaacaacataatctaagaggagaattagatggtcttgatgatgatttctcaatcatgtaataatagagtcttttgatttttgaaattagacaaagaaacttagtttagagctactttaggcatataatgttatagtatcatataccataacacttgtaagaaagaaaagagttaagttagaggagagaaaagagttagaggtaaatatagtgtaaaatcaagtgtaggatttaagctatagaaaagtgtttgccttttaacaactttttttttaccaattcaaattcattcttcttattattattgcacaccataatgataagttataatcatccatgttttctcataatgataattcataagttgtattgttttctatttttttttttttgtttaatctggttgtaatggttagaaaagcttataaattgagtgatggtttatccttaaaaacataaaaaattttactttttcgatttattagaaaatggtatcgtttctctagaagaaagtaatgtgattttatatcttacaatataatttattggatttattgggtgcttataacaccctactaaaattggtacactaatacaacttctaattgtttctaagaattttttagtataattttttttatagtgatgtatgttatagttatttaagatattctacaaaattttgaagaattttaaataatttacattatagaaatcaatgttcaaatcatctatttcacactcatataaaataaaaaagtcacgcatgtaacaaactctttaaaccctatttttaacatgttaaatttttatgaatttcttaaaattttgtcagatgtcataaataactacaacgtacacgattataaaaaaaaattggactaaatatttttttagatatcaaaacagataagaacgcatcgatacacccattttaatggagtgtattgtagaatattcccaaatcattttgagaaacggtaattttaaagaccaaaaaaaccatagaatgattttacagtgcacactcctaaaaagggtacaccgtgcaccccttgtctgtttcgatattcgaaagaatattgtagtttaatttttttcatagttgtgtacatcttataaaattttaaaaaannnnnaataatttataatataaaaagtagtgtgatagtctatatcataatcgtattaaataaaagagtcacacgtgtaataaactatttaaactttatttttagagtgttaaatttcttcaaatatgtcaaaattttacaaaatatcttaaataaatacaacatattaaataattctccaaaaaatttccaaaaccatattataaactaatttatttaatcattcgagtaaaatatataaactttatataggtatcacacgtcgtcaaatggaagattacaaacaaaacgattgtcgtttagtcaaactaacaaacaacgacatgtctttattaaaattcaaaaaaacgacacgtcgtaactagaaatgaaagagtaggacacgctctattacagacccccgcaaatattgtcgtctagttaaatgacaacaaaacgacacgtcgtttattgaacataaaacgacacatcgtaattatgatccgtgatacaaaacgacatcgtctaatccaagcacccattattcagatcctcaaattcccgaacccaaccgcaccattctcattctttctctcttctctctctctctaactctttctctctctaaacacaccacgctctctctctcttaatatatacaattaaataataataatatttatttactcacaaaataaaacactaacaaataattaataaataaataaatttattttttcccaactaaattttattttttttacgagagcaaatccctaaaatcacacactcaaaaataattaaaagaaaaaaaaaaagaaaaaattcaaatcaaaatcttttctttctctcttcaatatggcatttcacgtagcttgcccaattacatggttagtactttctctctctatatctatatctttctctctctaaaaaccctctctttcactctcctcattctcactctctatatctgtgttttttgcagtcggaggatttgtttctgttcgctagggtttgttgctgataaggagaagaatgagttccttgatgagattcgcaaggttgaggagtttgttaaagatccttggggaaatagggttcgggaggagaaaggaggaacgattcaggttgctgttccaagaattgagccacctccgcctttgttggttccgccgtcttcggtttatcaaccggtggtgtcgattttaggtgatgtggttgttaatatcgttgatgatgaagctgctgctgctgcgtcggctcaagctaaacgagctgcgttgcagcgtaaagctgcggcggctatggttgctgctgaagattatgctcggcgatttgagtcgggtgatttggcggcggtgaggttctttgaattttggtctcaattttgggttttttgttggaatggtggttgtttgtgatgatttgggaagtttttttgatgtagtggagttgaaaatttgacctttttgtgcgtaattttgttgttgaatggttgggtgtttttcagtgtttgcaaattttgggagtttgagaagaaatttagtatcttgaacttttttgttatggagaattttagaatagatcggactctttatcataaaccctaatttgcgtcctttgctgcaaattagttgacttttaatgatcttgttttgttgggagtcaattgccattgtgatttccgctgattataatgcatttgtttttaccaatttctgggtttggggtgataaggaaaaaggacctcttttaatgataaatttggtgaaagacctttaattattgctgtattgtctcactcacgcatggaccttttgtcactagaggtactattgctgagtgactttatatgagcttattaatctgcccacatgatatgttatattttttgtttttgttttttctttgtttattcttgaaagtcaagatgatttctgtacaattccaaatttgtaatttatgattgccgtttttcttctcgtcgacaggatgtctcgagaggttctgcaggagaagaacagggtcagtccaatgtcaatgtattgtgcagaatatgcttttttggtgaaaatgaaggaagtgaaagagcaaagaggatgctttcttgcaaaacttgttgcaagaagtaccacagaaactgcttgaaaagttgggctcaacatagaggtaggattattggtccaagcattttctttagactacaaatttcacatatcctaattagtggaacttgttagcagatctgtttcattggagttcatggacatgcccctcttgccgaatttgtgaggtaaaactgttgtttcttccttcttattcaatatgattgtaagaacttcatcattgctagtttagaaatttgatattattactttaattttccatgtcaatatgacgaaaagatgtaatatggttgctataacttgttgtaaatttatttcaagtaaatgtaataacccagaaatgtagtaaatatgttatacatttccttttataggtatgccggagaacaggagatcctaacaaatttatgttctgtaaaaggtgtgatggtgcttaccattgctactgccaacatccttcccacaaggtgcgtgtggatgtgtattgctgagttcttacattgcaattaaaaaatgtattctaaattcttaattttgttggtggataatgcagaatgtttcttctggaccttatttgtgtccaaaacataccaagtgtcacagctgtaactctcctgtaccaggaaatggcttaagcgtgaggtattaattataaagaagtttgaaagatgtctttagtgtatatttttatctgttttggttataactgtatggtatcttcactttttgtgtttgctacagtaatttgttcttgctaaaaacctagacttttctggttcatgatttaaagaaaatatgaaaaggtaatagggcggaaggaaatatatacatggattgaaaggactttttttttttcccatgattatttggtctatataggaaggaatgaaattaacatattgtgaaatttactatattacccttagagtcttggctaataaaattttttatctcccatttcttgtcattttggagacaagaaattggcgggcctcaccatattttccatccattctacctcataccttcacttttctctcctaccaaacagcttattattttgttttgttttcttaacatattataatgttatgtttggtagagaagataaaggaaaggaaagaaaaggaaaaaaaagttgtttggtaggaaagataagtggagggaagagaaaaatgagtggaaatatattgagtgggacttactaaatttttctctataaagtagagggaaaagtttgtaagaaattttgagagtattgctaagttattttacatgcaaatttatattattaattttcaggtaatacagtaattattgcttatttattgttctgtgttctttttagtaaaaaaatcaacctgtttgcttctttaatatcaggatcaccatatttttcttctaaactgacaggtggtttctgggatacacttgctgtgatgcatgtggtcgattgttcgttaaggggaattattgccctgtttgtttgaaggtactccatttgtttggatgttttataatcaaaaacatgcttcttgattttgccagaatactaacaatgcatcagtcaaagataatggaattcttgatatataccattttttactgttgaaaatttataggtctatagggattcagaatctactcctatggtttgctgtgatgtttgccagcgatgggttcattgccaatgtgatggtatcaggtcattatcttcccttttctctgttattgtttcaacttctatgaagtgtttcaacatctgtggagtgttgtcataactcgtgtatttgggaattatttcaaataaaatactctcttattattttatatatttataacaaagtaatggtgggagaagcaatttgttacattggtatacagccaaaatgaatccaggacctatctgcttatttacttcagtatctttccccacatgataccgatttagtatcctgtttgtttgggtgtgttttttcactagtccaattacagatggcgtaatatattttgacctagaaagtgatctcttacaaattaagtatgctaacttctgagataatttctttgcagtgatgaaaagtatttgcagtaccaagtggatggaaatcttcagtacaaatgtgctacatgccgaggagaatgctatcaggtttgccaagagtagatatggttttaacaagtctttctattgataagtatattcatatttctacatataatgctaggtcaaggatcttgaggatgctgttaaagaactttggaggagaaaagacaaagctgatcgaggtctcattgcgagcttgagggcagctgctgggttgccaactcaagaagatatattttcgatttctccatattctgacgatgaagaaaatggccctgttgtattgaagaatgaacatggacgttccttgaaattatctctaaaagggttagttgataagtcaccaaaaaaggcgaaagattatgggaagaaatattacagcaaagggtctagtaagaaaaaataccaggcatcagtgatcggtaaaagagaacaagaaatgagttttgaagggcataacgatgcccaatccttaggattcagcttggctaatgacaagaatgttggcatgcagtctcataaagatgagatacaagacacgtattcttctccggttgcagcaagtcatagtcaaacagaagagatttgctctatcaatcagcccggagttttgaaacgcaagtttgttgatgaggtaatggtgagtgatgaaaataggccttctagagttgttcgaattaagaacaacaaatctaatgatttagatagtggagaggatactggaaagcaagctggcaagtcaaagactgtgaaaggaaagaagttagtcatcaattttggtccacggaagataaacgttaccaattctcccaggtccgatgcttcaaccgaccaaagagaaccagagatcatgaattccaatggtgtgtccatctttcaatcacatacacattctctctccctctatatattatataatataaaatatctgaggtatgacttgtgtgcttatgttcttaagcaggcacagaagacacgagttggcgaaaaacaaatgataagaagtctatattggagaggcatgatggccttgctaacagtggtgatggtagttggcttattctctcttctttattggaataattttttcttatcttgctcaacataagtatttgttgttgatttttctttttaaattttaaattattaagttagttacatagttttctgcaattcacagagagaaatgattcttctagccaatcaaagggtttgaagctcggaagagaaggaaattttattaagttgggaaaaattaggaccggggttcctagttataacccaaaagttggccgaggcagtagtgctgatggatctgaaactgctactccagagcaaactcacacttcactgggaaaaagaagaattgaagaaaccaccgcatcagttgagcctgcaagtgaagttcctatttcgaaaagggagagagtatattcaggaaagctatcagaaggaagacctgatactagcacggagaacaacgatgattctagtcagacacctttgtcaaattctttgcctaaagattcaaaacctttgttgcggttcaaatttaagaagcctagtatcgagagtcagaactctgcaaatcaagaggaggagaaaagttctttaaagggccaaaggtctaaaagaaaacgcccttcaccgttcatggagaaaacgacacttaatgcagatggtgcaacccaagcacatcaagaggatttaatggatgagatcatggatgctaattggatactcaaaaagttgggtaaagatgcaattggaaaacgagttgaagttcatcaaccatctgacaattcatggtgagtcttctcttctaagaaactttcttatgtagaaaaatatagtattgggatatcaggaaattataataattgttatgtagatgtccaaggggagcaaaccacatgtgggacgatttgagctatctttcttaggtgcaagtagaaaattatgttacaatttccactatgcgaatcctaaatgcgcattatgacagttgatttttcgaatttcttatccaggcataagggggtggtagccgatctagttgaaggcacatcaacactttcggttactctagacgacggtagagtaaaattcctggaacttgggaaacaaggcgttcgattcgtgtctcaaaagcagaaaagatcaaagacatgaaatgtcgaacaagttcaatttcagtaggcttttctttcactacacctcagcacacaacgaaaacagttccccatccttgaagccaccgagaaattcaaccgcgctggtatcgctgcagctaggttctcgatgatgaactgtttgttggggactcatcaatcagtccaacagtgattgatttttattggcaaatttttgttttttctcaccattaattgttggaaggtttaaactttatattaaggaatcaagtcagctgtaatagtgtaagatattattagagcagccttaagggttgttagatttttttttttttttttcttttttttttctggtatatatatacctaaatcttgctttgacgactagattgaaactccaattacctccctctcttaaatcttgctttgatcatcaga

SEQ ID NO: 111960 - DNA, 2041 bp, Cannabis sativa
  modified_base (1996)..(1998): a, c, t, g, unknown or other
aatataaaaatatatttcattaattttatgaaaatattaatttaaacttaatttattttaaactttaagaccaataattgtgcatttttcaccattaatcattgatgaaaaaagaaatttggaaaatctgaaactaaaagctcatcatcaaaaagtagcttggtatttcaataagctagtgaaggcaatgaaattttgtgtgggagacatgatactcagaagagtgttctttaatactaatgatagtgcaacaggtgtgatcgagcctaattgggaagagtcatacgaagaaattgaagttacaaaatcaggagcgtaaaaacttggttggtatgatgaaaacatggagctagttctagtaccacagtattggaatgacaaatatttaagaaaataataccaataaatgcaaaaggtctagggaccacataaattttataatgctaaaaatcactctaaagtggtggccttttgagtagacctcgctcaaaggttcagagaataattggtgttaaggtcatatgaccactttcaaagtacaattagtttaaaaatcatggctcttgagtgatgtctattgggttaaatataccgttcaaaagtgttatgttttaattagtaaaagattggctagatcatgtaatagtttttttaattgaataaatatacgttaccatggtaacaacacataccgaccaataaatgaataaagatatcaattataagttgaattgtgttaattttatgaatttttgcaaactatagcaagttaattaactatctaaacatgtacaaagggtttgcctaaacaaaaaagccgtacaagcattggttgaaaataagctagcgaaaaccaaaattgaaaaagctaaaggaaaatattttatcaagatatagaagtagagtacgttcaagattaaaagctacccgaccagctgtttgtcttaagcaacatgtaaatataaatccaagtttaaaagccgcctgatcggccatattgatgtagataaaaggcccataggtcgaaaaaaagcaaaagaaaaaaagttacttcagtggggtcccagggacttgatcttgagtggttgggtcttcttagttctaagcggctgaagaactctcattggatttcttcgcttcatcttcagcctttctcatttcatagtaacagaagaagtctgcacaaatgttgtcctttaaataaccaaagttggcgtctggattcgcctttcagaactcatagattacctccacggtagttgttcgacatccttttgatacgactcctgctcagcagcaaaagtttcctccaagaaagttttctccttcagtaaagtttcatcattttgttgaagaatctcagtaaattctttgactttggactctcgattttgaaggagtgtgcagagtcattccctttcatcagttagatccctcaccctcttggattccagttcgaggtctgcttcgaccttggcagtggatgacatgtcttctatttgctggtttaagtcattaatagactttttctcagcaactagttatttgtttactttgcccatctattggtccttcagatcaacctctttcttggcctcctccaaagccttcttcaaatcttcagtggttgtattggctttgagagcggcaaatttggcttggtaataagtataggccagtttcaagtaatcctacaaagagaaacaagcaagttaaattatcaaggtggaaaaattcataaaaagaactctaaaataaaattttaccctagtaatctctttcaaaactcccccaaccaggagttctaaaagcatatcttctgcccttgtaacctgctcgttgacatcgaccatcaagcgatcttggtagaagccaagcatttctttagccttcttcatctctggatggatggtgggtggagtggcatttggctttggcaggctaggcctgtaatgaccgctctagtaatttggattagtaagggcaattagcactnnnttttattattttattattatatgtgaattaatttaattgtgga

SEQ ID NO: 111961 - DNA, 1555 bp, Cannabis sativa
tatatacaactgacatttgcaaaaacacggtttttcaatgtctaatatttattgacaaagtgtggatgtttgagaacctcctgattataaatgtatttgttggcccatttttcgatgctcgtagagactaattacaactttcataaatacatttcagactgtattcttgagagcatgacttccataccttgaattggaagttatttttgattgcgtagtagctcagtacccctttgagtgtttctttgtctttgtatgcttgtccttttcaacttcaggatgaaatttatttgttatgagctttgtgttgttgatgttaacctctagatcttttttttttactgttgttttccaatttctcataccatttctttagcaacaagatttgcagagtcaactatgtcgaattggatgttgtcaccttcttctattttagtttcttcttcttcctttgttggttgtcccagtgtgtatgattcgattgttgatgcattgttctcaagcattcccaaattttgttgatcatgtgttgtttttgatgtgaacattggtattgcagcagttgttgtgctgttaaactgtgtgtactgacgaataatggatatgtggtgaaatcaatttctttaatcttcaattgcaagtaaaaaaatagtctcgaatcgttgaatatttttatcagaagtattccatctaattggtacagaatttacagggttatttttgtggggtcgcacacaaatgaagagagtagaatctgtacgaattgttcatacttgtaattttttagtaggaaatgttcactagcctcataattgacataattttttttttcttcccattgcccattgctcttcaagagaactgatatagattccataacctgtaatattttgtcagtaaacaattgtaaagcaacagtaaaaaatccatctacgttagttctttttgttttagtgttccaactatgaattgagtgtccagtttttacgtatacctaattttctaataaaaatataggtaattaactaaaattgactctataacaacgttggatacttaaaaatttaatgcaaattattaacctatttttttctcatgaataatgtatattaatttgcatttacttctgtcacacatgtatataaattcaatttgagaagcttcagaatgtttttttttcttgaattcgagatctatgtttgagcatcatttttaatttcttatttaaaagaattttggtgggttaaagtgcctaacattttgaattcgttgatttttggttttgatgaagttgctgatcgtttgtttgttgtcgatttcactgttttgctccattctgttgtaattaatggttatttttgagtattttcgtgtttttgttgtgattctattcgtgggtttggaagatgaaggcatcgtagttaaatttctatgtgtacggtataaaaaaaggccaaagaagtattttcagtggcggaactatgttatggtatggggcggccatggccccccctaatattttaggaaattatttttaatatatatataatttata

SEQ ID NO: 111962 - DNA, 3568 bp, Cannabis sativa
aataaaaataaaatttatagaacatattttttttttatttttaaaattgaaaaacaaaagtggttatagaacatatttttatttttcaacaacaaaattttaaaacaaaaatttgtgattaaaaaatttaaaaacaaaataattagtaaatgtcaccataataatttaactattatttttcttcaaattatgaaatatttatgtttatttttatgattagttttaaaagggtatggtccgtacggaagggttgagggtgttgaggtttgatttgatatggttaaaggcaccaactaacctgcgagcgaagagcgagtcttcattggtcaaacccctccttcttcacccgccattctctctctctcttccttctcctatttttacctctctttctctctctaccctttacatctgattctctctcccttctactatttcgattgctttcgtttctggtttcatcaatttcctctgtttttgttttggaatcaaattccttgtattcaatccaatccaatccaagctcaccttcatttttactttcctaatacgcctactgcttcattccactttctcagtttgagttcatctgttcccttaacaaaaaactactctattttcaggaaagggataaaaaaaagtaccctttttttcttactagggtttctcttactcacatttcttttattcgattgtattttctttgcaattgattgggaatttaaggtctcaactacattctggtgctttgtggtttaaagggtattctttttgtctcttaagtttcaatctttttttctgggttttgtgtttggattggatttctgttcagtcttcttgggaggaagagcaggaatggctttggatttttcttctctttcttcccctgaaaagaatttgagctctacccttcagtgctctgatgggtcttttatgaatcttcccaagaaaggagatttaaatgggaaatgcgattcgggtattcagagaagcgtttgggaaccgatgaatttattttggagttgcggtgaacaacagaaggagaatgatgatattcttgcttgcttgcctgttgatccttttggcatgaggtctgttttcacagccattaaaggtcagtttgaagattttgaatcaggcagtggtttctctttttctgatgaaaagattgataatgatggtggtggtggaggaggaggagtacctgcagggttcatgtggtttcaatctgaattgaatgatgtgaaatatgatgaaatatcaaaaccatgtaataagtttaatggcttatttgatggtggttttgtattaaatggtaatatggaggactttgctagttatatggatcatgtggaagatcgaatctttaatgatgaagttatgaaaactggagattctcaaagccaagaagatgctcatgaagctatttcatatgctttgcgttatttggattatcaggatcttctttctgttgaaagtgtttgcaaaaatttaagacagtatgttattagggatagtcttctatggaagaatatcaacattggttggccattttgtcagaagatcaccgatgatactcttgtgaagttaaccaacaaggctgaaggtactcttgaaagcttgagtctggttcattgcaacaaaattactgcagatggtttgcagcgtgtgtttgataacaacccgaaattgacaaaggtaaaacttttagttctatttcttgttattatcatgtgcaccttagaagtagttttttgattgtttatatttgtttccttaatcatttacatatacccttttgtttatatggagtttggtatttttatgtggaatgagttctttactttgtagaaaacttacaaggtttacttttgatcattttgcagttatgcttgtataattgtaacaagatttgcatggaagatttcttgtgtaatctgaaatccatgaaatcagcaggcatccttggattaaagcatctgagagttggtgggctctttaatgttactaataagtatcttgaggagttgaagttgttgttggatgcagacaacagaatgccacttaaaggccacaaaccaaggttttatagtggcgggatatctccctgcttctctgaagatgatgacgatgatcgtgtcattgatgtcgagacttgccccaaatgccaacagccgagggtagtttatgattgtccaacagagagttgtcgagagaaacatcaagccgctcagctatgtagggcctgcataatgtgcatagaacgctgctgtcattgtggtcgatgcattgatgatgacactgattatgtggagacactttgcctaaacttactttgcttggattgtataaggaacgttattcgtggtacagaaaagatgcccggaggaggagacaagggctctatatgcagatacatggctcaagtaaacagttatgcattttgtttcattagctaaactagaagatagagaataaaagaaaaagggcagaagccaactgaaaatagtatgaaagaaaggttcaaggtttagctcatgcctttactcaaaaagtggaaaaataataataaagaaatgttatgaagatattggaaaaataagaaaagaaaagcttgcctcttggattgcaatggagatgttatttagttaatctcctgtgcaagtgaagcagcatgttctgctcactattggggaagcaattttcagtttcatcagaggtgaaaagaagaagaagaagaagaagaagaagaagcttttagctcatgccagaaaaatgtcttccatgcttgaaactttacctcttggattgcaatggagatgttatttgattattctcctttggaggtgaagtagcatatgttgcaattttgctcttattagggaaccaatttttagtttcatcagtggtcagagaagtctttgtttcagattcagatagataaatgagaagcaacatttgcaaagcaagtttttttttttttaatgaagattgtcagacattgattatcataattcttgttcttaatcttttcatctaatggaatcaatcaatttcttatgtttgtggattgaattatgttttctcctaatttcactgagtattttgtatgttagattttagaagattgagtgattgattaccaccaagtcactatatattactctaatattgttcttaatccaataatctattaatctctttatctattctccctatagttatactacaatcatgttttaaattttcatttcatttcaactcacatcatatcattagagtatctccaaactagttaagatagttgctctaatggtgtgctacttatgcaaatttcaatagcaatgaaccttctccaatgggatatgatgcaaaattgcaaatattgtgatatatttagcacaacaaatttgcatttattgaaaatatgaaattcttttttatttattattaatatcccacataaaagttcaaaagtcaacatttattagagtaatttgcgatataaatacctaagtttaactcttagttacaaataaatatttaaatttaatttttagtagtaata

SEQ ID NO: 111963 - DNA, 5768 bp, Cannabis sativa
  modified_base (5685)..(5708): a, c, t, g, unknown or other
ttttgggtagaaatgagtaatagtggaattgttttgtacaaattaatggagggtataaattttgatatggggtattttattagggtcaaatagtgaaatttccctaacataatatatatccttaaatgcattaacgagacaaaatcgtattcctatatatatattgtaagagcatttccaatagtaaggatgctaaaaaattccacattatccaaaaatataatattttattttatctctcttttacattatttttggtctcttacttctaaaatcactccaacagtatagcactcttcaaaaatactataattatgatctcacacgttattatttaattttttagcaacaataactttttattttttatttttattaaaaaaatagtgatagcatcaatgtttctgtatagcattcacacgtattcctaaaatatcattatttttcctccaatgatataacgtctcaatattttgatactttatttatccacctaagtaaatattccttaattttttaccattaaagatgctttaaaactctttttaaaatgatgtcggtaatattaattttgattggattaaaaaaaaaaacacataaatacaaactaaaatataaaatgtttcaaaaaaaaaaaaaaaactaaaatataaaatgtttttctcaaaaaagaaaaaactaaaatataaaatgcaaaaaataaagagaagaaaaaaaaaagagacgaaggacgacaaaagaacggagagacagagggaaccttaggcctagacagcagcactctctctctctcctccaaaccctagctctctctctctccaatccgactcctcaatctctctatctccatctctcaaatcggcgcttcaccatcttcgatctctttccgtcgctacttccgatcccgaaacttaagctctgttcttcaaaacagaatctagggttttcgtcagatttttctgacgaaatgaacggcttccgagcttgacgagctttccaattcctttttgtttgaatctgagagctgaatagttgaaaataatatgtatagggatcgtggtggtgggtcttccaaatcggagattgttggacctctcgatcggaagcgcatcaacgatgccctagacaagcatctagagaagtcttcaccgtcaacttcgagggccttgagcagtaaggacaaggaaaggctctccattccttccacctccgccggtaaatcgcagctcgatcatcgtgattcgcgctctgccgcagcttctctctctaagaataaatgctctgatggtttgtctttcttctctgtcgttgccttgttttctttagctggttttagtaactgtgattaatttcattttctgggtctttcctttttatcagtaatttcaaattttgttattatttttatgattcttattgcttagaactgtgttttcgccgatcttggttcagtgagttttgtgtttagtattctcatttggtttttgaagcttatttttagttaattgttcatatcaagtagttaaaggtacataataatctgattcgtgttaattttatcgtttaatttgataattcgtgttatctctttgtgtttcaactttgaagctagtatctttactcttttcaaaatactgcataatttgaatgagactgttcagtttttacggttcaagcttttcaaaatgtgttagtttttataatatatttttgtgtttgtttgtttgttgatgatattaacatgaatattctctaagcttgcttattgacgtgttgtgtcgttgtttgcagaggaatctgagacggatagtgaagaatccgatgtaagtggctctgatggagatgacacttcttggatttcatggttttgcaatttgcgaggaaatgagttcttttgcgaagtcgatgatgaatacattcaagatgatttcaacctttgtggtttgagcagtcaagtcccatattatgactatgcacttgatctgattttggacgtggaatcttctcatggtgagaaaaatgctaaattgaattctaatttgcaaaatttaggctcccgttattgctttttctaaagaacaattaactttttccctgaattttgtacactattaagttgtggccctcatgataacgtggtctttctatcccattctattcaattttattaaaaatgagtggcacggttgatatgagtgaataactttttttttgctgaaataagagttgataaattgatgcaaattaaatacctttcatattttttactttaatgattaaaaactaaaactaaaaattattattaaaaaaagaaataatcttttattctattattcattaacattaaaaaaaaagtgaagggtatttaatttgcatccatttatcactactatccattgcgtcattgattttatgataaaattaaatagagtgtgatggaaggactatgttgctgtaaaagttaaattttgatgagtattatttacaagtcgtatatcataagggtataacaagtttagggagcaaaaatactaattattcttttctgaacttttaagctgatacagtagacttgctatcttttccgttaaataaactttgaagctattgaacttttatctatagatgatgcacatcttgtgtattttatattgcatgtgtttgtctatctctacacctgtggtagtccatgggtgcattgtggacgcctctataactgctattgatctctcaggggatatgttcactgaggagcaaaatgagttggttgaatcagcagcggagatgctttatggtcttattcatgtccgatacatactcactagtaaaggaatgtctgcaatggtatgattttttataaaaaaaattcctattattagtgttttatgtttttacaaatgttgatttagaatttattacagttggagaagtacaaaaactatgactttgggagatgcccacgagtatattgctgtggacaaccttgccttcctgttggccaatctgacattcctcgttcgagtactgtaaaaatttactgcccgaagtgtgaagacatctattatcctcgatccaaataccaaggcagtatccttattgttcattaactattattaaattctgaatttatttttgcattttcttgaatcttgcctgcagaaattttgaagttttttatttaattgtttttttttcctatttgatttatggttgtttttcatccagaatgaagtttgataggaagctctacttctgatccctttaaagttgaagcttttttttgtgtggtatagtgttcatgggcacttgtgtattgtataataggtttatgatataatgtgatataactatgagtgtcttaaaaagtagattaatgtttacattttcctttgtgatttaatatgattattatcgttgctgttcactggctatcaacatttctttgctagttgcaaaacaacgtatttcgagagagagacttagacctttgcaatataatactgtgacatcattttaatttgtctcacaatttttgattcttgatttacttcacttttaactttatcgcgatattgttaaacttcattgccttctgtttctatttgagagtttccttgacaatttgcagacattgacggagcatattttggaaccacattccctcacttatttttgatgacctatgggcaccttaagccacagaaggctgcacaaagttacatcccaagagtcttcggcttcaagattcacaagctgtgagccccgctggatgttgaagttggaatatgcattcagttccctagttagccccaatctgtggttgtcgcttgcatctttgcctctggcctttcactgaaacgggaatggcatggctcggatgagtgaggtaaaatgcagtattccataaaagtaccacaattgattttaccaaaaaggaaatgtttaaagtgcaaattgatcctattagccgggttaaaacttctttttataatctttaaattttacttgtgagattaacaaagtgtttgtaagccttattatttctcttattttctttctcctataatcctttttgagattgtttgaagtgctttgcatttgcagttctttttattatgtattaccttctttaatgcctagttaatcaccaacaatatccacctttgtacttaagattatggaaaacactggagagacagaagaccatgtatttttttttactaattaatttggtttaaacaggtgtagaaccctctcgaaattatacctactttgggctatacttctccactattgttctaaacccaataactccatctgtatatattattgttactccttgctagtttggtttttttttttaactaataaaaaataagatatattgactgagaactgagaaaattctctttattttttgcttctcttttttggtcattgatgcctgtaagttctaccttaaaccaatcattaaagaagaatgagttttttattcttaataaataatgaactgttggacattagtagcaccaaagctacaaagtacaaacaataggtaactgtatataacattctatgattgagattgagtatttttaataaagcttcatatcttttttaattcttatagtcaatttagtattgataagattgtaattacaaaattttaatattttttttaaggatatttgcgttgaaatctctaaaatatttacaattattacacatagtcatcttaaaaaagtagtagtaaatgtactttatttcataattttgttgcagtggtactttttaattgttaagtgccagttcaaaaatacgtcgctgtatatttttttagcttatttaatatatagtctagataagatttttttgctgctattttttttattagtgtcatatgtaataatcgtaaattataaaggagttttgctgtaaatatctttattttttatttgaattatattgatttttttatattattaaattaaataaaatagagcaacaaagtttatttaagggataattttaaaaaaaacataaaaataacaaaaaataaataaaaaaaatgtggtttgtaagaaatttttattattttacggttttttagattttacatacataaaatacgatttttttgtgttatatttttgttattttgttattgattttttattatttgtatattattttttatattgttttgttgttatttttttattattttgatgtaatttttttgttattttcttgtattttattgaatatcataatgtaaaaaaaaaaaaaattaaacataaaaatataaatttcttttacaaaaatgagtgttttatgtaattcctttatttaatataatatactaggttcacttcgtattcgtatagcaaagatttgctataactaaatttttgaagttttcatagcaattttatcaaagattaaaaatttaaggaaaagttacataaaatatttttggaaaattttacaattcactcctttattattatttattttgacatttaaaataattttttaaattttttttttcatagtcatgtacattatagtcatttaagatatttggtaaaattttaaaaaatttgaaaaaaatataacacgtcgaaaacaagattcagacagtgtgttgcatgtgtgacttttattttaggctaattagtaatnnnnnnnnnnnnnnnnnnnnnnnnactaaattgtgccccctgaactttttttgccgttagaaattccccccaaactattgagat

SEQ ID NO: 111964 - DNA, 1497 bp, Cannabis sativa
gagcaatggcggaagagacggcgatgaatggaatcgatgatcaagcgacggagaatttctacgattccgatcagacggcggagctgacccaaaaggttgagactttggaacaagagaaacggaaattggctgcagagaatgaagaagcgaaagagaagattaagaaattgacgattgagatcgagaaggggaaaaccgatgaggcagagctgaaggagaagcttagagagatggagaaggagatcgagagtttcgaagaggataagaaggcgttgggagcgatcgcagggagagcggcggagttggagactgaagtttcgaggctccaacacgatctgatctccaccatgtccgaaggcgaggctgcggcgaaagaggtttctgagcttaagggggttttaagtgagaaagaagcgaagattgggagcattgagagtgagttggagagcttgaagacgaccaaagccgagagcgaaaagagggtaagggaattggagaggaaaattggggttttggagatgaaggagattgaggaaaagagcaagagagttagagctgaggaggatatgagggaacaaattgaggaattggagaggcaaaaagttcaattgaataaagtaattgaggagttggaatctcaggtttctaaaactggggctgaagctgagaagtgtgtgaaggagagagtgactgttgaggctgcccttaaagaatcagaggagaaagctaaagcaatggagtctaaggttcattacttgcagaaggaggtggagaaggccgaaacggttgttagggaagtaaatgacaggactgtgaaggttgttaatggtgctgtggatgatatgtttaatgggaaagaagagaagggtttgaatttgcaatggcctgttgttgcagggtctgctggagcagccattgttgttggtgctgctgtgctctttgtgttgtacggaaggcgtcggtgaatcgattacaatttgatttgattagagagaataatgcagggaaaaggaactgaaattggggaaggaagctaagagaggttagagctttcttgatatgattctcataaagtttcaattttgttaggagctttagtggttgcttattttgttggttttgttattgagtatatggattatgggtagctctaatttatggagtgctttgtccttgcagtttttcttcacttcgtttgtgactataattatgtcagttctcttggttatattgatacagtattattatcaacttcaagccatgttgaattgcttgaaaaactcttgaatgtaacacactgagatatactaaacttatttttctttattcttaataataattattgttatagtagttcgttttctggccatttcttgctttatgaagtatttaacaattgacatagatatcaaaattcttgaacatatacataaagacattgctgaactacttagagactactttaggtggcgtttggttggaggcaatgaaatggaa

SEQ ID NO: 111965 - DNA, 1278 bp, Cannabis sativa
atgcaacataaaagcaatttctgatctttttattaattagtaaatctgattgtattgaaatgaatttcatttagggcacaaaacccaatatattattcattcgatgcttcttccctcatactaaattcatgtcctactattcctcctgtcataaaaccttaattttcacctatatatccttctcttagccacatccatactctttcccataatgtgtttattcccataattccatttccatcactattgttgcacccccctataccaccatatctagcacccaatatagtcactccttccctatcattccacaagctcctcaaatatctcctccccctaatacatactaccactaccactaacactaattctccacttcttaatctagttaacacagtaagtgacaagcatccaatcatctcaattgtaagttgatgctcttttcttcatcacaaactaagtgttatctcataagacacacttagatcaaaaggggctattaggatgggttcctttatagactttagcttgttaggaattggttagttggtagcagctagttttttaaaaatgttagttagttagtctaacatgctaaccttttctcagtcggttttatgttgcctctgcttctataatttacattgtaattatttatttcattattaacaaaaacaaaaatatcaattcattttactctttctattttaatagataaattatgtacccaatagtgaaacagtaaaaaaatatacctatatctgatttccatactacttcatgtgggtttaaataaaatccatactaacaaatttgtttcacaaaaacattcatactagaacctagactactagctcacatgttcactcaaccaccaattagttgagttaccctcaattctacaattgaataaaaagaattataacacgagaaataaaaaagatgtgaaacttactagaagtttgaagcaacaacacaacaatacattaggagtttgaattgggtcaatacatgaagaaatggtgctcatattcaacaggagaatcaaacaaatttcccgtacatcttcgtctcaagctcatcattggggaaacattctcaacttctaatcgttcacctccaccgtccgcaaatgtagaaattaaaaattcaaattttaaataacaatctaattttattttctaaatgtgtacaaccctagcacaaatattataaaggctaattagtaatttttccctccgaactttgacatgtactaaatcgtgcctcctgaacttt

SEQ ID NO: 111966 - DNA, 4408 bp, Cannabis sativa
  modified_base (3063)..(3073): a, c, t, g, unknown or other
  modified_base (4363)..(4373): a, c, t, g, unknown or other
aagtaaatttgattatattgaaaggagttttatttagggcacaaaacccaacagcgggagcatcatttccgaaccacctagcaacccaaccaagggtacactgcaaccactaccttgaaactcgagaccaactaacaccagacaaaggtacaaggcgtgaggattccacctgaaacctccacctcatgtttgccaccttgttccttaggaccactatgtactccaagccattagagtctataaatactccttccttagatgtgagaagaggttggaaaatcatttttgtaaccaccatattgagagtaataattttttatttattttctctctattttgagatagacacttgaatttatatttcctctttttcttcatcttagctctgagtttgaagtagagtttgattttttcagccaataagttagttgatgagttctcactgtcaacagttatcaggacaaaagacaccatccttgtcctaaccaacactatcatccaggctcgaagtgagaaaattgggggaattcattactatgcctagaaggtgcttttacaaagcttcagtctcagtgattatcacagcagtgccaacctcataatcaaccacgctgatctgacttctaggatacacaggaacaaaattagttggaacagattggataggtatgggattatacacgatttgattgatatttttttcatggggaaaatggtgagcaacccagatgaaggggtaattaaaccttatgagaaaatggtagtacaggggcagcagagctcagagctgcaacctcagtagcctaaagactttcacgtctttgtgtcagataggtttgtggacgacaaaacttcttggaactcttaccttcacggagagcttgattctattctgtaaatttcctcttcttgggccgagaagctttggctccaggaggaatataaacaagggtagacatcaaagcttgaggtttggaggaagaagatgaacaagcactagtggatgaggtggccaaatatgactgtatattggtttcatttgagagtaactcgaatgaggatgaatcgggtccacaccatgagtgaaagcatcaaaaccccactaaataaaaacaccctccttgtgcagctcagtggcagatttaaaaattgagcatttttttttttttggtttttggaaacattctgggcatgagtgtaattcttggctttaagaactacaatttgggtagcatgaacctctttaatgaccaagggataatttgcatcatcaagacttatcaaacaatctttgtagacgatggtgagatcacctaacttgaccctgaccacttctgctttaatcttcagagtagaagggtaaacagtgcatgatgagcaaaggataggaaaacacttataaacttcctcagtaaggataaaacctattggatatgtatcctccttaatgctatggataatccccaattggcgcaaggtatctccatgagctgtaaggaaatatccaacaagctagaagttgtaccatcaatatgattggtaatagagaaaatctcagaggtttatagccttgggaaaccacttgccaccaattacaaaaaataaagtagacaaaacccttgttcgaagaaggaagattgtggaccaaataattagggctttttgcaaaatcataccaggtgggaaaatgagaagaacatttggttttgttgaagtagtagaaattctgaagtaaagaatgttagcccttaagagcacaaacgaaagccaaacccaaaattgtttgaataaagttggaaggagttagatcataaagacttcagtaagagaaagaatgtaaaccagaagagcaggaacatgaaatttcaaaagttccatgcatttcccactgactagaatttcatctttggcaagttcaagatccttcaaattttagtccagttcttctttcatctacatggaaaagtgaccccttctagaacagtgtacttagcacatatctcattgaaagtgtcttcatattcaatcaagaattcctaatccacaataggagaagatttcctagtaacagatatggtcttacctttaaggatcttgaagtcactgaaatcaaaggaaatcaaagagctagagaaaagaagtaaattttgaggcaacaggggagagaagttcaaagaaagcaagtcaaataagggattcagagaaaattttagggaagtaacctaaaaccttttaatttctcttcgtataaatatctcttttaaatttgaaataagaatgagaacgaaataattaggaaattaaaaaaggtggggatagttttccaaaattttgaaataattatctattaaataaatcactgcgcattaatggcatgtgacaatgttttttggtaactgttgcctttggtttttcccaaaacacgtggacgcaggtgagggggacacgtggatctaaaataaccatcactcacgaaaatcaattaagtcttggacaaaagaggaacacttcagggagggtacctcccggaggagagcataagacacatcactacctttcgagaggccagggccatgagaaggcatgtccgggaggtaaagagattacctgaacaatcacttcgcatttaatgtcgcatgggggaagatgtattggaacttccataaaagacgtgacaggtggcgtaaacccctttttatacagtgattacacaataatcgatgagtctaatgacaactactttatgaggaatcacatcaggcaagaggggataaaagattatatccacctaactcctaagatacctacggtgtaggtcatatgtatttcctattttgtatctgctaggaatatgtgcccctatgaagctaacatagaaagacaagtgatccattcctatggatccccccagaaaaatactataaataccccacaaacagattgaaaaggggtcgatcgattttatttaaggaatcgaagagagaaaatagaagagaaatccatcaagaatattctctgtaataaatactctcattaataaaaaaaaaagactcgtggactaannnnnnnnnnngccccaaccacgtaaaaatctcatgcatcaaactttctacaactcttcttatatattatttaattggttgctgaaaatctcacgcaacagtaaccaattccatggcatcagagcttgaactaaaatagtcacgagctgaaataccataaaaccaaggggcaattataaatgagataaataatcttaaaggtaaaaaagtaattccaaaataacaaaataaaggaagaactgatatggtggcttggcaggtttgtaaagaaatggactgtttcatttaaagggaagcagagctcaaagaagaaaggatctggagtagaactcaagaaaagaaagaacaaacatatgaggagctctgaaagccggaagacgaaagtgtgcagaggagcagatgagaattaatccacattgaccaattaaaacaggcataaagagggatgaaaatgattatttgcacttataaatagaagacctcctaattaaaaaaatgataaattctcgctcataccagacgagtcgaaactctgttagaatacatcctcaagaacactagctgtgagtatgagatgtagacgacccaaactaaatagagtgaattgagagagaaattgtgtaaactgacttggtttaaagaaattaaagtcataagacaatttgttgttgagccaattttgggcatcaacatttagtatgcgataaacattacaatgcgattttttttcaaaatatatatatatatactaaaatataacaaatgtacattattttattttatgacactcattgaagatgccatgcacatttaaagttttcaaaaactcgtaatgtgacactttcaaaaaaaaaaaaaaactcgtaatgtaaccggacaaatagaataaagcctagtgtgtattattttagggatattacataaaacacttattttggtaaaaattgtatattttatgttcaaagttattatttcacattttacagtattctgcaaaaacataagaaaataacaaaaaaactacgttaaaataacaagaaaacaacataaaaaataatatacaattaacaacaaaaaaacaagagtatagcataaaaatacataaaaaaattatatttatataagaatattaaaaattctgtacatatcgtatttttgtaattttttttgttgtttttggtattttttctgtaaaattatccctttatttttgttagaatttgctccctaaataaaactctatttcatgtaatcttttctattcaattatcaataaagaaacaaatttaatttcattactnnnnnnnnnnngttatttggttcatgtgatcatctatttacttatt

SEQ ID NO: 111967 - DNA, 4202 bp, Cannabis sativa
tatttttgttcatgtgatgtatctcattgccctgttgtcagatttgtaccatatggaaattgactaatatggtttgatatgtgaaattgacacttgctaatgctttttagaacccatctttacatctagcattaaacatgaatttaaagctgttgttaaaaagatagttccctgagcatgtaaagcttttaagctcttaatctgtattgtttgtttaattttcataattttttgaacatatattttgtgatgtgaatctggattggatgcttggattgatttattagttgctggaataggttcatgaaggtgttgtggaagacgtttcctggcatttgaggcatgagtacttatttggttcggttggtgatgatcagtacctgctcatatgggatcttcgaactccatctgttactaagcctgttcaatctgtagttgctcatcaaagtgaggtgagtgtataatacttgtgtggatttgacgtcaacttttacggtgtcctttacttgtaaattttcagttttagtgtttatgtcatttatttgttctgaaataaacgtggaataagttctattcatttttccttcaataatgtatttgaattgttttagctagcagatgctctcacttattacaaataaggcctattgactaaaatgcttgtttagctagcccttttaaatactaagtattatggttgacaaattttttattatcccacgatatctctatatataattatgagaaaatgttagtttaccacttatatttcattatcgatttacagtcttttgttttcatttataccacaacacttctttgataaataaaatattccatgtcagacaaaatttcattaagactaatgtcttttattaaatacattataaaagcactttagaatattgacaagtgaatctaatatggctaaacccgagcttatggaattagtacttattttttaacgggtaagtactcttttgaatcttgtgttttgcaaaagttactaatcaggccagctttgttaagtaacaatccaaacccagtgttttgcagaattggtgcttgagcccaattttcgtataaagattttagggataggattcgataataattgcgccacagtagggttagggaagaggaagttttagggttaaggtaagaaaaatgtttgaccaaatttggactcaggtatctttatgctgtattatataattatatattatacattatatatattcttctttagaagttgacttagcaatcttattttcatgatgttttgttaggttaattgtttggcgtttaatccctttaacgaatgggttgttgcaactggatccaccgacaaaactgtgaaactatttgacctacgcaaaatcagtaccacgctccacacatttgattgtcacaagtaaggactcttcaatttgatttactgaatacttttttaaatttatggttctgctatcttttgatactgaataattatttcatgttaatcattttagggaagaggttttccaagttggatggaatcctaaaaatgaaactatcctagcttcttgttgccttggccggagactgatggtgtgggatcttagcaggtatttctgaaaaaaatcatttttcttttaaatattaattttactttgatgttatagtagtatgtgccatgcaatacaaacttatttaagttgatgtattagcaattactgttttaatgtttttcttgcaagtttgggggatcagagttagtttttttttttttccagatgttttgacagaggtcacttagtctcttaggtgctatcacaaactacaatagatatggcctaggtcaaaaatcaagtcaatcagaactctgacatggggagaaaaataaaatgtagaatgtcttttcaactcttagagaattttttttttaaaataaatatatatatttatatataaaagaactcttaagaataagcacaattgaatcattgaaggcaactacgagcaaggataagataaatttgtattagtaaaacttgtttagttctgagtgtgttatatcttgagtttataaagaaaagaagtgggatcaacctaaattcatattagtgtctgtcctttacttctattgaatcgcctagggaaggaagacgaattgaacacaaccgaattgatgattgtagccgatgtctttgactgtgaattagttcttcagggacatatgttttgagataagtctcgactttgttaagctaactaaaggataggattgagcctttaaaaagaaaaagaatatttgattacaaatggtaactttgttcgagttttatggtttgtttcgggccacaaattaccttttttgagtcctgtattatagtattattaaccgtaaagcactagaatatattgatgctgctcccagtaaaacgtgagtgcagtaattttacaattgaaaacctcaagcaattgtaaattataaattttagatgcaatttcatcacagaagcttattgcttgctgtgctgtcccatgactttcttaattttgacttttttctgctggaactatgttttggtattctaacaattcataagttcatgttatttgtgaaccattgaaacaaagaatatgcacgaaaaacaatgatctatgttgtgtcggcattattaattattcttcttcgggtttgtttgcagaatcgatgaggagcagtcaatagaggatcaggaagatggtccaccagaattgcttttcattcatggtggtcacacaagtaaaatatctgatttttcgtggaacccatgtgaagattgggttatttctagtgtggccgaggataatattcttcagatctggcagatggcagagaacatctaccatgatgaagatgatttaccagaggaagccaccaagtcatcttagaaataaatgtcccattttaggttggtgaaattgagtaaaaagaaaaaaaaagtaaagaaaagaatgattagcaaatggcggatctaggggttttctttatttgtctttgtaatttttatttttctttccctgaccctttcgttcaccctcttactagttatcatgaatgtgaaaaatggtctaatgttgctcaggcagtaatgacaatgacttgtactaatctttgtatgtttattatatgagactcttgatttcagcttctcctactattgttgggttatctcaattgttttgtttatacttattgaagggtgaagcagatacagaggtaagtatggctgaggaaaactatggtggcattataataatcaaaacacaaacagaagacggtggcaaacaccattgaaatttgaatatcttcgaccataactactgaatacgcataagttcacactaagcttgactaggtattgtttttatcaactcccagttttcctatgcctaccagccatccaaacatttttcacttttgatggagcgtaacttttccataaatctttagcccaatttttcacatgttgcacttgtattgcatctcaatgtagagtaagattacattttcatttgacctctttaatcatctcttatttccttgaatgctattaactttactcgtaaaggttaattcataaatagttttaagaatttgagctcaataattgtggtatagttcctccaaataaaaaagtctccaaaagttgttcctggaaagttaggtgtctctcggatattgttcctggacagctaacttgtccatcctggaaggagtattgtggaatgatagttgagtccaaaagggagttcctaaatgactttcatgtccactccgggttcaagttttggatagtcaactccagttggttctatcatatccggaatcctctttagcgagtacctttggtccgtgatcctagaagctcgtatatattctcggatgcactaagactaatgctgacgtggagatctcgatcataggagagttggttaagttagttactatctaactaacttaacaacttcgattcttacagccaccgactttaggatcttgatcctaagtctataaataccaccttgacttgtcattttacatgctcatcatgtatctatcaaagactgtttgaaggaaactcatcatagagaagacaatgaaaggagtttggaacaagttggaagaactatacttaaaaccatcaatagctagcaagattaatttgctagaa

SEQ ID NO: 111968 - DNA, 8239 bp, Cannabis sativa
  modified_base (8189)..(8198): a, c, t, g, unknown or other
ggtcctatttttaatattttagaaaatacaggatctattttgtcatttaacaaaatacatggtccaatctttaacttttgtaaaacacagggtccaaaatgatatttaccctatttaatataacataaatatagtagttgataatatatagttggatcgttaattagagaaatgttaaaaggtaccactgtctagcaccctcaatgttatatcgttaattagtataataaacttataataataatgatttataaaaagtttatttctttttttttagtaaaaaagtttattttttttaaagtaaccttagttactttaataatatatatctagtccaaatttttataaatctctgtgtcatttatttttttctctcagttattattatttatccagtactttaatcgttgttttacactccgcatgttgaccaaaaacaaggtcgacacatgcatacataataaagtgagggggtcaattagatgtatcttcacccaaaaaaaaacaaggataaaaaattcctataaaaagattctcaataatataatataaggagatagagttgatcattaataatgtgaaactccatgaaaccaaaaatgaaaaacttttaatctagaatgcatcttctacatctagaaattacagttattttattcaacataaattaattaaggctcttttatcatatgtatcttctagttaaaattaatggcatagaaaaattcaattgtgttttgaattaatattaatttaagaatacaatttacataattacatctctattttaccgagctgtttatttgatattccatttttattaataattttattaattttaattcttctaattgccattagtttctattgtacatcttaaatatttaattttaattgtaatttttgtatggataggacaaaatcaatttactattgtagccactatataattatggagcgacatcaatactaaaatatatctgttgaattatggaattttgatagtaattaatttataatattttaattaaattattttaataggagagtaaataatggaattctaatttaaattcaaaacgttgagttttctaaattatacgactctattatattatttttttaaccaatatttgtatagtaatttttttttattgttgttagatatgtattgtcacctttttatttagttgatttaaatatataatatcatatacttttatagtttaattcaagattacaattagcaattacaaatataaaatactaatgtaaaatagataaaggaattgtttttgtataatattttatattagactttaatttaattttttgtcgcataaatatctaaatttagttatcgggtacagataattttaaatggttatataatagctaagttatattttcgaacttctgttggtatctgtctgttaaatgtcaaattattatccatatgttattttttttattggtatatttaaattaatttttaaataaaaaatataaatttaatgacttgaactaatcaaggactgtcacgtgactattaacttgacaattaatggttagatacttacagaagttttaaaaatataatttaagtattattattgttaaaaattaaacttaagcatttttttataattaggagttaatttataccacaaattaatcattttgtaaataataaaagtataacaataaaataataaaataatattattacttaggagaaagtccaaatatcagcccacttggatggcccctgcgccaatgtttaagaagaaattacattgtaattcactttactttacatgttttaatttttatattctttaaaatatactcacttttataaatgatgtctttattataccacttagattaatgtaaattatgtgttagacttaagtggaaggtaagattaatgtaaattatgtgttagacttaagtggaaggtaagcatatattgggcaatcccctcacaaaagtgagtacattttaatgaaatataattaaagggtattttttattaatggaaataaaaaataggtattcctcaatttatcccaatatctaagacttgtgttgagcggagccctagggtgaatcaatcaatgaaacaatataataaattttcaaataatactcaagacttttttaacaaaagttatgtacaccctttcttttctaacttcagattggttaaaataactatcatattaaattattagattagtgatgatatttaaaatgaatgaattatttcaggttggtgactgatattcctggaagtacagggccatcgttcggacaagaagtgatgtgctacgagagccctcgaccaactgtggggattcatcgatatgtgtttgtgttgttccgacaattgggaaggcaaacagtgtatgggcctgggtggcgtcagaacttcaacaccaaggactttgctgagctttataaccttggtttgcctgttgctgccctttattacaactcccagagggagtctggctctggtggcagaaccaggactactactactcgatcataattataatcataattataattatcaaaaccaaatctatctatctaatagaactaataattgataataagcagcttaattataaattaagcaatcaatgtgtaatgtttagtgcatttggaaatggaatattactatatgcactttgttttttatacataaataattaacattaaggataatatatattcttctaatttctgccggagtattcccttttgcagtatgccaaattttgtattttataattacaaacttattatttaattacttaattagttaaacgtggaataataaaattgatgtgaaacatacattttgtagccatagataaagattcagtaactacataccaacaaattacaaggaaccaaagcgcagaaaaataaaaacacacgaggtttttatacgtggtatcatcaatcttgcagattgcgattagtctatggagtcacacttagagataaaattcattaataaagttatcaaaactcaaaagtatttgacttatactaattactctctctattgcatgccgcaagcttgatgtattctaacttaaagaatgaaccttggtgaaaattcaagatcttgaactcactttgatatgttgaagagtacgtgctttcttctgatgcaagttgaaccagatcatttggataaaaattgagagagttatgcccattttattgaagggagacttgtgctgttttgctctagttgcaagcactgacacgaccaagtggcaactctcagccatgcatgttctcggacccctcggggtgtgttttgacttgtttttttttttatgacaagtcatattttaaggatcccgagaccccaaaacctcatttcaacattcaaaaccctaactagagaccattgccaccaatcagggccagaaagtggcagtggtgtggtcggtcatggattatgggaagccttagattgtgtttattggttatttcagtcatatagatgctagaaaactacttttgtcacattagttcttggtcaattacttaagagagcactactataattttttccaaaaaagtggcagtagtcgcataagggggttatggacccttggtgacttttctcactggtatttgatatataaatgttggaaatacaatttggccaaagaaactttcccttctatgtgatggccgatcactgccaccatttgtgccaaaaatgtggcagtggtcggccaagtggttcctacaccacttggtggcttttctcacttggttttgacatgttattgatgaaaatgtacttttggcaaaaaatctcatctccattccttatggtcaaccactaccacaatttgtggcacaaagatggcaatggtcggctaggcttgtcttttggtgagaaatagtttctttcacttgtgttgcactccttggtggtgaggggacacattttgataagttcccttcggtactttataagtggcgaccactgccatctccttatgccagtgttctccaaaaactggagagcactgccatcttcatgtggcagtggtcgcatatgtcccattgcatgggactcttgtgcaatcttgactttatgctgaagtctaagcctttttattcctaaatgagttaagtccttattggtttctttgtcggattgaggtctttaggatgaaaacgctcacgagggccaataaaccctagtttgggcacacttgagtgtgtgagtcccaccatcaaatggttggttaatatttttgagttccgtagaggtgctatgaggccctcaagaaggatgtcttaactcatttgacatttataagtcttggtcaaagtcgcaaggtttttttaaatttttgaaaattgagtataatatatttgtttggttgcattttaaagtattggaatgttattccaataaaatattttttctattattttggtagaataactattctattttgaaatgaaaagaaatatcattctaatgcaagataaaaaaaaattaataatttttaggagaattatcccatgtactgtaagttacacttttttttttgaatttaggttgcgatttgagttgcttaatgtggattgcgttgtggattgtgaattgagttggattgcgatttgagttgtttcgtgggttgcgatgtggattgcgaattaagttgagttgcgatttgagttgcttcgtgagttgcgattagagtatttacagtaaaatatcatatatttgtaatttataccaattttaacgtagaaatgaaaggaaaaaaaaaaaaatactttgaaatatataaatgaacaaacctttttttatacttaaatttgatttcattctattccctttgatattcatattttcattcctttcccaagaagatgcaagatagcatgcttggaaagttgaactgggcattgaacgtaagtaaaggctttaggtgaattttctttggttagacctttggcttccgtcctatcgtaactgcgcacaattttgtttttgttttgattctcatttcacatccaattaattatcaaaaccaaccaaattctacaaaccattttggcgatagggaggaggatcatgtaaaggctgattgatttgattgcaaatggttctgctgcccacttcaatcgttagaattagaatcatcttcttcctcgatattccgcaaaaaggaaaagaaaagaaacacttactagactgacatagacatagtgaagtagaaatggttctgcattaagaaacgtttctgaaaattgtgattacaaacccaagttcattcataatagatgcaaaactttttaagcattttcccattctaaaacacataaaggtgttgtgtgttgtatcttgtattgacatgaactgaagaatctcatttgatcagataattataggtatataatcagaaaagaagaatcccattcaaatattacaaacaaaaacaagaaggtgaagtcaatgaaagcgaagaaatcgtacttgtgtatactatgatatgatagttatcatatggttgaagaagtcaaacgatccaaaccctgttgagctacggccaattctggttcgaccttaagggcgtcctcgtaagctttcctagcctcctcctccattttcttcacttcatagcattctccaagcagacaaaaagccttggcattatcagggctgagcttcacagcctcatccaagtcggtgataaccgaatcaacctttccacgccgagccatggccatcttcaactcagctctcttgaaaaaggcgtcccctctctctttctcactgagagacttaaccgcaagaggagagagagctgcgtcgagtgattcaagggcagaggtcttgaaaccctgaagatcgaaaaccagagccttgagtatgtgagcggcggcgtccttggggtcgagtgcgatcgccttctcagcttcggctaacgcatccttggcaaatgatgaggaatcggagcgagactttgcagatcgggctcgggcgagatgctgtgcgcctagaacgaagtggcgcttagattggacttgggctcggtcccggtaacggaatttggcgtacaatttctggggaatgttgtggagagctaggaacatgaagagagataccagtataagcaccgcttggaggagtagatcagtcaccattgacatgattctatgaagaatcgaattcaaaatcagtgatcttgagaaggaattaggaaagttgaagagggtttttgatttaggaaggaaaaggaaagtatcaccagagatgagaaggagaagggtatagtaaatgctgggaagaggaagacgccataactaggcaggggaggtcttctaggttgggtgggtcgctcttcttctctgacggctttgactggcacaaaagtcatttacgacaataaaataagtcaatccacctatttacttacttttattttacaatgttatattttagtggtaaattgggttatattatgacttaatgtttcagattttatacacctaaatacctaatgtttatttttgaaagcaaagatacttaatgttacaattttcttatactggtactaccacttccgttaactcataaatatggatacgtggagggttcagatgcattacatttaattttattttattgtaaaatttaatattcataatatcagaaactaaatattacttgtttaaaaaaaaacatgttatcataacaatttttacatgatattggcactttaattccataatcatattccatatactatactggttcactcaactatggtaatttagtattgcatctctcttaatttttttaaaaaagcaagtaatatttattttttgatattaagaatattaaattttaaaataaaataaataaatgtaatcaatttttaccctccacgtgtccatatttatgaattaataacggaagtggtagtaacggtgtaaaagaattgtaacattaggtatttttgctacaaaaaataaacattagatatttaagtgtctaaaataaaaaacattaggtatttatgccgcaatttacccttaattttattcactattttctttttaatttttttcactcatctcacattcttacaaaaaaaatatctttatatataaaatatgaatatttaacgatttttattagtttaatagaatattttaaaaactataatttagaaagaattttctttatcaatggtgatcagtcatggtatccatagtgttgcttctttttcgcccaacctcgatcgcatcttgtctcatgtacttccctttgtctttccgctcacgtcttgcttagacttaatcccactaaattgaagcatgacccgtgctcaaaaatgtcaccttcaattacttatgtaatcccaaatatttttagcaattataaaagaagtgacagtatatatggggctcaaaagaagtacacaaataatctcatttgaagctaaacacttttcatattttgtaggaaaattcccttctctaatcttgggaattgaaacgaaccatccacataagcacaagattttttcccgaacaaatcattcttcattgcataagcccgtgacaagtcatcaccctgggaatttatacctctattggctttgcaatccctcttaagaagtggtgttaagtcaacaagaaagtctattaatttcgttcagtgaaaggaccctatcttatcccgaaccactagtctttagcagctctattcgatagatgtggattgaccgattctgggtccctaattggacaagcgggtagcactactacgactgacactatgactcattacctggaaatgcctcgtcatagcacccacagaagttcccttggtctgacaattttaaatcatttacttgctttattatggacaagcgggttattttaccatttattttatcaaatttttttaatgccaaataattcaaacctaaacctagttggatttctataaatagatagtgatggccacaacttaaaagatgatgaacacacttgccttcagtcaaaattttgagccatcttctctatgccattcgaatccttcatctctttttctctcttcaatatttcaaaccctatagtgataatgtaagtgtccacacacatcaagtggtactcannnnnnnnnngtaagactgtgaagaatccaattcaagagaaggagaatcag

SEQ ID NO: 111969 - DNA, 2655 bp, Cannabis sativa
taaatatcgctaaatatcgtaaaatatcacaaaaaactggtaaaccagaagaaaaaaatgcagaaaacgagagaggccgtgagagaagatgacggcgaagccttgtgactaagttctgggtctgtgtgttcgatggtaggggttctaagtcggggttaacgccggagaaagagagagagacatggatgtttggtttttatttgtttaaaggtaaaattggatagaaaaatagtatgagtatattttgcatgatgcaaaatatgctagcatacttttagtgaataaattaattttaagcatataatatcaaatttcccttaattaaattgtcttctattctcatattattattattacgagtgtaatggaatgaaggcctccgtattttcaaaaagagagtagtccttttttttattattattgttgaaacttgaaatggagagtagtccatcttttaacagtaaatagttatccttttcaaaaagaaaaaaataataaaagaaatagaaaagatagttatgcatgttcttagatacactttgccataattcaaaccaatgggctttgctacaagatccctagctgaactatctccaaattttctttatatatatttatatatataaatatatatgtcaccactaaaatattatctaaaagaaaaagaaacaaaaccctccacgtgggcaaactggtggtgaataaaataagtaggcattccatctaaaaaaatctcatgccacaagactcaaaatgtggccgtgtgttattccatattttgaacccctaataattaataattatttaatgaagaaaaaaaaaagtcacatttcacgtttaagtaacaatcccaatagaaaggaaaagaaagagaaatacatcattatcattatcaatgctttcaaaacattttcgctgcctattattattattattattattattattattatccctcacctttttaattctcaaattggttttttattgaattttaaattttaaattttaaattcttatggccttttttttttctctcattacagtcacatcatcacaagttgggtagacaagatatttctgcttaattatattgtattgtaccaaagttttttaactatcaagaaaataaaataatagaaaaagacagaagaaaagtgctagaaagtggaacccacttccccctcaacctatggacctaattcatcatctttgacaatcattttgtcctattagtcttaagaggagagagaagaagaaatataaataaataagaattgatcaactaacagaaaccaatgtgactataggcttcaccaaagggccaaatatatatataaatatttgtatatgtgactctccactctccaagcctcctcacccaccctattagccgcccccagttgagcttaacttttatgaccctttttactagctaaagctttggttgcttccttccttattgacccccctctctctctctctctctgaggttcacagaaaaatatatagtacagcgccccatgtttttggtcacttggccattggaggctccgatgcgccacttcacaagggcactgtactgcactatatgattttttcaatagcctttggttttctcttcactctttcgtcatctctctctctctcccaattaatcaatactaaaagaatacgaaatttcttttatattccaactacaatgtttacacaaaaacttacattctttattatttttatatatatataaataataaagaaaaattaattatttaactagtatttaattattagaaactaaaaataataaaaaaacaattttaatgtgacctacaacgtctcactaattaataatagtgaaatactgtaaacaattatatatataggatcacttttactgttgagtttgattaattttaatgagaaataaaactaattttaaatttttagtttctcctaaaagatgactttaatatataatatttggttatttagagtgattattatttaatatctttattaatttattaagcggcaatgaggccaatttgtgggaatctttccgtatatatcaaatgtagagattaattaagttataattagtcaattaattagcaaagaataatggttgtgcatggcagcaacaagctaattaaaattaattagtggacaaagcacttgtattaatatttatcttgccaaattatctaatttcaacattgacatttggatatttttgtatatctagctaaatatttatataaaaatacgggtataaatggaaaattatttgatgtattattttttattttttttatttttacaatttgagttgcaatttataatattcggttgattattatgtgaatttctgtaaaaataataaaaaaaaatctcaaaatgtaaaaaaataaaaaaaaaaaaaaactattagaaatatcctaggtacaaagttttcttaacacaaaatatatatcaaaatgtatatataaaacccaaattatgtacgtacgttgtttagaaatatcttccaagatatatataatagggtatgctcttaatgggtattacccatgtatgggtattttattcttgaccattggatcaaatatctaatggttgatatttataatcattaattaaatattaaaaaat

SEQ ID NO: 111970 - DNA, 3578 bp, Cannabis sativa
attaaaaatatactaaacttaatctaaaattaatactaaaagtaacctaacacctggttaccatgggatgggacctgttaacaatagtagaagttgtgttgtttgagacaatggttgtggaaaaagtagatgtagatgtaggattttggtcagtgataataggtggaatagtagctatgatggtatttgtttatggaattggttgagagtcaaacacaacatatggttgacaattggtagttttagataaaggacctggttgagatacagacacaaaatcttggttggtcaatatgtgatgttggtaaagtattaggtacagggttcagtgaggatatttatggggttccaggtataggtagtaaaggttgtgccataggtaaggttaggttaatcttagatgttggtggggtcaccattgtcacagtagtagcattaggagtaccatgaacaaactaagtattaatacatggtttagttgaaaaactaaatgtgggaacaaattgagaatgaaatgcaggatgtacctattctgtgggctgcctggagtgatcccaaggtagtgattttcattgaagataacatttttagcaatgaacattctgccattttaattttcacataagtagcccttgtgaacatgaacgtaacccaaaaataaggattgttcagacttgaaatctagcttgtgagagttataaggtcttaaatgagggaaacaagcacaaccaaagggtttcaagatagaatagttaagtttgtcattaaacaagcattcctaagggttgatattttcaagcacaagtgttggcagtttgtttatagtgaatgtggaacattagaaaacatgccactagtatttcaaattcaattttgcttgtggaagcaaggtaagacctgtctctgtgatgtgtctatgcttcctttctactctaccattttgttggtgagtatgaggacgtggatgggaaaataggataccttgatcaactaaaaatctagcaaatggttcgtaatcaccaccaccattagcctgaacacttttaataagcaattcaaatttcttttccaccatacttttaaactgaataaatatctcaaaggcccgtgattttaatgtaagagggtctatccaagtgaatctactaaaattatccaagaaatgaatgtagtatctaaaaccattttttgaaggttcatgagaagggccccagaggtctgtgtgtataagttctaagggttgagtgacttgatttgggaatgttaaaaagggcagtctatgaattttcccttgttagcaggcattgcaaaattgaatattttttagggtaccaatatgaggtatgaaaggtaatagtttttgtagtgtggacaaggcaagatgacccaatttacaatgccacaagtttatatcagattgttgtgaaacatgaaacatggaatgctcagaggaataagaaacataacttttatttattgaagttgtgttacaagagttttgcgtgagagcacactttttagtacaattacaatctttgttacaactacaaacattagaaaagttgtcagaagtagcaagatgacattgcagtgtggagcttgagtgactagaagcatctccaagaagatagagtccatctctaggtttccctttgagtagcacgaaccgtgttgtcttgtccttgacaaagcaacaatttttatgaaattcaagaaaaatatcattatcttgagtaagtttagatacactaactaggttcttggtaatagaaagaacagtcaaaacatattgcatatgtacaagacaaaatttagcgtaagatggaatagagacaggccctgtatgagatatgaacagtttcttaccatcaccaatggctagtgtttcattgtagggctttaatcattaagattgatgtgatcaaaagtgacatgtgttgtggctcctgagtcaaaataccaagaattgtcctctccaaagtcttgcaccatagttatgatatatgcatgagcatcacaatcaaagtccaactcaataagaaagacacgattagcagggttacttggtgtaggagttatccagttttcatccaaacgataatagtacattgcagcagtgtgtccactcttgatacacacttgacacactactttttgatttggaaaccttaaaaacccttgcctcagcctgttggtggattagtagaattggttgaattattgctggcaaaatgtcgaacacctccaaatctggccttaccaaaggccacactggcttgcattttgattgtaagatcactcatggctaaatgatgttcaatacgactttcatgagacagaagtagagcttgaacttcttcaaagataaggcatcacttcttgaagtaatccttgagataacaaaatcaaactcgggtcctaggccattgagagcttgaagcaccaaatctcgatcatcaacaagggaaccagaaatagccagagagtcagcaatggtttgaaccttctcaatgaattcagagatggacaaactgccattatgaacatgtgagaattgccctttgagttgaagtagacgagctttagtttgagaggaaaatttttatataagagcacgccaaatagagaaagatgtgttgaaattagcaaccgatgcaagaatgctttctgacattgaagattgtagccaagaaagaagtaactgatccttgcgtcgcaattgaatgtactcaggattcgaagcaccattaagaagagttgtgggaggaggaacatcggtgaacaagttctcatcaagatcatgtcctatcacagtaggaattacttgtgatttttaagaaaggaagtttacatgatctagcttgatcgtaagagaggaagacaaagaattagaaataggattccaagatccagtaacagcgggatgcatggtacaggcctgggagcttcagttgcaggtgccatggcaggagactgaggatcggaggttgacgaacacagaaaacataattgcaaaaagctcaatctattattgattatcattatatttatacaagcatgatgttacaagaaacagaatattaagttgtttgtaatagaaagactaactactttaactaactaaacaccctttaactaacttgaactaacaaaaaaaactaattaagattagttaatggtgttaacagtaacatggatatttgtaaaataataataataataaaaataatgtagtaacatgtaaattttgtgtattttgcaaatctaattaatgaagtgctattttaaccatatttcattatattaattgtacgaaattcattgctcagtaaatataaatgattaaagcttttcatataattaggtcccacacacatatatttgtgatcatcatattatatgctatttgaccctacattagggagctaatacaataggtattgtacattttaaatattgataggtataatgatatagggagttaatacaataggtattgtaatttttacctatcaatagggatagtaatttatagccattgatttaatccaatggctcaaatcaactcttgaaaacta

SEQ ID NO: 111971 - DNA, 7057 bp, Cannabis sativa
  modified_base (1821)..(1823): a, c, t, g, unknown or other
ttttttttttttttttgagggggtggaaatgtgtttaaaacttaatttatctgcataataccattttgtttcaggatgaagttatccatattcatagacattgggaaccagaaggtttagggaagatataccccctgaacctgcatatgcaattccatgggagagaaatgcactccttatgtttcatcacagaagaattgcagcctggagcaaagcacagccttttatctcgatctagttggattgctactggctgtgaagatggaactgtaaggttgactaggtatgtctataattaatttttaaaatatgacgtaaaaatgattgagaagctctgctttggtactatatgacttgagaaaaagagcagattgtgtgtattttgcagaacattctatgtaagccttatactcataatgtgtagactaccttccctctctttctgttttttttcttttcttttctttaaaacttgtcaatttctttgtcatgaaattgataaagtgttgcactgattttatgtaatcaactgattattatatgttttacttagatatactccaggtgttgaaaattggtctgaatcaaaattactgggggagcatgttggtggatcagctgtgaggtcaatatgctatacgtcaaggatacacgtgatttcatcagatctggccaaaagtactgttgccctaaacaaagatgatgtgtttgtagagaatatagaaaatccatttcttctgatttcagttggtgcaaaacgggtcctaacttcttggctgttgaggaataggaaattacacaagacagaagacagtacactggctggtgagcagcataatgctacagaaaatggcaattcatctgaagtgtcatcttctatgtcattccagtggctttcaactgatatgccacccaaatattcaagttcagataaatataccaaaagtattgggaaggaaactggtctacaagagaatgtgcctggtatgaaagctaacgaaggtacagaagatgggaaaatggagctgaaatcttgcactagagacaaatgtgaagatgattggagatacctggctgtcactgcttttcttgtgaaatatgctggttccaggtagttggagattataatatatttgtcatgcataccgaattttcttttgaatctgatgccaaaaaattatttgtttcaggttaactgtctgttttgtagttgtcgcttgttcagatgccacattgacgttacgggctctagtcttgccccatagattatggtattaataaaaatatctatgttttggttacttaaggattttctctagcatttctctcgctaactggcattttttttgtcctttgttacattgcaggtttgatgtggcattgatggtgtccctatcatcacccgttttagcattgcagcatgttatcattccaacatgtttgccttctaaaggttagtctattcttagtttaaatcttctagttgaaacgaaacctgtatcccaatcccacagttcattacaatgctctgttactgcccactccacaggttgaacctctaaaaactctgaacctttttttttttgaacaactaaaaactctgaaccttaaattaagagaaaaaatggaaaaatcccttagtgtaaattaggtggtctgcagattcttcatttctgaaccaaacacactacccaagagaaagcttgaaatgactttctttgaaagacccactaattcagctttctatctataattttttttgttttgtataataataatgataatgataataataatttgatgatgataataataataatnnnaataataataataataatttgatgatgatgatgatgttgtttatgcatcctaaatgaagtatgtactcgagtcctgtttttttctggtatttctattcctactctcacagcctgtccatgtggaaaactatggcacgcacatttcttcatagaaatttgtcaaggacataatctttcactctttaatattaaaatactgaagttatggtagtttgatagttttgacattacctttctttggattctttgattcttatataatgtttcattcacagagaatattcaggatagaagtgtgtatattgtcattagtggtgctacagacgggagcgttgccttctgggacataagtgaaagtattgaaacttttatgtgttgggtatcagttcttcatgtggagaagttcattgactgtcagaagcggccacgtactggaaggggaagtcagggtggaagatggtggagatctattggccgtagcatgtcgaaaaatagcacagacagtgaatcaatcactgacaaagctggaccagccgctaatcttgatttcccaaattttgttaaacatgaaataccatcattgaaagatgcttctgaaagtagcacaacaacttcttttgaagctattcatgttgcctccaataagtcagaattggacatagatgattcttcatctgaaatatgcaaaatatgtccttcacatgttttaaagaaccttcaccaatctggtgttaattgtcttcatgtttcagatgtgaaaggttgtcaaagtcctgacaatggttttgtttacaatgtacttagtggaggtgatgatcaagctctccactatcttagctttgatttagaattttcatcagcagagcggaaaactgaaataataacaccagaagtgataaatcccatcactgggcaaggatgtgctaagaactttgttaaatcttaccaaaatcagaaccacggttataggatcagattcttaaatcgtgataaggttctttctgctcattcctctgctgtaaaaggtaagtaatgtgtttgaactataaatttcattcatgtcgaacaggtcttttattttattttatttttacagcataggtacatacaggagccatagtaagcattcagaatttttcatcacataatttttttgaaaaaaggagaaagagatcacttgtcttagactgatattccctcgatatatattgcaagcctcacttaaggcggaggaaaaccatagtaaataaaacaggaagcaaaaataaaaaatgaaaaaactgtagaaaaaatttgtgacagcaatcacaaaatcccaggattattacaacagcacaccccaattcctgcttaagtctggaaaggagagatcctcgaaatgtttagttcttaagatccaagtgacagtccagaatttgattctttcccaaacatcctccgcagacctttccagtccataaataattctgctatttctctctgtccacaccgcccataacagtgtcgtagtcctccataatttaactttcctttttttccccatcggtttgcttatgttctctttgtgcgcttcactttatctaaaaagttcgactattccgatgcacatgttccagcccggagagattgccatatatggtcttcttttttgcaatacttcatgcacgcttgctttccttaagaatactaaccatctaaacactttaacttttgctggtactcaacttttccacagggttttagtccactctaggttctttgagctattatctgaagtgaagcaaaggaaagcggacttacaagagaaagagccaccatattttggattccaacccctactgtcaaccgataagttagccaaattcacatgttccacttgctgtaacaaatccatcatacttggaacttgtccaacaggtttcttctgaatttgaagtcccaatttaccaccctgaattcaccttcctccacaatttccatatctttgatgcacatattctttgatctaaccaatgtggctaactccgtgtaggaagtaagtaatgtattctgtccaatccacacatcttccccaaaacgaattcatttcccatttcccaatttgaaggtttccaagtttaagtattcaccataaagtgatgcaattcctttccaaggtcctcgagaagtcattctctcacccgttttagtatcttaaaaattctccgacattccataacgactctttataactctatgccagagcgattttgtttccaacaggaatctccacaaccatttcgtcaacaggctcttattcctcatttctaagttcccaattcccaaacccccgccctttctcggtctacaaacttccttccaatcaatcaaatgttcccctcccgagaggttacctccttcccagaaaaatctcccatcatcttctcaatcaattgcaccaccacctttggtgctttaaatatggaaagataataaatgggtaaagatgagagagctgattggattaaagtcagtcttcctccccgaaagaaaagagcatttccatccatcaatccttttagcacacttagaataaggctggcctccaaaaatcaattctattcagggatcctcccaaaggcataccaagatatttcatcggccattctcctatctcgcacccaatagacgaagcgcaactattaatcacagactcatccatgcaaatacctagcaattgactcttgcttatgttgacttttaaacccgagacggagcaaaaagcattgaccaccacaaccacatttctcaacgacatctcatcatttgcaaaaagtattgtgttatctgcgaaatgtaaatgactaacttgcactttctccttccctaccagaaaccagacaccttccttgagtctattgctttgtaagtcctctacgaccccgaattcttctcctaggttttccattaacaaaaatggagaaagaggttgacgagatacatcccataatccacttccgccaactctcaccaaaacctttgcgttccagtactaaatcgagaaattcccactcatagtccttttcaaaatcaattttgaatactaattcctttttattcctgcttctgtactcctctaccgcttcatttgttacttgtactgaatccaatatttgtcttccaagtacaaaagccgattgagtctctgaaatcgtgtcttccatcactaatcgaagtctaatagccaaaactttagctactattttataaacactagtgataaggtttatcggcctataatctttgatcttacagctgtcaatcttttctgggattaagcataagaaggtctcgttaatgctccatgggattcttccttcctcttgaaaagctttaaaactttgaataaattatctttcacaacatcccaattggattattggaaaacggctgaactgtagtataataaatcatctttcatcacataatttagtttatgcagtataactatcaatgtgacaaatttctatgctcttttttcttgactcactaaatttaatttcatgaaggtgtctggacagacggtttgtgggtgttttccactggtctagatcagcgaatccgttgttggcgtcttggggagcaaggtaaaataacagagaaggcctatgtcatcattagtgtgccagagccagaagcattggatgctaggatctgcagtaggtaagcagtgtacttaccctatgtttggttgaagagaaaagggaaggaaaagtttggagaaaaaggtggatggaattagaaatttgtttggttggttggtggtaatctgatagttgattaatgaattctctttcttgataaaaaaaaatgaatggaaaaaaaaagtaaagagaatgtttacaatgtatatttaaccaaattactaaattaatctaattttttatttaaaataatttacatcatttttctttccttgtaccgaacaagataaagaaaaatatattttattttctatcacccaaattttctatctcccctacaatttctctctttccatttttctttccttcatacaaaacataggggtaagaaggacctgtcttaacagccgtcctacttaaagaatatttgttgctttaataacctagttctttgacataaagttcctcatttgtttttgtcatacaggggatactatcagattgcagtagcagggagaggaatgcaaatagctgagttctggtgcaactcataaatgaattcatgaaagcagaagcgattcggttggcttgctttttgcccacttggtcattcctttatactcgttcctgggtactcttcattgccgagtgacttgaaattttctatctatatgtattagttccttttatttattctttctcattgccagatagaaacttagtcactatcttgatattttgaccatattgagaacttttggatgcctgtattagctgtaacttgggttccaattgtatcttttttttttccacaatttacatgttatacaatggatttgattgcatattttataagaggttgggaaggtttttgtttctatgttatgtttacttttggtaggtgtgactagatggttttcacctcccaggtatgaagtaggtgggcaagaatcaagattctcaagaggaaccttttccagtactatagcaagtctatacaatgaagccgaacacagagaacatggcaagccgtccattctcgacttctttcaccttgagcctgcaaatgcctcaggtacctctcaactgggttatccttatctcccaaagctccaagccttgctcctatgcactgcaacagactgttgatagagatcgccctgtatttttgataaaatggtggtatggttaatggtttcgtctttggtgccatctttattctgtaatatccttattgagggagtgagggctttaacggaaattataagagtttgtctgatgagtaatggaagcagggcatggctatagaatcccaatttttttttataggatctggtgaagttaaccttgaatcatgttaaaaagaggtaggtgcgtccttttgacacttagtacaaaatgttttgtattagtgtgtagtactaagcacatcagataaaaagaggtattagtgtgtattagcattgctattttctatagagtaatttgcggcaaaaccctcccaactattactttacttgcaaaaaaccatccaacctcatattttggtgg

SEQ ID NO: 111972 - DNA, 1707 bp, Cannabis sativa
ttttagtagggactccttaccttttgtttttgaatccttagttttggatgatttagtttaatgaaatttaatcattattaaaaaaaaaaacattaatggagtggtgatatataaataaataaagtaatatttattgtgataaatttagcttaacttttaagatgtgttaaatttacatagcataagatcatctctaatataagatgtaaagttgatgttaaatttagcacaatatttgagtttatgttatatttagcttactatttacaattgtgctctaatataaagatgtaaaaaaatataattattattatcatttaattttgttttaaaaatatattaatatcattatttttttattttttattttttaaataataataatatagtaaacaaagaagataaagttacgtaaaacttaataaattataaacagaactctctaactaagtcattaactttgtttgcaaatcattgaaatatgatataattcatcaaataaagtcttacaaatcattaacaataaaaccaatgggagaaacatatccaaaacaaaaattaaatgataatcaagccaccaaactatacttgcaggagctgaaaaaacaaacttaataagtgaatatattaacagatcgaaaacaaaaattaaagctcacaaataagaacataacaatctaatatcatctagaattaaactcaaagacgagtccaaaataagagaattattaaacttatgaacaattccttactcttggcctcaacaacattcaactcgatactaatttcaaatggcgagagcctcgactaactcaggaagaacaattccaagaactttccaagaggcagaaacaagaacttctctaactcaatttctaataaccaagagagaaagtgcaaatctttctaaccgaagccagatttacctgatttattgtttagttaggattttgtattatgtttaattttttttttttttttttttttatttccaaaactttgtcaagtaatatcagctggatttgaatccaaattttatcttattcttggtaccaaaaagcacattattaagaatcatatatttgacaaaacaaatgtacacactcatctgaatccaggtttttttgtaagtctttcataagtcttaccttgttacactactagggatttcataatccattctatataatttcatcttaaataattttttgctgtgataccaaattataactccctaataattaagaatgtaacgtgatttacttaacacatgcttatctcaataaatttacaatttgactactgtattagaagtatattgattattgaataaataacaaaaaacttaagacaattagaactttaacttttattaacaacttggggtattgataaactaccacaaaattcattcacaaatttacttattaattaaaagctggggcaaaattagatttttcttttataggacccaataaatattaagcgacctaaattaattgattattccttacaactgtcaactaaatctattattctaataaaaaaatatttaattagttttcataataactttaatattacatgagttttccataatataattgaatgtgtttcttgggattttttctaaaataagtgttgcgataattttgcacacgcaagtgtacgtatcgttttaagtagtagactcactaggagtgaggt

SEQ ID NO: 111973 - DNA, 3249 bp, Cannabis sativa
  modified_base (3081)..(3083): a, c, t, g, unknown or other
tttttttttttttgtaattattttgcattttatgtatatttttgagaaattcccaaaattctgtgggtttaagagaaatcgagtcaagggcaacttttttaattcgcttgtttctcatctcgcctagtcgcttttaaccttctctcacctctactctatctatctcagatactcactttttcatcacagggaagcagcccacgcaagagattcaagagaaacccaaataggtaagactgtttaattcactgtctttggatgattttggttcaactgcatatttgtgtatatattattttttggaaaatacatctctgtttatgaaattaaaactaacattagaaaataaaagatttaatttgatgacataaaagagaagtttttgatggttgtctgtaaaaactttaaagctaaaacaaattaattgcaatggtcagagctactttgagcttgtgttttgtatgtttaacattgtatctctattacttactaacattactcatttgttctctttggtgattattcacattttaatccagtgcaagatctttctgtcaattctgttcaagctataaaagttcaatcacaagctttgagaaaggttaaagattccaaaaaagcatgcattatttaattttgtctatttatcatttttattttcatatatgcagggtataggaataaattagtagtctggaggtttaaatataatagtttctcatagtttttatttatttatttatttttattttaatttatctaatttaatccagaaattataattgcataattttattcatgatgatttctgttttttccattcccagcaaagggcaacttttttaaattctcccgtggccaagtctcgttgttaaaggccatcttttggttgtgtgccattggtatgtttttcaagttctcaatgatatgccttttcttctgattaggatgttccttgtcttgattcatgtttgatttattttatttgaaagctagaaagaaaaagttctatgtcttctattgtgcttttgtcatacaacttgattttctattagacaattttccagggaaaccatgttcaaactttgtccttcaaaatagaggcctgttggtgttttagttaatagttactttatattttttagtgttcatagtatttattggtagaatttgaacatcagatgtttataactgtgtagatacatatttggactcattctgcatctacatcattctaagtttgctttatatggttttctcttttatctttaagtcatatgataatgtgctggtgtgtattaaaagttgattgtctgtctacttgaagctttgttgcctatctgtattgtattgtttctaatgtccataaacattttggtattgtatcattacacacatttaaaaaagttgaattacatcttatacaattcaattattttcttgttaaaattttggactcattggcttagtaaagaactcactatcagtgtttttgatttctctctatttccctagtgtatttgtgtatatatgctcttctgttgaaatcatttgagaacaaatttctagtgtgaattgataagataaaagcatggaatacaacaggggatcttgctgatggtcaatgcttgtttacgtaattggtataacaatacccagtttgacccgtactgttgtctcttgttgtgtttttagagtaataactacgttctctttgctctgttcttgtatgatacaatatcataatctgttgtattagagtaatgagccaatagttttatgctctcaagacttgaactattttttaatatgaatttatttcagttaatatgtaaagcgttgaggcaaaaatgttttaacttagctgacaagaacagaagacgattgatgcaatcatcaaggtaatggtatatgacgctcgtaaccccttttctattatttttttattgccaagacataacctcttagtgcaactatacgtattcgcaaacttaactgttacttttatttagctgtttaattctagtctggggtaaatttgaacttcaaattcaagctgttttcattaagaataaaaacacatcatgtattaataatgtcacactgatgaagatgattttgatatatcatttttttaggtgtcattttattgcgcatgctaacgtttattttttttagaaaaaaaattacttttgtcgacacttttttacgctggctaaagtctaaaatttcaacgactttttctggtgctttttttccgttgtcaaaagtcttgtactatttttttggttctttcaactttaccgatgcaaaaaaacgccaacgactgttattactggcgagcttttcttagtgattttttgcgccagcaaaagtgtgcaaatcaagacttttgttgacgcaaaaaaagtttcagcaaaagtcactgctttgttgtggcaacggttaaagaaaggctgaagatgaccaacatgctttgtggtggtgcacgactatgaagaaatttcagaaaaatagtggcttcttcaatcttatgaaacaagcgcaccacaatgattgcgttacttttctgttgaatatctctggatttatggccaaagagaattttgagatgttggcattatcttagcaagcctaatatttaaaaagaacttattacatgaaagatcttgtttgcgatgaatgatgtgctagagtggatttcaaggttggttgcttggtgaagaaattctacatgagaacaaaagaaatcaggtttgttgaagaagatcattggcctcccccaacaaataatatgactttaatcaatgtagattattgggaagtaaaatgcgtgcagaaatgatgcagcggctagagatagaacaggtaaagttaaagcttctcaatgcaagtacatcagttggtttctcagtcctttggctacaaactcattgctatatgggactgtttaaaagactgcatttttctttgggtttttttcataaatgtacaacaaaaataatataattacaaaaaatgtgcaaaaaaaattattttgaaaatttatacattttaaaaacttattacatgaaaccatannntttaatcattaaataataaaacatgtttattgaaactcaaaataagcaatttcgtaaaattaattaaacagttttataataataaacaagttaaatattttttttattaaaaaataaatatttattatctattttggtatgtattattataattcaataagatttt

SEQ ID NO: 111974 - DNA, 4774 bp, Cannabis sativa
  modified_base (4725)..(4735): a, c, t, g, unknown or other
tcataaactttattccaaaatagaccacataaatttgacttatttatttgatgacctaacacacattttatatatacaattgtgaccccaattatttctaacacaaagttaatgaatttgaagcagaatgacataatagcttacctgctcggatacaccaactcgagtaatacagatcaactcgtcttggtttgtcacgccttgggatggaagaacaggtaacaccctaaaaaaccacatcagattggtaaatactttcagtgtgtgttagaatggggaagtgtagggttaaggtgcatgaaattctatctcaaaaccaattggcaatgagaggagtagctcatgtatcttatgtatggtatttagtttccatatattatcaatgtgagactttctaacatcctccctcaagattgtggctatttttttttttgctcaccaatcttgcacaactcaatcacaagtggctcttttggctcacaatgactctttttggttcactatccccgaatcacaagtgactcttttggctcgtctttttggattggtttttggatttagatcggttactcgttaaagttttagtttggctctaataccatgttagaatgcgtaagtgtatggttagggtagtaaaatatgtgagtgtatggtaaggtgcatgaggttctatctcaaaatcaattggcaatgagaggagtagtcatgcatcttatctatggtgtttaatttctatatattatcaatatgaaaaaaataaaccgatcgtagagttcgaaactagttcatttttacctttgttatgcagtagtatgaccttcctatttcccatatacgacgaccaattatgtattctctgtctttacagaagaaaggaaactgcattttcccataacacgaagtctaaataagttaaacatagtttacaagaatgaaaggaataagagttaactaactctaacaatactacctttcttatccaatgaacaagcatggttcctgtggttggacactcttttaaagttttgtaatatgcaagcatatcatcccatttcgatcgaaattcatcatcccagaaaaagtcccttactatttcaggtgtggcattctcaaacacagtgctactacgatattggggaggaccagtctaaccgaaaaaccaaagacaatgcaatgcacaaatcatagagttaaacaaccattttgtctttaaaagactaatctcaaaagtgaaggaaatagtcttcttactttgggatctcttctccatgctttgtagctcatcgttgggttagaacgatccatcatcggtatccaagtagggcctccatctttcatctccacaagttggaaaagatgttccaaatcctcaacatttacaagattagaatccccttcatctaactccaatacactattaccacattgcaataaaagctaatgagaaatttctaataattgaaattatgcaataatattcatcattagagtgaactaaattcatatgggaatgtcacccaaataaggatagctcaaacaatcaaacatgtttgcacctacaaaacttgaggacaagtcttttcctgagtaactacatagaaatcattataattttctggtttaaaattacaatttagggaaaagggtatctctagaaatgaactaaaacagtttagaaatatttgacataagtaacaaaggtcaaaaatttacaaaataaaattaggtgggaagcctagtttttgaaaaagagttcatttgggaatgtcaagagtatcacaaattcagggaaaagattattccaaataaaaatatttaatatgagcaataaagattaaagatttcaagtacctgaattcatcatcttcagaaggggacatagagacctcttttaatggagaattgtttgaggttaagactaagtgattttcttttccaaagcttacccatttgggtttccatgcccaaccaaccattaaacctaaaataaaagcaacccaaataggagaaagaagtaaaaacaaatttgtacacactcccaaaattgtgatgggtctttctaattctaatattctctcaaaagactcaataagagccataacaacagaagaaactgaaaacccagaaaaggaaaaccaaaaatactaatgggaattcatcatcatcatcatcatcataataatcataaccactttgatagtggccaaaacataggtagatacaaataaaaattggaactttacattttgagaggtagagaaaaaatcagaggaaagtgacaaagaaaaaacagtatgatgattgagacatgagaagaagtagaagtaaggtagggatgattatcatggtttgagaaagattttgtcttttgagtcatgatgatgagagagacggtgtcgttttggggtttaaaagcctttaaagcttaaagctttgattttgattcaaagaatgtgaaaaggaatatgttggagataaaggtttggcggagaaacaaagagatttgattggcggttcatattggacatagatataatctatctatatatatttaaaaataacaactattatgaaatgcttttaaaaaacaactagaagtgtcattaacttatgaatttatgagtattgtattataattattagagtaatttttaatataaatatttgagtttaatttgtagttgtaaataaatatttaagtttaattttttacaagtaatatttttgaaacttttataaatatttgaccgttatattatctagtgttatttttttattggtatatttaaattaatttttaaattaaaaataaaaatttaataatatggaataattaaaaattatcatgtgattattaacttatacttaatggttagatacttacatttttaaaaatataacttgagtattattaccatcgaaaataaaatttaaatatttatttgcaatcaaaaatatacagtgaaatccaattctaatttcatcaataattgtatgtaatggtgttaaatttatgttgtggtttaacatttcgcatcattttttttttgcttaactcgtttttgaattattactactcaacgatcttgtcttctgattctttttacattttcaaaaattttactcaagttggtaacactatcaaagtgtctcctcttattttaaggtaatataattatatcatttcgttctaactgtcgttttacttgcatttaactctctaagtttaaatttgttatcagatcagtagtttgtaagattttaccgtcaaaatttaagcttaaatggttaaatgcaagtcgagtaataattgagaggatttagccgtaaaaaactctaattatattttgccctaaaatattaaaatactgccaaaatgtaccactaatattcaataacaatgttcaaaacattacaagtattacacagtattacgagttttaaataaataaacacaatttgataatgacaataatttaggtaatttttaaccatacgaaaatttcaaaaatacaatttaaaattaataataattctttggataaactatatttattgattgatttgttattttttttctttctaaaatcacaataaaagtccacaataacatattgcttgtacgttgaaaaaaaaggtcataataacacttaataattaatgtgtttattacttggaagcatagaattttattttgaagatttttgtggttgttattgtattgatttaggtttcttgatacatacgtctgttctttcttttttggattaaattcttgaatttaacgttcatgatctgaaaattgttgttgtgttgactatgcatttggattattatacatgtatatttagaaataaattagatgtgttgttgtaataaaataatataagattaagattaatgaatgttgtgttattgtagttgtaatagaagtatgtataatatataatcactctaatttgttattatatattatccaatcttttcttttagaatttaaaattggtttaaacaatagtcacattatacctaccactaatttaaaatatatatataaaagcatattttgtttgataagtaataatgatcaaatttttggggataggtaggtataggaagtggggtgtatttgtattgcaaaacccattttaatactattcaatttccttgtgtatttcttttttatttattttcttattggtatgctgttattttgaatgaattgcgaatgttaagattgttaaattattattttttcaataaaaggataactttcattaatccagttaataaattaatagctaaaaaatatgacttagagagaaataagaattatgtcccaattaatggacaactttgtttgtaaatcattcaacaagactttattaaatattacaaaaattattcaatagacttttacagtcatgaactaacaaatcaaattttgaaagcacatgtaattactccaaatagtttagacacatattaaactgttcgtttccagcagaactcgatctcatttgtctctattaatccaatttaaaacctctttgatgccaataatttttgcaatttttagtttgatatggcccctttttttcacattaaaggcttccagaactaggccaccattaacacaagctatacgtcccacaccaaattcattaagtgattcaaataaagttctatcaacatttattttgatcataataataataataatannnnnnnnnnnagtaatttgcggcaaaactccctcaactatcaatttact

SEQ ID NO: 111975 - DNA, 1527 bp, Cannabis sativa
  modified_base (1044)..(1044): a, c, t, g, unknown or other
tctctctctctctctctctcataacaacacacatatttcaaaacgagcctttatataaataaataaagaagatcgagctttgtggtctgtgaagtagttgctaaagtagttatggggaaggaatactggtattggggtggaaaatcctcgaagagaggaagagaagcagtagctaaagacgcagccactgcttcggcgggttgcatgtgcgcagtgtttcagttatttgattttcaacagtttcagctccctaatttaaaccaggatgctaaaccctctttcaaacaaggcagcagtcctttcattcagccccaagagcctgttagtccaaaaggtaagcacatacacttatttataatgaatgttattatgaattattttctcttttgtattcatgtcttgactatactactatattatggctggaatttgtgaaattcattcaggtatagaggcaccaagaaacagtttgaaatctgatgagggtacatcactatcatctatcatagaggaagaagaagatactaaagaaaatttcaatttgactatcccaactgtaagagtcttaataagtacttatcagtgtccacatttcatatattttattactattattattatataaatatttatgatggttgattaaaaatccagatgggtattcaaatcaaaacaaatggagggtcaagatcatcatcaaaagctggaggagctatcagtgatttttcctcggacactagtagctctccaagtaccaaaactccaagcttggtagcaagattaatgggcctagaccttcttccagagaccaactccccaagttttactccaccggcctctcattcagcccaacaaaatcgtgtcaagagattacctctaaggcctcgccaacctcagctccaaaccaaagatcttactaattattcaggcactcgttcattgccggagactccaagaatatcattagccagaagatccgacgtcgactatcacccccgtctctcgcttcaaatcaataaagagaacaacaacaacaacaacaanaacaacaacaacaacaacaacgctgctaatctttgtactgatgatttggacttctcaaagttatctgctttaagaagaaagcagttaagagttcatgaaaccgaccatcatcattacgagagcagtactcgaagtccaggtcattacgctagacagattgttaagcaggtgaaagagagtgtaagcaggaaagttggtttggtggacataacaaacacatcttctaggaacagagaatataatcagagcaaagatgaacttgttaaacagctcaaatccaagaaagtttcaaagggtttggccaaacttgatgaccaagcaagcggagcaaagaattactcgttatcaatatcaaacaattcctgttctccaaggctcagattcacagaccccaagactattaggactattagtactattagtactacttgtactactactgctccaacaacaacaacaacaacagcatcaacagcaacaaca

SEQ ID NO: 111976 - DNA, 1947 bp, Cannabis sativa
  modified_base (1880)..(1910): a, c, t, g, unknown or other
ttgtagtttagtggtaaatattaatgttgaaacctagttctaatgagagagttttttattgtgatagattattgataagaattttttttggaaggaaggctggcagctggggcaaaatagctcaaatagaagaaaatcattaaatgaagactaagcaatatatctatatactgaatatatgagtatataaatgcatagtaggaatatagctctaaccttattttcaaaagtttcgaatgaattggaggactcaaatcttccagtggtgggagactggagaaattaacaaattagtctctctataaattaatcaattaattcagtaattaaaatgtgaacattttttttttattaccggacaggatgatgaattgagcaatgaatcgaacagagctgatgagggagagggcaaaggagaagactcatttatttgagttttataaacatgaaaatctcttttttcagaaagggtggcgctcattctgcagccagtgttccaacccctattatgatcattgggagggtccggaagcagaatctcccgaccgtctgtagaagagtgtgcgaagacctttggtacttttcccattgatactgttaatatgaagagaaaaaataatttcatcgatgttaaagtaagccactttaacaacgatttccttcctcctctgttcctcaaaaggtatccacgcatactcgatcaattattgttcgtagaatgatgtaatgacaatggtgttgaaggtgggcctggtttagattcgtgttttcatggagttttaaagagtttagattcctcttttcatgaagaaaaatggaatagaaagaacgagctcagcttttattctgctagtcacagcgtaatggtaactctttccatgtatatatatagttaccctagccttgtggtgtacttataattttgttttttaaggaatacgtgtaaattattacattaaattataataaattatcttaatttaaaaaaaaattataagtcaaaaaaattaacaaaattaaattcttgttagtgataaattaattatgttggagaaattagcactttagtagcatttatacgtgcttttcactgattggtacaaattgcatccctaaatataatttcaacaaaattgattctaatatatttaaaatttcacattttaattacataaaatatctaatacagtaaaataaactgaatttcattaagttccaaaattaagactaaaaaaaatttgtgcaatgaattaaaatcaaaagtaaaaatatttattattattattattaattaaaaattttaaaaaccttaaatagaactatgaatggatattaggttttttttaattaaatctgtttaaaatcatttttattttgtacgtggatttgaattttacaacattattcttaaaattaataattaatttttttaatatatcaattatatgttttatgtaatcaaatagaaatataaataaattaagtaatattataagaaaccaacaaaaccaactaaaatgtattaaaaaaatataatataattattatctcaaattagatataatattatcttttattttgaggtgagtatttacgtactatatattcgcacgaatgaatttttaaaatatattttcatttatatttattccactaattttattatgataggtaaatataccatgatagtttttctttttatttttctgtttttttatattaatatatttatatatggtgtttaaatttaaaaaaaatatttattacttaataaaaaaaattaattatacttatgtacgtaatttaaaattaactaggtaaatgttacgtgcaatgcacttatttccaaattttagaaaaatataggtgccgtttggtannnnnnnnnnnnnnnnnnnnnnnnnnnnnnnaatgaaagtaaaattttgtttttaaaaaatttatttt

SEQ ID NO: 111977 - DNA, 3825 bp, Cannabis sativa
  modified_base (581)..(602): a, c, t, g, unknown or other
tactgctatagtaataatgaccagttcagaacattttcttagaatttctacatgaactttgaaatctaaagcagctctatgcccaatatttttatgctgctactatgagatatgtctgtattcttataacttataaaaagggagggatcatttcgtgtcaataatgcaaaagctgacctgtatcatctgttgaggaccttcagttggcttcttgagaaaaagtttgacagttgcagtcagcaattgcaactggacttgtgcaggctcttcagggaaactctccaaaaagctctcaagcagctcatcagcattatcaattctttccgcatattcaccaattatccaaatcattgatgcctaaaaggacgtcaacagtgatatgaagacataatgagtagacaatgaaggtattaagatgtgggcctattcaataacaacggaagcaaaatgagtaccttagcttcaggttcatctaaggtgtctagactctcacatagtgttgcaatgatggattcgtagctgcaagggaatagagataaaacaaaatttttaaaggagatttaataataataataataatnnnnnnnnnnnnnnnnnnnnnnaataataataaataaaataaattaataaaaaaccacatcattatcacatatcataaataatataacttacgtatttggatatctcctaaagatgtctttgatgacaataatagcctcttgaaccacataattgactttaatcttaatcaattcaagtagaacactgatgcaacgctcagctgctctttctaatttgatggcacaacggccaatagcacgaactgcctttctaacaaaatctacatcaacttcagtagcatactctttaaactctaataaaacctacagaatcatcatgaaaaaaaaaaggcagtattgaatgaaactgaatattaaatcattgccagtaaataagtttaatcacaactcttctactacaacagatacttaaaatacctgatcaatatttcggtcagatgcaagctttatcatgatttctaatttttccatcttcacataaattggatcattgtacttgcagaagaacacctgtcaaaaaactaactaattagatacaatatcttcctgcaacaacacaacaaattcaagcacatgtggtatttttatgcataaaatacaattttagatattgaaatgacaagttacaaacataagactgataaaattcaccttaatttcatgggcaaggattgtgggccgtctttgtactataaggttgatgttccgcaatgcaacatattgtatttcaggttcagcagagagtaatgtcacaagtggaggagccatcttcttacaaagattccgaaccacatctgtactagttataagttccatttgttgcagtatcatctgcaaggtaaaaggtagggaaagactgttacgatactgtatgttgacagaataacagcaacaaagtgacaaccctaaacaatcaaccaaggaatcaccttcacagcagaaagtacgaccgcacagttggcatgttgcagtctaggtgtaactctctcaacaatgttctcagcttcacgggcatctgctgccttatatctagaaagggcatccagtataaaaacttgaccccacctgcgacaattatcatttcaagttaaacaaaaaaacaataaataaataaagcaatctcaaaggaataacactaacagcaggcattggatgcaaactcaaacacaaaaataatatcaaaagcttaatacacccacacaaaaggcctattgattctgtgatattacaggtatttccgatgaaaaataaattaataaacatatacaagtaacaaaggagagaaacaaaactcactccgtgcattcatttaaagcagtaagcagctttgagagagtgtgactagtgatctcaaaaattggtctattactgttctcttgaatttcagcaagagcagccacagcatttgctacaaccattgggttgttgtcagatatcaaatccttgagagaatcaagaaaacctctatcctcaaccagctcagcatttatgtcatatagtttggcaacacatatggctgctgtcttgcgaacataaggatcatcatcctgtcaagaaatgaaattaatcagtaccaaaaacgagctgcaagaaaaaggaaacgctggcaaaatgactaatatactaaaaataaaataaaaagtgccaaatcccaaaatttaatatgttataccttaagacacctctgaaggggatcacaaaggtactctgtaattttgtcaacacgaatgcaccccatagtgcgaacagccaaagcacgaattaaaggatttgggtcctgtgaatcctgcagaaatgacgaggtgaaatcaagtaaagatcgacaaaatcattgtagttaaatatagaagaaaatggcaaggaagcctcttctgtcagtccttgtaacccttccacccccgtacattgtcagtatcaatatgtagaagacagaaagtttattgaaggctttaccttaacaaaagtattcactgcaagtattgccaagtcaggctgactctttgcgtaatttatgagatacagataaacaagcttcttcaactccaaattttcagtttgcatacaattcactacatcagtgaaaagtgatgaaacatccttccctactgtcatagcagcaatcactttcttgacagcatcttttctcttatcctacatgacacataaaacagcaataatactatgatttcgggaacaaaaacgaaataaacccactacaggaaatatcgaattactagtcccagtaaagtttacatgctagaacgttaatatttattttaatatactttcaagggaattatcttcaaaaaagctaatagatcccaacgatacaaatcacaatttcacagtaactcaagcaaccagcaatgtcttcttcgccgctaaactaaataatttttttttttttgaacaaagactaaataaaaattttggtcgcaatgaattcccccaacaaaaaaaagcacaaattttctttcccaatttcccatagtttcccagaaaacaaacaaacacagatcgttgacacaaactatacaacaaccccaatccagaaacgatattacgcaaatgaagcacaatcccaatggtgtccataatcaaattaagaagcgaatccacagatctacgaccaaatcccgcagagaaatcaggataagataatagcaactcaaaaactaagtgatacagatcagagatccacatataatatacagatatatatagagagaaagagaccttgtactgagaattgagctcctctttaagctcggggatttctcccttcttggtggtggagaagtacttggaatcgtggccgctcattgctgaggcttggtcttcttcgtcttcttgttcacctcgtctgagagagtctttcgagtcgaaaatgaaaaatatttgcagagaagccgaacccaaactcgaagccaacaaataaaccgtagtgcccgaaccggtactggttgactagtatgacccggttttcctatttacctaaaactaaccgctcttcccaaatttttgaactatttaaattttgaccctattatttaatgtttatcacatagaattacagtgtcaaattggcaatgcctaataatctattctcaatttattttatttttgaagaatctatatataatataaaggaaagtacaaaatatttttactatttatctattttatatatgtcttctattttatatatgtcttctaagtaatatatctatctatatctatatat

SEQ ID NO: 111978 - DNA, 3054 bp, Cannabis sativa
tctagtcattttattttgcaagatttcacagccatttctaaatatcatcttctacatgtaatttttttgggccacttcatagataccttacctcaataccataatatcacattcctagggtactctacatgtgtctgtagctattgtcaggttttcttattattcttgctcttaatatgaagtttgacgttttgactacatttgttttggtatctagagctgcccttctttttatctacccaagcttagaaatggattgtacaagtaccgggcaagagatgttactatgagagcctcagagtcttcaagtggtgatttagagccatttgcccctcttcaatttgaatcccctgttggccagcttttggcccaaattttgcaaacacatccacatttacttcctgcagccattgaccagcagcttgagagccttggaactgatagcgatgatacccagaaaaaggatttatcttcttaccctcaagatctactctacaagtgagtactaatatcttcctctctaataattctatttgtgtggttgatatcatattgttcaattactcgaccattgttgctgtttattgttttgagctaaatataatttattgtgaaatacactgaaatataaatgggtaatattacaaaattcacgttaagttattattattattttgaagtttggataattgatgtcatgttacccaacatctatatttaagctatacctaacctacaccatgtttcctttgaataagggcccaaactatgtcaggactggccctggctgtaactcatgttatctcctatccagaggattagcacaaatggtcagttatgtgatttgctcccactaggtctgaggtttgagtctctcctaagtaacaattgctatcgtttattggtctccaaacatcgtagggttagatggaaacgtagtttaaaaaaatgaattgtttatgctacctacttgaggattgttgtatcctgtcacttttatatggtattcatgcaaaactggtttcattattaatttcctcttgctgcatcgattttgtttatgaataccatagacttgaattgggtatgtatagctcatatgaggtgggtgtaagcttggatgtacaaatggaggcttagctggtgtaggtatagcttgaatgcaggtgtaggtacatgctcagacataggtgtaggctggctagaactcatgtttatttttggtgggtctaggactgtcccaaatagtattcaaatttcccttcgttgtgtactctcccactgaagaaaatttttggtgtaaaaggtgttattttctttttttatcaaagaaagtgatggctaaagagatgaaataattctgtttcttttcatcaaagaaagtgatgactaaagagatgaaatgatttttatccctagtgaatagcaacggcaccccttttgaatagcagaatacactaagaagatgtgttggtgggtccttggatcaatcttactcccatatcaggtatggatatgagcgaaaattgagcacccaaaggtgttggaagggagtgaagtgaaggattgtgtaagaggaaaaaacattaggagagactactcaaaggagtttgttattgagggagttgtatagaagacgattgattaataggctaagggagtagcatatatcttaaaatgtttgggaacatggtatggtagtaaacgttgatgaacatgcatatgaactttgatgtaaaattattttttagtgagcaacatctcaagaactttgttgaagtattctttttccactaaaaataatttgtatatttgtattgtgatgattttaaatcatgctatagaagtttttgaaatttagtcatgtaataaaaaattaacacagtggcactgagggggatgatggttagggtatgttatttcatgagtaggattttgaataagctctatccatccatgccctattattttatttcaagtgaaatggatagggtataggtacgtatcaaaattgaagagttaaaaataaatgaaaattaacacacagtaattatccaaacaaattcacacacaatctatgaaaattaacaataattattgttacatttattgatataatctatgatatataaaatgtttatatatagcgtttcttctttggggctgtacagatcatccccaccggtggttcttttttttggaccgtgaatgagttagtggacgactgagattagataagccagatgggttccatacttgttattgtggactttacaccacctgattatattatgtcttttttatgttttattttataaaactttaatttaaaaacagtattttccataatataaataaataaataaataaataattcattaaattatttattgggacactggtttttcgtcggagttgctccaaccggcttcgagccaagactgggaagaactggcaactcatctcctgtttaatggaatcgctattgtcgaccttggtctttgtggtttttgggttcttgatttctgttgtcacccttcgtgtcgatctccaatctccgcgagagtgataattgtcatcggagtatggacaattgcagttgtacaactttaaaaccttctgatcctctgtaatggcttcggatctagccaacaccgtaggtagttaaaaccctaagatcttctctatgaattttttgttgaagattaggagaaagtacaacttcttgcttgaattgctactatcctctggttaggtatagttctattgccattttagccagattccatccaattcgtcgaatataaaatcaaaagaaaattgaagtaaatgggatagaaatgagattctagtggatatagagaatcttgatacaaaaaatttacaacaacaaacaaatgaaattaagcttttcaatcaaaatgaatggttattttgaccaaacccttatggatgacttgacaattaagtccaatttggattgactaatccggtatattttccacattaatgggagtatgtctatgtttttgttttacgaatatgatatttttt

SEQ ID NO: 111979 - DNA, 3902 bp, Cannabis sativa
  modified_base (1444)..(1448): a, c, t, g, unknown or other
  modified_base (1567)..(1571): a, c, t, g, unknown or other
gccatatctctatgatctgatcccaatgttatagggatttcattgatgactcacgatgcaaaagctaaatttgctaagtgtttggcgtgctgcacgagtttctcattgtccgacttagaggacttcctccgagcccaatgtaaatggtgccctgttcggcatatttcttgcgagcaggtacatagagtatattccacgtgtcaccatcgcgtgatgcaacgtcagagtacaaaaattaggataacaataattatattttgttaataactataaagtcctattatatggtttagtgttataaaaatacttttatatttatatttagttattaataccttttaaatcgtcataaaatattatattttaagtcaaaatctaatctcttattaatactttttaaattttcataagagattatatttcaagttcaaatcaaatctatctatatatatatatataaaggagatatttgaggcggtgacatgacaatctaaaatctctctaattagtattatttgttctcttcttaattatctcatttttttttaatttttattaacattataaatattaattaatataaaatatgtattttatttttttttctccataatattctcatttatttaatctatttttaaaaaaataataactcttttttggccttttttcggtcacattttttactttttttaaaaaaaaaataagttcattttctctataattctctccttttttctaattttattttatttttttttaaaaaaataatactcttttttacctttttttaacaagtctttcacttttattttttttttaaaattttattcatatatttaatagaaatttaaaaacctaaaagtaataatatatttactaataatacatatatatattattaaattaatatacccatattcatatttataaggaataattacatacaaaatataaattgagactttatttacaaaaatacctccataaggtaaagacgacatttataccttttaagtgactttaattaccaaaatacgacttacactatcacttacacaattagacgatggttgcagggtggttgctgcgtggttgcccagtggttgctgcgtggttgcccagtggttgcattagacgaaggtttcaatcagacgatggttgtagggtggttgctaggtggttggccgaaggttgcatcagatgaaggtttcaatcagatgaaaatttctgggtggttggccgaaggttgcataagacgaaatacctgttagcgaaatgtttatgcaactgtaatgcaactgttgtgaaacattaaaaattagataagtatttccacatacgtaattctatctacatgtctctttatgatttaatatggataaattcaccattagaaatttgcaaaacaacaaaaatacaccaggataaatattttactatnnnnngatgtaatttttttggattatacttgagttggattgtttgggaactctagttgaactttttgagatctacctttcaaggatctaaaaattgaaatcaagacattagttttatgcaaatnnnnntggattttcggttgaattttagtttcatattagtttttctaaacttttttttatgaattcgaaacagcccttattttgattgattctggtcatcttctcaggtgaagtcgccggaattaatggtggttctctttctggttgaatttttctatagattcgtcaaatattatatatttttttttattttttttctccttaagactatattatgagttttcaataaatttatatgttataaaaatactataaataaataagatggagatgagggatgatgagataagtgttatcaaaatacttaatgatgatatggatgagagactctaatttatttcaaattgaatactaaattattaagttcattcagtataattcaattgtatatcaatttaaattattataatacttaaactctaactttaatttaaaatatttgttttattaattttttatatttgcttgctaaaaaataattagtaatttatattgcataaatttaggctagttatttagattttttcatgatgtgttttttttttaaaaaaaaaaatagacttgtagccaaaactaaaatttaaaaaaatcagtaattaaattttccttaatatattattatttgtaatgattgttgtagtatattattttttttattattaaatttttgtatatgcattttttccataaaactgttacaatttttttttatatttttttgagtttattatttttaataattatttatatatattattttcaaaattacagaaatatccttttcagaaaataaattatttaaataaaattacaaaaattattatttatgcttcaaaaattagaatttgcattgaaaaataaagaaaagtattaattttgccataaattcatattatgtctcatataataacaaaagcgacatacataccaaactaaaatgggtcaattcactaaattctttctttggcacgggcaaaggacaaacaattcgtgattataaactatgttggccctgaaaacatgggtcaagcctgacatattgttatacaaatcgagtctacctacactaacttcttctaatattaaaagaaaaatagtgtaaaaaattaataaagttaaaatttgatacaattttacttatttagataacataaaatacataattcatatcatagatataattttaaaaaaaattaaaatatttgtcgcgaaacgcgagttgtttactagtttaaaaataaattaattacaaaaatttaaatttgaaaatttatttttattattttttatttaaaatataaaaatatttacctagtttattgtaacataaaccaaatattctgttttaaaaaactacaataaacaactagtactgaaactagaaatcatacagaagtgaacttattcatcacgttacaatataggaactcaactatttcttcttatttagtttgcataaaattaatttttcaacaaacttcttccatcattcctaaaacaataatataacactttatttgttatttccttattcgagatagtttgtaatagcctaaccaaataaactctttcaacgactatatatgtaaaaacaaatacaaaaaattgataatggaaacgcaagaaagtgaaccacctttacaatttccaaaaattaactaaaactcaaatccaattctgaacttgcacttcagttcttatgctcatataattcaaatgtacatagatcatacacaataattaaagtttaaaaagaagattgtatattactaacctctaactatgtcacacatgctgacatgcccttttcattttatctaataaattatcaaattaacaatattatatcataaaaagaaggaagcacaatagatacaacttcgagaaatatatatacacagattcttaaaagctataacacttgtgtgaaacatgagatattagacaataataatcatataataaatcaagaaaaaagtgttgaaaataccaatttcattcaagtaaccattattatttgaaagaaggggcatccaagacagtaccgagatatctttgaaataaagaaaattcaccataacaacctcaaccatatcggataccacaactagttcaaccattatgacaacccacgggtggattggccaatagcactctcgactaacaacaactttggattctcatacttagttggaatgtacttgttgttagattaaagttttaatgtgggcacatatgtacaatgtatatgctacaccaaattaagtgaccaattatgttatgggtatcaaaagagtattcaattgtcatagaaataatgtgtagataccataagtt

SEQ ID NO: 111980 - DNA, 3007 bp, Cannabis sativa
attattgaacttatatgtaaactgtttatgccacttcacttctttcttgtcttctgatgacaacctttagtggtcatccacctcctccttcccatctatcttgatcggactactatccatctatcaatcgattcataaattctattctatacttgtgataagaaaaccattgtcgacaaatgaggaatctttaaccccgtatacacttgaatcctcatcaagttttatccttttcagaataacttttactctacaggcttggaaccaatctgggtctttgggaaaatgtccaaacaaggctttgattactggtttcaatggcaagttccggtgtgtgctttgctcttcatcataccagctgtggtagctgtgagatacattaagaaggaaaaggcagagcctttaagatcctttgacttgtggaattgttgttggagaaatctcagtccaatttggcttctattatacagagctttttcttttatttgcttggcttggatgctctatagcacggtctcaataactggaccttttgtcttcttcttctacacccagtaagtttctcatctctattatttatttttattttctttttgtaatttcaaagaatttatctttaaaaaggaaaaaaaaaaaataacaatttgggacaaacaatggtttttttagtagttaagactaatgttatgatatatttgtgactcaatttgcaggtggactttctcattagttatgttatattttgcggtatgtcgaagctctatgctattattctctacatgtttcttaacccttttttttcatattaaaagatgtgtttatgtattgtttgttagttggggactgttatatctgctcatggatgttggatgtctacaaaaaaatcctcatctgaagaaggaaccacaacttttgaggaggaagaattcaaagacaaaatcaagttaagcagttcgcatgcgaaaaaagagattaaccaaaatgcaggattatggggatatctaatgcaggctatgtatcaggttagtttatcaaattctcatttttgtggccaatatatggtccaacccaacttgtttctccttttatggcctaaaggccttttggatacagaaaggtcatgaggcattagtagttacagataattaataatggtcgatatcctgtagaacatacttgacaaattatttaatatatataaatatttcatttggcaaagtgatattaaaaaaaggttattttcaccaactgtaattatttatttttcttctttcactaacctctctaatcctacaatatttgggatggaaccagagaactatagcaattgttatgtaggcagctagagaatctcagtgtttgtgaaatgacacgacgtgcctcgccatttgatgtacattatcactcggttgtttcagattaaacgatttttatttgcggtttaaaaaaattattgaaagaaactctaattagtactctctctatttaactatatatctatggcagacttgtgcgggtgcttctatcttgacagatttggtattttggtgccttttagttccattactagccaatgttcagtttgaactaactctggtgagaactgtaatttgatttattaatactcaagtaaaaatagcatatatgtcttatcactgactagatattaataatgggctttggttgacagttgatagggtgtctacacgctgtcaatgttgtcttccttattggggatactgcactcaatggccttgtaagtatcttatatatatatctaacacctacttatatgactgaattaatgaacatctataattgatcatgtaactctcttcttttgcagccatttaagtggtttggctttgcctattttgtgctgtggagttgtctctatattactttccagtggatcgttcacgcttgtggttttatgacatggtaagcatacaatacaataacttcagtgaataagataatcacttgtatagacccagttggctagtgacatatatagatatatatataacgaatcatatgtttgtctctttcatcatctaggtggccgtatccatttctcgagctcaatacaccatgggcacccttgtggtatgttttttagttttaagaaatgagaatatgaaatagctttgtatacagtcactttgcacaagcctgtttattataattatttgcaaaatggtcttctagattctagagaaactcgacaccttatttaacacaattaacaaactgttttagaggtcatttgggaaaagaaaaaaattatgccttggtaaaactctttcaccaaaacatatgcatatacaaatacaagtgctgatagtagtagtaccaaaatgtttgcatatacaaatattagtcgtagcagcagaacttactgatttttcatggctgcaggtattttggagtggcgttatttcatattccctgttattggatatacacacaacttttcaaagccaaaaattatgttctgcccagattgtttccacgagcttttgttaggctaaattagtgtgtcattgttgttcgtatggaatgtatcagctgtttttcatccaacctccgtttcaacatttgatttggaccttagaaataaaatggatataagtttaaatggtatttttaaaaattcttaagaaaatatacatatttattaaaagatctatttttttttatttagctcctaggataagtggccctagtggaggcctaacttgctttagcttagggccagtcctgccacaatgacaatgactcaatgtgggcatcattgagtgttaaatttgaataatataattatttttggtaaatattttttgtattattattattgttaactgagaaagttgccaactgatttggagtctaataaatgttaattaatcaccaataaagagttaagtaggggtgttcatccgatccaattcgcacttttttgcccaaacaacatccaatccgcattaagtgcggatttcatatt

SEQ ID NO: 111981 - DNA, 1828 bp, Cannabis sativa
aaacccgtacccgacccgaccccgatattgggactgacatcgggaccggacccgagacctggacccagaccgagatccagacctggacccacttaggaccctgatccggacccaaactttgacccgaacccagactcagactgatactcggacccggacctaggaccctgactcgaacccaaactaggtaccgatcccggaccctgactcgaacccaaactaggactcggacccgacctgtagttggtgttggggtaaagtttattgaaaatatattatctttacacaatctattaatacatatcaatatcaaacatagtattgtattaaataatactaatacaaaattaaaatagatataaaattataagttaatattaaattcttaaaaaaaaaaaagttggatcggatcagatccgatccgaataagtagggtcggatctactctaatccgatccgagtatctgatctagcgggacgggacggggcagatccttacatgatctggatcaagttggatcataaccggatcaaatttggcccaacccatttacactccaagctaaattacacaattatctaagaaaattgcaatgtttcacataaaaaaataagtattaaattcactcaaatctgattactacaatcaaaatcaaaatctagttgaagagaataattttaaaggaaattacatgtatgatttttttttttcactttataagtttgataaatatgaggcttttaatttagcgcatttttcattttttttttaattgtttttgttatgtttgtaattgttttaggttacttttataatgtttgaaaataccagattagtatttgatattgtttttgacattttgttatgtttgtaattattttaggctaattttataatgctacataagaactaggttaattttaattattatctttgttatgttaataactaggtttgtcttatggtgtctagaaagtattactgttttattatttttgttgtaattgcaattgttttaggttgcttttacaattttaaataagtactaagttattgtttactattattttcgttatgtttataattgttttaggttgtttttacaataaatttttaatattttaatttaccatacgtgtcaataaaagaaaaaaattaaacttattttcgatgatataaactatttagaatttacaagaataatgtgtaattataataaacatcaccataaaaaaaatatatttcaacatatatttttgaaaatcgagaaatatattaaaataagtggttgtaattatcactcctcttaacatgtatctctaacactactcatatttattttgaaatttatacccttttgaaagaaaaaaaaaaaaaaaagaagaaaatattttcataaatatcccaaaaagaataaaaattacaaaaatataaattttcttcaatatttttatggatttaaacctttttttccacaaaaatgcagaaggttgctttttatgttatttttataataaaaattgcttgctagttgttaggattttattagtattatgtttaattagatttttaaggtatttttagtatgttttagttgtattttatgtaattttacgtttgattgttaatatttttcaaagttaatagtgaaaaagaatagaataaattcaagaaaaaatatggaaagatgatgaattaaataagaaataattgcctaataacacgttcatctcaaattatttaagaatttcttgtcagtttttttattaatgttaataccggaatggcataccgagactattattcattaatgttttgtgttttctc

SEQ ID NO: 111982 - DNA, 6066 bp, Cannabis sativa
gcacgaccctaaagtattgctccacgtcaaatagaaagttttggagctccttcgcatccctcgcccctccatagcatttgggcttaggtgctctcgggcagccatactccatacctccgtgccctctagtatttgcacgcttagttgctatcatggtaagatttagcttagttgacattcttgctaactcttcctgaagggctgtgacagacacatgacattcctctatcgtatcattgagggagttttgtaatgcagcttgtccattttgtagctcagtgatagcaaaccacattcctggatggtctgaactacattttcccacatcctctacatggttgccagagtaataaaagctttaatgccattggcaggcttctgagtagcctccccctttagcttctctatggtttgttggtgggaagtactggtcacacggatggttgtatagaaaaattctaagttattgtatttgattgataagtaatccttcaatttttctcctcgttattgtcattatgaaggctctaaatgactaggtctttcttacgaccttcctcttttatggagttggcttgctagatttggatttttaaggtctcgctctgggagatcaacctagccttgcacttatctttgtcttccttactctggcaaaggtcttccctagttttgcaaaggtcttcacggagagatgtcacggttgattggatattccattcagcttcggccttgtggtcctcatagagcttctaatatttggcactgagttccttctccatcaccatcaatttggcggtacacgcatcctgggcatctttgacatcctgggtagcctgggtcttatcttgctccacctcaatgtgcaaagctccattcttagtgactaatgattagttcttggaatggagtttccctagctcaatagtcatggcagccacctctttagacgtcctctccacaattaaggcaatcagattcagagcagatactattaaacaatagttcccagccaaaagacaaacaacatgggtaatgctcgaaaactagaacttactcttgttgcatgttgctttgctaccacagaaagggtgtacgagtcatggctgctactaactgcccacttctcaaaagtgagttcgctcatactcgtgcctacttgttccagcatctttgtagcgaaaggtgccacctctctaccaaccctatgtaccaagttttgggtcacttccaccaagtccaagattgagcctgatggcgaaggctgacgaatcccctcagtaatctcaactgtcttcacgacagagagcctgttggatcttttttgaaggataaattgctctctctcattatgcttgttcaaagtgagagttgtttcatccattttggtgagaactttgtggcttaggacggctggtctcatggggaaggaaaaatctagtggtggaatcctacccaaggcaatacctggcctaaaaagttggttggaagatgttggttgagtttgtggcagattgggttgagaaggaacaatatgtagttgttgttgatgcagagtttattgttaaggtggtgatggagtttgttgttgttgttgttgttgtggtggaattcattgttgttgttgcggtggaatttgttgttgttgttgttgttgtagtaattgttattcttgttgcaatggtggtggtgttataaataatggattagatggagttggagatgaatattttgccttcttggaactctagcttagggaagaagttgactctttgcgcttaggcttcatgggggcatccttcctgggaaacacaagcccatccaggctgtcatttgaacctctcgtatctgtcaaaatgctggaagtcactccctccgcccatggagtttccttcaaggtttgctccctcaaagtagctaatactttggacgtctcccgaatggcggtaggagttttctccctgccccccaacgagagccaaagaacccagagctgtaaagcttgcctttatgggaggagcaatctcccagacatccaatgatgaagaagttgaggcaggacgtggctttcggatcctagaggcccggtacttgaccttacccttccccttctcctaggtgtctctagccttagctgaggtggcagtaattttgttactcaaggacttcaacatcctagattttggagtatctgcacacataaccacaatatcaactataagaaaatacaagccaagtcaaaactagtgaagacatagttgtaaaacaacaaaatcaactaagaaggcttgtgcatgggtgcaaccattcagttagcagctataaggtttcccatgagaaaaagaaattatgtttccttttccaaggaagctgccatattccctgaagttaagcaatgacatgaccacaaaaggatccaccctaatagtgtctgagaatgcctctggattactactcctaacaaattggtctactctatctatataatctttgatgggatatctatagcgatctaaactcaaaaaatatttatcgaatcccccctgatcctcctaagaaatgcggtagaggttgggggtatggaagacgcggaagggtctattacctcttcccgaagtactagttcctggagtccccacgtctgggtacactgcagcaaatatttctaaaatttcctcctccttagagaagggatttgggtggccggtcaaccaatcaggctccaggactttatcctctttagtcgcctaggtatgacaacggctaagtccgttgcaatggcttctttcacctcttttggagcttggcgtttccctcggaggttaacaggatcaatgttctgaaaattttcaatgatgctagacctacgaagtaattcagttgtgatccattcctcgacccttaattgctcctcattgaaggccccatactgagccactttgttgactacctctgcagttttgatgctctgagatggaagtcctcgcaaaagtcaaaaaatttacaagaaaaaccatcagtaaatcagccaatacaaagaaaatctaagaaataagaaattacagttgtgagtcgacaatacctggcactggaagttcagctagagtgaaggtacccttttcacggggaacccggaggagaagaaccaatactcacgaaggtcgtgggtacgattagtgtggcgaattggacaatatgaattaggatgcttgtcctgcctgaagaagtctagcttctttttgttagtcctcatagggttagcctttacactataaaagtaaaagatctcctccgaggaaggtacctccaacttgttcatcttgcaaaagacataccacccacccaggagcttgtacgatgaggggattaactggaaagagtctatcccaatcttagccattaatttcacaaaataggcccttaatggaagatgtgctccattggaaatgtgggaccaactccaggcactgaatccctccacactagtggacgtagactctcccgtggcagataacctgtgccatactaatcctggaatattgcaaagaccaacgtgatcagcatatgttgtcaacattccataagaacagaaacaattggccttctagtccatcttccaaatagtcattgaaagcatgtgcagtagggggtcctagccctccattttcctttggctttcacggagggtccttcctctgtgatgggttcatcctttaggacaatctcaagaattttcccttgttggggcacttcagtaggaaccatagcttgggttccttccgtgattgcttcccctacgaggccaacaggtgcacctttagtggttcccacagtgcccaattaaaaatcctagttcaggtccatctctaccaacacaaaaacgaagagaaaccaagctttttgaagcgaccaactaataacacataacaaaaaatcgccagatttttattccaatcaacaaatccctaaggtctatatacatgcacctataaacctcaaataaccagaaaaatacccagacagttctagcctcctttttacggcaagccaattctcagaaagatctacccttaagctatggaaatttttcacgaaaccttttcactattcaacatatataaatagtcctaatcctagcttgaataagaaatttctatcctaggtacgaaagaatgaaagttcaaccatgagttagagtacttacttgttgagtgaaaaaaatatagggtgttgttgtagaatcttgtctagagctttcgaacccagttgattaaactatcacaacaagtctggaagtcgaaacctttgtttggtagagattcaggtgatcgatgtgaaggggtttgatgtctggaaaaagcctcatgtggagaattagcagttgttgaatcaaatgctcacacttctcttgcattcaccgacgaaggaaaaatgagagagaaaaattgaagggagactttgaagttcgttaaaggtgtggaaaaagtggaaaagagccttcgatgtcaatttatacttcgaaaagatggtaggcctctttcaaaatcaacggtctggatctcccacacaatcatctcatttgatccaacggctggggagttgaaagggttgaaaagcatttctttgccatgattttcctcgagtccaacaagcaataaagaaaggtcttttcaaatcaccctattgtgagtttcacctttttctaacaaatgtcccccaaaacgcacgtaatgaattgactagggcatttaatattctgcattattgccctgtcagaaagccctaacgttccatcgaccgtcaatggattacaactcaccaaaaagatgcatccacgactctaatagtcagcacatgtcaaagattagttccggggaagaaattgcaagctcctgaaactcaaagagtcccaaaagcttgggaggtaaatattattcttgtttttataccaaagacatgtggcataattagaggcaaagatgtgtaaacctctcagatttatatagatgaccattaaggttcctcgcagagatgccttgctagtccgggaggggttttatggatagttgatggggagaaccattcccaacccaagtaacatctccgggacacggaaggaccatatttgtccccaactccaagacgtcatggaacacagtttggctacttgactaccaactgaagacttctacgaactggtcatggatcttagctactgcaccaaggcaaatcgccatggccattgcatataaaaattgacctacagacgattatacatttttctgacacaatatcatatcttgtcctccatgccagaccatggtagtgcgcgtacgtatctgaagacatgccttttgcccccacaacttgtctagagattaatttgtaaaggaaaaacctttgagcaacacgtgtccctaattcagatagtattaggcattacccttgcacactgcacgattaagaaggttctccaaggtcgaacagtcaaatctgcagctgtattctccaacccttgcaacgggctgtggtacggaactctaggtgggtaaagggaatgcccttacccagatgtaagcctataaatactctcactttttatgtacaaggggtgacaaatattatactagccaaacctctgcaaaaattcctacaaactttcttcttcaagagagacaaaaggaatgcagagctaaggtttatacagtaaatacttgtattatccaaatacaagggacaactgactcgtagactagggattattaacgctcaaaccacgtaaaaatcatttgtctaatatttactattttatttctttcttaagctctgttttatttgtttctaaaaatctctataaacaactatcatatatgaagaaaaaaaattaaatttgtgacaaataaaagtgaagattaatagacttatttatacgatatagtacaacacacaaaatggttcctaaacaatgtgggattattttaaaatatttattattaaaatttcttcagaaaatgagaaagactcacaaattagtaaaaatagaaagaaagtgttgggttttatgcc

SEQ ID NO: 111983 - DNA, 3191 bp, Cannabis sativa
aacacttgctaacccctcaaagaaatttataattcaatattccaaacacatcaagctttgatggctaaccatcgattctgaaaacgggcataactgcatacaaaatggtctacctaagatagtaatttcaagggatacagaaggtgagaacttaggacaagctcagagatatctattatgaagaagaaaaaaaaagatccaatatttattcaggcctgatcagaattgttttattaataagattttagttgatgaatagctctttgtcgttttaacccatgatttacttagcgaagatgtgtgaagtctagttgaagtagaagtatggaatcagtccaacaaagttctgttactggattctactctataaatacatatgttaggttagtattgcactaccaatgtccatcatttcttaactatctcaacgaataaatcaagtatgttttccaaacattcaattactcaaagtgttataaatttctaactttgttgtatcaaattgcctattattgtaatttataattcagtgtatgacaatgtgtgtatatatatatatatatatatatatgagtatacggacctgaggagtggtaacagggctatgtccacaacccctgctattgaaaacaaccacacgccatccctttcttttggctctaagtatcatatgtctcacataagaatcatcactaccaccagtcaaaccaggctgcaattactcaatatacacaactgattaagcatcaaattaccacagcttagcttagttaattacacctaatcagactactataatgtacaaaacctcaattcgaattacattttctcataaatcaaattaccagaagaataagaagaggagaatcaggagacaagctacgatcatcaccagaaacccaatcgagagctacagaaccatcatccttagtacggagacactcgcgacggagtctaacgtcgggaacagatcggaagaaggcggcgaagatggtttccacgtggcgattccatccgacgactggaaaagcggtgtaaggtcgtagcagagtctttaacgctgggagaaaggaaccacgagctccgtcgacgatttccagagagggatggggttgaggaggagggagaagcgggtcgcggtggtccggcattgctccggcggaggaaagacgtgagcttttgtggaaaagggttgagcttgattgagaaaatgggaatgggttggtgggtgtggagcctatgaaggctctcgccattgattttggttccttatcgaatctttctccaatctttctcataatacataaaatatatttgtttaatgattttttcttaatcaaattatacttattttaggtaaaattagtaactaaactatttatttattaaagtaatttatggcctaattaaataggtttaactctagtttttaaataaatattaagtttattttttagtagtaagttatatttttggaatttaaactaattttttttaaagtaaaaatttaataatttggatcaattgtcatgtgataatttacttaacacttaacagttagatacttaaaaatgtaatgatctataccattcaaaaattaccacgtgacaatttacttaatacttaacagtcagatagttactcataatacataaatatatttgatttattttaatggattaataataattttttttctcaatcaaattataattattttagtaagataaaaatatagagtattgttattcatccccactttcccgaccaacttgatcaacatggttggtatggactggtcaataggattgcaaaatttttgatgtagactcaggatcgactctaagctaaggcgagctaagcacgcgcctaaggcctgctcttattagagatccaaataaaaaaaaacttttaataaatatacattttttttaataagttttaaaaatatcatttatttatttttttataaaaagggcctaaaaaatcatttttccttgggctcaaattcagtcagggatgaccctatgtagacatgtcgaccaattaacctgcaccgtcacgtggatcatgctggtcaaaagagtcgggatataagactttattggaaagagaaatactaaaggacatcaatagtgtctaacactcttagcgcatctccattagttaaattttaaagaatgcttgttgaggtggacaactaattggcaaaatataaaggtgctactgctatactgttggagagacataaatgtcattctaagaatttatattgatatcatacaatgatattgatgctattttttttaataaaaaattaaggtaaataaagttatctgttttttatggaagtgtctttaagaagttcgtagtgttttaactaatggttcgattttgttggtggcagatggtagctcaatcaatctatggaaataatcttggattccttggatggagtttacagattttaaaaacatgatggacagtctcagaaccaatagattcaccgctaaaattgttgcagacttatcaattggttattcttggaatagagaagtagttcttcaaatttttggagaaaatttgggtaaccgtattctaggtatcttgaggctaccatgtcctcataaagatcagattgtgtggaagaacaaacaagattggagattctcgattaagagtgcatattgtgttgatcaaagcttgaggttttaaacctaaaaatgatgtttggaaatggttgtggcattctgacattcatcctagaataaccattttagtttggagatttttaaatgaagctattccaattaagaataaacttcattttataccagaaaaagagtgctcattgtgtggttctggtgttgaaagtagcttgcatctctttagagattgtagttttgctaaaagcttgtggttcacgagtatctttccagtaaagatagataacattcttgggacaacatgatacaattcttgaagattcttgctgcaatttttttagatctcagcagaaaggaagttctgacttatgctggttgtatgcagtgacggacacagaatttttactttgtgggggcttatttatcattaaaaaaatatttatacttatattataattactcttactaaatttatttaattttgtggagacttttttattcttttgatctataattatcaaatta

SEQ ID NO: 111984 - DNA, 3159 bp, Cannabis sativa
taaattatataaattaaaaaaattgaaaaacgctcatatatggtgtcagttcctacgccatatatggcgtcggttattcgctagaaactgacgccatatgtactctatggcgtcggttcctagctaggaactgacgcatagagtacatatgtcgtcgattgtttaaaaccctttagcgttgtcctgatcagcgtcagtagcaaatttcgccaaaatcgacgctgaaagggctaaaaaaccgcctctaaaaggagtttttgtagtagtgctaccacagcttatatttttagataatttttttgaaagttagtttacaaataaataggttacttttagcaataactataaatatgcagtactgtacttatttagtgaatgttgatgacaattaaataaattggactattattttaaacctaagtatacgtgcattacactgcacgtaactattagtctaatatatatatctatacataaaagtatgaactagtgctagcaataagttataaaacggacaaagatatacaaaacaaaataatagtgaagtattacaccatttgccaattcatataaatgcatatctgtatagttttggaggccaataccaaaatgatcattacataatatatatgcatatatatattaaattagttttgcttggactagctagctagggtttcaaccgtgacgtgaaagattttgtttttctatttccattaattaagcataaaatatgatattattccttacagtaacacctagaaagtgacctgtaacagatgctctttttggctcagtttggaattttgacacattcaatttctctattacgtgaagaacactacaattctgcataaagtgcctatgcatgaacgccaagaatatatcataccatataaactacaagaaaaaaaaatgtggtttttttttttttatggtaatagtactttttccgacgtcaaaagatctccgacgataagactctatcaccgcaataatatcttatgaaaattagatgatttgcatggtatagtatttggattgagaatttaggtattgtcatcgaaatatataaaatgttatagagagaagctagtgagacactttgctaggtataccaacctttcacgtttgatcgaactcatgcatgctcttgtctttgaagggccttttctcgtacttgcaccttaggaaatccttgtcaagacctaggatcttcgtgtctcaaatgaagatggttcggaactctcgcctagcctctgcactaatcaagactttttctgaggattcctcaagacgattcttggatgcctttggaaattgggcgatcgtgggtgggacatgaaaattaaaggtaagtccaataattctttcctcttcttgaatttcaatttctccttggatacgcgagactagattcttggcaaaatgccatatggtttctttctaatggtttgcttattcttggacctatcgaggacattggtgattcttgggacaatgccttgctccaattccctatttggggtcgaccccttgatatccctcaaatggctagggattgaaatcgaaaacacagatgttacttgaattgctatcaatgtatattttgtggtactaaattaagtgtgtaagcattttaataaagattattgttgtactacactttagaatcatcccctccatatgtatatattttattagaaacaaaagagatgaataggaaagttacgtacctcttgatgatctatcaactattctcaaaatcttttcatacgttgtatccaaaaacaataataaaagttacaccaaatcttttagatcaaatactacacataacgatcactatgagctaataggatatacaaaataaaattcttgagtttttttcaactcacgaacaaaaaaaaaattagtgaagacaaaaaggagaatatatcactacaacaaaaattaacaatagtcgcagaagtatcaacagccaaattcttcgctaatacatgcaggggcaataatagcgcactagtgggttcgccactaatgtagtggtaaattaaagaaaaaattaattattatcggtggccctacccctattgcccaccactaataattgttggaatttattttaacaaaatcttatttagcaatcatgtatttatttactaattatgtatgttgattatacaatataatttaatattctaaacgtgaaaaaaaacaatgtgtataacgaatttaaacataaagtttaggtttctcacattggaatctagcaaaataatgtatctactttcgttctaatactctattctttgaattttttttgtagcaagattttaaataagtgtagaacttagatcttcaatctctgaatttgataagaccacgatctcccacaatttcctaatcatcacattggtacaagtgtgggctaatactcaagacacaaaggttaattctcttgatttatgttattaaattaattagttaaataaataaaaaacaccaaaaaccaattattggtcgcttatcacaagaccttgtgatgacccaattaaaattttgccatttattttatatcatgtgatgattaaaaataaatatttttttactaatttatttattaattcaatttaaactatttaaacactaattttaatttaataattataaatacttatcaaataaaatataaattaaatatatttattaattagactcacaaaatatcataattaacaaataaaatctaatctctcttttattctcaatttaacacaaccttagtgtaaattcttaaacatgacatagtcagtttatgaattttaattgattaaccaaatcaattaattaagttctacaaaatgatattagtccggacattgtggggaccatttacctatataatcaagcttccaataagtcatgatctaaaatttatccccgtaaattttctaatttattaattcttcatgactccagtactcgaaattacattcttgattatatagaacactctatcccaatatagacacgctatgaattatctattattacaattaaaataatcaatgatctttgttgaccgaggttttcgacaaccaataaaataataaaagattaaagagctgtaagaaattaagagaaggatttttacgt

SEQ ID NO: 111985 - DNA, 21091 bp, Cannabis sativa
cccccccctttcaaaaaaaaaaaattaattatttttcattaaaaaatctataagtcaaaccctttaagggaaaaatactaattattaatatatatctaagcattgtcattggaggaagagttggcctaatatttttgacaaaaaagcaaagagagtgggagcgagaattttggttattataaaatgattagctttataagatgatcaagagttgaacttgaaacagggcatctcaaatatcaattagagcaatgctatatatcttacaaattattttgaattagtatcttgaatgatgtgataatgttaacatttaaaatatctacccagaaaattgaatcataaattcaaaaaataatagttgtaaaatgacatattattcatgatacaatatcataatagatgttcatgatatagatcgatcattcatgcgcaaggtgaagatggtctttcactctttctgatgaggagattttgagatttgagatttttgggaagggtgtatgtcgtttgatgaataatttctctagaaaattcccaatccatttccatagacatggagatgggataaattagttgataattttgtaagtaatatcaattgtacctcacaataataagtatatcttaagggtgtatgcctgatttgcattgggagaaacagggggattagtggacttgttgttgctgttgagactcaagttctgctgatgctcaattttgttatcaaaattagactcaattacagttggtaaatactcaatgtctaaggaaaaggttacataagatatgagttggtttttaggataaggttcacctactaatgctagtaaatttgaccaggcctttttctgctacaagtaatcgttcatagaggttgagcccttgcgtgttgtttgaattaaagtttgattatcatccatttttgactctgagtgtgctccatacaaatttatgagagctttccacagtgcaacaactgattcacattccatcacctctgttgcaattctttctgtcattgaactgtctatctaacccattaatagttggtcacttacaatccaatgcttaaaatcaggattgatagttactccaagacaacgtatgccaatagataccatagtcttccatagtacataattcttgcaatcaagtttcagaggaaaatgttggttcaatgtattgaaaggttgagtatagtttagttgagtagcaaggacatcagagcttgcaacacctcctgtagtggtggtggattggggaatctgagaataggacaacattggcgcagaccttctctacttaagttaatctttacaatattttggtaatgtaattgtcagctcaaaggaggttgagggggaacatgttctatttattctatttatactgagcaagggctacaagatgtttacccagaaactgaccctggtaacgtagacatcaatgtttgacatggcaagaaataaaacatcccagagttgagtagtcctgagtcatagcagtcaacttgggaagggtccctagccttgtgcccaggttgactttaggaactctagaatgggtgtttggatcctgtcaagttatttctaagtcaccatcttttagtattatgaacaaagaagaaaaaaagtatccaaatccaaaacctggaagttgaaaataataaaacaacaccccagaagtcaacccaggtgcctagggttttcacccagcacccaagttgacattccaactagggtttcagtttttgggtctgtcttagtgcaaatggcttaaactttgtacctggacatgaataagacctatcacgaacatatttgagacaacaaaattagaatcagagcactttcaattttgagcacctgaggcaccaggtgccctaagcacccagtgtctagttgatatattacttccaaccacaatactaaagatgtatctcgagaattttcttcatctaaatccaaaacgaggaaacaagtacttttgggatagaaacagattgacctggatgcaaaaaagggaagctagtgcccaggttgacactttctcaatctgggccacttccatcaacagtttatatgaagtcttctgggcatatcctccattttcatcaacaattaatatttgagtgatgtcaggaaacaaatggagttgttttggggtcggaaccgcaaaccaatgcctaggttgacctggtgctgggcctagtgcccaagttgacactttctatgaaattttttctgagaagtctcctaggcataaactctgtttttttccaaatactaagatacaagtgtttccggaaatcaaatgaagtcacctagtggcaaaaaactagacccaggccccaggttgatattttgtcaacctgggctatttccattcattattccgaaatagtgtttcgggcatttattctgtcataaaaaataacgaagatacaagtgatctaagggagcaaatgatatttccatggagccaaaaaagggccccaaggcctaggttaacatgaaacctggttcgcatgttttcgctcctcaaacacaattttgctatgagcattcttcttaaaattgtaaaaaaaaaatggggaaggagacctcattcacaatcttgaattccatagaagtatcaaaatgagctcgggaaggagcccaggaagcaccagcgcccatgttgacacttggtctggtgtgtagtggcggagccaacccaacattttagtgggggcaaaaaaaaatttttttgaagcactaaatgaaaaatataattttattgaaaaaaatacatattttgtgagaataaaaataaatatatgtgagaataaaagtaaaaaaatataggacaaatgtaaaaatatgaaaggatataaatgaaaaaaattatttttatagggttaaaatataaaatatctaaaaatttatatgaacaaaaagttgagggggggcaaatgaccccacatgccctcccttccctccgccactgctggtgtgctaggttctacttatcagaattcaattctgtttcgagcattcaactattttttttggtagtaaacaataggtacaatttgtgacaggtcaaattcacactttgatatttcattctttcaacaatgtggaatatcgataaaatcaagtagtttcgagtcttcccgatgtcactaaatggtgacatctcggagaaatggtgaataacttcagcagagcattgaatctaactaagtggtgtcgacaatcacttaggcatcaaaaaatacaaatctgggacgttttggcactcactcggcgtccacttgggcgatgggttgtcaacctgggcgaagggtgctaaacaaccttcagtaaaacagtcataaatcactttatattgatctaattgacgcgattaaacttgtgtattgaagctatttcaaggatctatccagtcatgtctcacacacacaacgcaattctaaagatttcaagtccaaaatttgtcttcaacaaagatgcgatttttctagcaaattacccaaaaacgatttgatggacgagattcgaagttcaaaaattgacgatttttatcaagagttaattttcatcattatataatcatcaatgaccaagatcagcccaaaggaatttttttcatattttttgttattatttaaatagacctccttccctataaaatgagagctcctgtagtttatttttttatattcttctaagtgcccataatatgaaagcatctctctttattttctctctctagaaattcgagccctacacttagctagttttcttgtaattctcgtgagaaataaaaattcgaagtagacgtaactttattactatcgtgacacgcggaaagaattactataaattttgtgtgtctctctatattatttacttaaatttattatttatttcgtcaatctagtaaactggtattggtcactttttcagtattaaataggcactaatagaaacatgacaagtggccatgatgttggaataaaagagaccaccaataacagaaaagtaaatacactgaaagtaagataacaatctgattaatctcttattattcaaaaaaaaaaaaaaaaaaaaaagagattaattaacaataagcaaatgagactatttatttcttaacatctataattgtccttccaaagttgacaagttccgtttgcaaagaaaaataattttgaatttaacataagtcggttaagatgagcaacaccaacacgtagtaatcctgacaaataaagttatcaaatcatttcattaatatatataaatatacacattagtcaaacctatatacgttctctacacctagtcatattttatgagaaatgataaagggtggtctagcgccctcctacgagtcaatatcactattggtctaattaagtatcgagtcccatataatttaatataatagtttttaaggagtattgctagccaatcgtaacgcaacatgtcgcaaaagtgctaggcatcactggtgcctaatagcaatgctcatattttatatatgagaaatgctaaaggatacaagtggtttctaacacccttttatgtgtcaatatcgttattggtccaatacgtcatagaatttaacataataacttttagaaaatatcgttagctaatcgtaacgcgatatatcaagaatgtacttggcacccgtagtacctaagagtaatgctctttatatatattctaattcgaattattattaattaggctcgaagatttagacgaaatggagagaatataataattattatcaacattaataattgcaccttattaatattttttttttttttttgagaaacctcattaatactgttacttgtttaaattatactacatatcctgtactaccatatatatatatactatataattatcttttactaaattggtgatctttttctctctctagatccataacataaagaaataagaccatgtctcaatattcaggatcaagatcctcaccacttccattgttatttcgaaggcattccagtggagaaatcaagaatttggcttcagtttcaagcagtctcttaccagcctttggaactattgtggatgaaagtcatttacagctcaagaaatatgttattgcaccttatgatagaagatacaggtatatataaatatgtattctcttctcttcatctatttttaatccttcataaatacagatttcactatttaaactactgggattattatttattggtatttttcttttatgattttatcaactaggctaactatatgatttatacatgattttttttttatggaaaaaaaataaaaattggcaggtggtggcagacttttttggtagtgttggtgatatactcagcatgggcatcgccatttgagttggcttttaagaaagtgacaacggggtctctcatggccgttgacttaactgtcgatgcattcttcgcaattgatattattctgactttttttgtctcttacttggacaaaaccacctatcttttagtggttgatcacaagaaaattgctgcaaggtatgaaattatatatgtgtgtttttgttatgtataaatatataaatatatacatatattatgttgaaatatataaatatatatttattcaaaaaattgtaaaacaattatgacttttgttttgataattaattcaggtatgtaaccaaactttggtttcctatggatgtggcctcaactctaccgtttcagctcatagacagaatctttaccggcaaagtgcacactggtgaggcatttggttttctcaatttgcttaggttgtggcgactcagacgtgttagtcaactctttacaaggtagtcggttgatcagctttcaatttttattaatttttatctcagccaaaatattttactactactaattatttaatcatatgagaagattaatgtgaatcatctctatgtactcatgggaagtagagtttcagtcattgggtattcaattaacccggtatgttatttcttacccagactagaaaaagacacacggtttagctacttcttgacaagatgctgcaaactaatctgcgtaagttttccttcacaaaactaatctctttaccataataaatggcaatggacacatgtaataatgtcttgatgtcctaataagaacgaaatgctcaaactttgttatttgaaaacaggtgacactattcgcggtgcactcggcagggtgcttctacttctggctggcgattcaccacaagaacccagagaacacatggataggaagccaggtagcggattttgaacacaggaccatctggttaggctacacctactctatctattggtcaattgtcacactcaccactgtagggtatggtgacctgcacgccgtcaatacaggggagaaggctttcaatatggtctatatgctctttaatattggtctcactgcttatctcattggtaacatgaccaatttgattgtccacagtgctatcagaacctttgctatggtaattcactcatctttaactacagcactaaaagaccaccccttggtggctatcgctatctactgttcttttttttttttttttctttgtaactaaatgaaattcatcgagcaaaaatttggtgtcacgtattataatggattcacactaaaaaaaaagcacttacgtatggctctggtacagctaccaatatctaacctttaaaaaaaaagagagagatactcaagttgtattgacttattgatattgtttggcataaattgcaccttggcatccatatcaaaccagagtaacataaaacgtataaatgtacaagcagggaacaaacgcgaaacttcagttgttttttcttcttttctttctttttggtccgtaagggggaaaaatataacaggctcattctaaattattgattttatttcaaatatgacgcatttaatgtcttcgttgtagagggatgctatcaatgagatattgaggtatgcgagcaaaaacagacttccagagggattaaaagagcaaatgctggcacacttgcaactcaagttcaaaacagtagagttacagcaagaagaagtgcttgaagatctgcctaaagcaatcagatccagcattgcccagcatctattccatcgtactcttgaaaagacgtacatgtttaagggagtctctcaagacctcattgttcaaatggtacgatataccatactggagaaaatttctggcctatagctgtcccaaaaaatttttgtaatctgtaagcaattaggatgcatgctagtattgattagacccctctagtagaaatgctagcaattaggatactactagtacttggtagctgaactcaaaatgaacacaggtgtcagagatgaaagcagaatattttccaccaaaggttgatatcattttgcaaaacgagattccaacagatttctacattttggtgtcaggatcagtggtataaaattctcttttctgaaatttaaatttaatagatatagcacacatacatagatattatgcaaataaatgtagtaaaataacgcattcttctattttaaacatgcaggaggtgctagtttacaaaaatggtacagagcaggtaactttctccaattctcaattcaaatcgagttgaattttttctcctactctgctgttttgcataactaattctatagtttaattagcaagattctgaaatgaaatgaagtaaaacaggtaatcctttcaatattaggtcaatactagcacatgtgaagaaagaacatattagggagatgaatgttgcaagcatagttttgttacgcctgtaccctaaagtactggatttccattcaatagatctataacaccagtaaaagaatgtagggtgcaatataaatttgaggaagggaagcaaaaacttgctgacatgtgcaattttcacaattacttgaaactacagtattgtttctcaatgaagtgaatctcacttctttttttctcaaaagaattgatagtgtatagtactattaaaattgtaagagatggtatctaagatcgctaaaagtttctgtagtgtttaaaggatgaggcagcccaccacagtaaaaccctctgaaatgccatcaacactctctccacaaaataaggggaacctttgctatgttcttccaacaagaacctgcagagataaactgtttagatcagtcataaatgttcttttatttcataaatgagttttactggcatatgactactacaggatataaaacagaaaaaggaaaacaaaatataaaacataaattgattctattcagtttaaattggaagttaagagaactacactacttagttaagctagcaaaacgaattgagggtggaaaacagatgcattgaactgtttgtgactaaaaacaagtatgtatcatatcattatgacttgactgatgttgtgtttttgccagcttttgtcaaaactaggatcttcagatatggccggagaaattgcggtacttctaaacatcccacaaccttttacattaagaacaaagaggctttctcaggtcatccgaatgagtcatcatcatttcaagcaaatactgcagccaaatagtcaagatggaaagattttactctccaacttcattgaggttgttattttattgtttgttgttttctctacagctacaaaatctttgaaagaaaattttgtaagatggctctgaacaaaaaataacatcatataagatcatagtacccagcagaaattgtataaataccctgagacaaatgaaaaaggaatcaagctttcatctactgtgctatgcagatgtattacttgtttgactctgactctttcattctcagtacttgaagggcttaaagaaagagatgctggaagaaataccctatctcacagaattattgagtgacctagttacagaggtacaatttctttattcttctttatctagctatgtatcatagaaatatttaaatcttttaaacaaaatttacaagatagtaatgatttgcaaaatcgtgcatcatgcttaacagcataaaaaggtatttgcacatgattcttgtacaatacatgtagaaacaattcttaagtacttaaataaattgtatgaattatcattctagtaggtaattgaactctttaatagttttttcagattcctccaggaattatgtcaactttttttttttgacgtaaggaattatgtcaactttaactaattaggaaataagaaataaggaatatggatacaaaatgtcaactttgactaattaggaaataaggaatatgaatagtaaataatagtaataatattggcttcaaagctagagtatatctataggatgatatctttcgttttacacaaataagacgactacgtatgtcacaaacaaaactacttaaatacatggataccataatcttcttatcgttttgcgtgcttgtgacgatacatgtcctatcattcttgtgtaagaaactagatactttcttgtgtactttgataatgtcgatcaaattttatttgcagtccttagactcaaatggggatccacaaaatcaagaatctctagatggaaatacaatggtagaaggtaaagtctatatcattttagtttcagcaacgtgaattacacactacctaaactctgatgttactataagtccttgtaacaagtggcgtagatcatctcataccatataggcatatacgagccacacggctggtggggacccaagtacttaaatgccacattaaacgcaaatattctgaatccatcataattctgagagataactagaagttccatgatcctgataattctatgctattatttgcagaaatacctgataattctagtacctggtcgagggcatgtcctgtcagagtgattatccatggacatagtcctaacgaaaacacaacagaaggtaaaacgaccgggaaacttgtctatctgcctgaaacgattgaagacctttacagcttggcaggtaaaccataactgagatgcaaaactccaattaagaaaaacaagacacttttttacttaagctcactttaacaatgccactcatcagtgcataaaatcatatcttctttaatgaacataaattgatagatttgatatgttacaaagaggtcagacaaagtgaaaatctagctaaacatagtggataatggatttgtgtatgcagagaccaagtttggaaaacaagcaagcataaccgtcatggctgatggctcgcaggtggaagaattgaatgttttaagagagaatgatcatctttatatcttttgacgaaagattaatacaagttttaacatacttgcatggcactctgtaaaaggccttgcaaaagtttaccagtatcaaattttcgctatctatagtagtttcttaagttattatacaatgtaacatataacgatcataactggcaagaaaatattaagcttaccgcatctattctccgttgttgagcatgtctaagacagcgaaagcagctttctgaaaacgtaccctttcttcctctaagactctcttcctatcaatagcagactctttgcacttctctatatactccattatcccagaagagttttcgtcaatttcactacagattcagttgagtggaagccagtaacataagatatattttcttttcataaattgcacttttacaaacaattagcagtcaagagctacggactatctatgcttgcgaaaacaggtcatgaaagtaaacacattacacaaaactacagacatttttacaaacatggacggtattcgtacttgatcatcttaagcatgttctccatgaccccttggacttgctgtgacatatctgcatttaataaattttcagatcaaacaacttcgcaaatgaattcacggttttaacaaattgaaatctgaaagcgtacatttagataacccgatcttacaaaaaatcgtcaaaatgttcaagaatttaaacctaatgagttagattacaaagtttaagaatcgagttgcgcaagattctaagtaagagcgagaagaactgaccgtagacgagagatgagagctgagattcaggttctggatgagctttgatctgttgagcatcggactgagaatgagatggggaagccgccatcgataaaaacagagattttagtaagagagagagagaggggcttatcttttttcaatggatcaaaaagcaattggatagagaagaaaattggcgctacatatattcagcagatatatttaaatagtgtaatccttttctacgtaagaatttcccgcccctgcattaacggaagaggccttcccctcgaaacaaattgacactatgtttgtttggtaggagggagtgtgggaaaattacaactcatgtacataatcaaattaacaaacaattagttatcacacaacaaacaattagtaatcacacgattaacaatcaataaattataatagaagataaaaagagatttaaaaccagaaatgataaagcaataaaacaatcaaattaacacttttaatagctaaaattcgtcaacaatataattaagatttagaactatctcttaaaaaaaaacttttaataaaagaatatttagaatagaaatctcataagctattttattccaacaagttgttgttccattcattccaagaaagaaacccctttacaatgaactcaagggctttgtttatagaaaacccttgatactttacactttttccaatcccagtccatattatgtgaaatcactttcacacctaataaatattgtattctaggtggtctaatgtacttgacatcctaagttacattagaaatactcctatcattttgtaccataaatggaatgaactttgtctccattgtcattacttattgtattgtcggtatctccaaaatattacactaagtaattttttgggggtcaacccctagtatataagaattctttcaagtgttcttatagactatgttgggtgagttttatctctacgatttaatttttcttctatcctcctttttgttacccctggtgagaagcgtaggccttacgatttacctcgacccattttgaggtttggatttaccgcaatgagagagtgttagctcattgagtctctaaaatagctatttttgataaatggttgttgcagataggagatggttcattatatatatgatgacattgacagagaattaattaaacttccttctgatatatgcaaaaatttatctaaagatccagtgaaatccatttttgaagctatctacccatcgcttttacaaaactacaacgatcctgcatatttgaaagaaagaccaatataaacaccaaaaagtaaaatggtccatgaattgaatgaaaagattatgaatattataccaggtgaagggagaatataatatagctcagtcactgtatgcaaagcaagtgtaaggacaagtgatgatgattttttgtatccaccaaaatttttgcatagtttgaaatttaatggcataccaaatcatgatattcgacttaaggaaagtgctccagttttgctccttagaaatctaaatcaagaagacttatgcatggcacaagattgattgttacacatcttggaaaatggtccattagagctgacattatttatagaacaaatatcggtgaacacgtcacaatcccaagaattatcatgtgtcccaacgaatcgaaatgaccattcaagcttaatagacgacaactttgtttagcaccatgttttgctatgacaataaataaaagtcaaggacaatctcttaaacatgttggattatatctccctaagcaagtatttacttatggtcaattatatgttattgtctctcgagtcactgtaagagaatgattaatcatactaaacgatgatgatcagatagaagataaaacctttataaaaaatattgtttacaaaaaaaaatatttcaaaatattatttaaagtatattttatcataacattctttcataaaattaataacaactatataaggcatatttttttacactaacaatataaaatattttaattttttttgagaattacctcatatactatttttttaatctttaggagtttctataagagattctacttagaattccataaaaatagaaaaaaaaattattttgaaatgttaaaataataaaactcattttttttaggattaaaatattttaaaattaaataatcataattaaactattttattttaaatcgattattataacaatccaatagttaaactactttattttaaatcaaattattataaccgcgcggtcacctaacctagttttcacataaatgaacgcctttgctctgcggacccaaatccaaggcatttccttcctctttacacaccgatcggtaatcgtccttatcatcctttcttctttttatttatttattttttatgttttttgaatctagaaaagtaaaattttcgattcgatttaatcggtttcaataattcacgagttaggcttagttaactaaaggtgagtcctttattttttatgaccctctatttgattatatcggaacccaaacaccagcgaagatctaacggatgcttttttttgttttttacttttgttttcatacagtagcaatgatagcggttgcactggcatgtgactctgaccttaacatattctttatccgaagaaattatacaaaatgaacctatctaatgtgtttgcaggaagagggttttgagttttcgtactccttttagaaaagcttcgagtagcatgaagggccatgaacacaaggtaaatactcattcaatttgttggaaaaaatagtatttttagtgttatatgtgtttatatttatatatttatatcaagtgtatgttgtactgactagtgagtgttcaacactcgttgtctatcaagattttgctgttctggtcttttgattttttttttccattaccctgagtttacacacgagtgcatgagtgcattgcatatttgtagtaaatggcatgattaaatagaaattgagattttttttaaaatttatttctttgtatatgtcttgcagctgcgattaccattcggaaaatttgagaattgtgttttacaaatatttgtatataaattaagcatagaaatttaaattaaattttaatgatttaatatttttaaaattaatatttataataaaatttggatattaagtgtccatatatattatatatatttgttatatatttctgtgtgggtgtgtaatatttaactaaggtgagttctattgaatttattttctagcatagaaagggaaaacgtggatagatacagcaggaagaagatcattgaattatcatgaataaaattccgtcagttttcctctttctttatctactttcagcttgaaagttacggtatatagttatgtttatacttaatagtgtataggggtttatatgataattcttaaaatgagtgttcagatacaccccttttgttttcagtcagtggtatatgaaggtggacatcctttattcagaataattactttatcgaaaacagtgttcaaacatactgttagcataacagacatgtattgaacaatctttacgacactaaattatacaaagtctttcgaaaatatacaccattttgttgaaaaataaataaaagctgcaatatacacaaaaatgggaattataactatccaagtatcgagaacaaacacgagggatgcaggtttgggtgtgcactttaacattttcttattatatgtacttacaagtgaaagaataactcaactttatcctagaatcacttttgtctgcacttgatataatgtaagttcattttgaaattatagatgccaagaatggaggacattcttaaccttcctgtccaagatcctccagctgcagagttttctgctgctcatttgaaatgggtaaaagtagatggcgggcggcacggtggtgacaatatcgctcttattccatttgctagagtggatgattttgtaaaaggagaatcctcaaatccagaatgccctgctagtttccgcgttgaatcaagaaggaagagacctgaggggagcattagtaaaccaagagttgatggctatcttgagtatactttgtatgttgattttgacttgcaatgctagttttattttgttgattttggttgttcgtatgttagatgaagccttgttagaaccttttaacttatgttgttgatgcttagattttggttaccaactttctgaaactatctactctagtttaatagatattaatttccgggtaaagctgatttagcacatcatttataaaatctataaaaaattcttgaaaataaaatacaataaatgcctactttctgaaatacttttaatgcatgtgttaccttgaagttgctgctgagtgttgcaaataaaatatggtgattttacagatactggtgttcttatggtccggaagatttccgagacagccaatctagtttggaggatgggttaaacgtgaagcctgcatcaggaaagggaagcaggcctggaagacgtcatatgatgagaggttgtgtttgccatttcactgtaaagcgcttatacaccaaacccctacttgctctcataatttataatcaaagaacgcatgtagataaatcaggggccccatgtcatggtatacttgatcaagatgcgttggggacaagagccatgtatgcccctcgaatatccgaggatttacgtcaaaaagtgatgtcaatgctttatgttggaatccctttggataatataattcagcatcacacagaggttgtccaagggcatggaggaccacataaccgtgacgacttcctaactcggaatgatgttcgtaacatggaaagggtaattcgtaattcttcacatgagttacttgaagatgatgaaagcagtgttaatatgtgggttcaacgccatcacaaacatgttttctactttcaaagtaactccggtttggaaccattcattttgggcatacagacggattggcaattgcagcagatgctccgttatgggcataatggctctatggctttccattcaatgtttggtttgaagagacttaaggtactgcaagtccttctcccttatataccatgtttgttctaaaaattatgcaaatcttgataggcatcatttttcatgtttaagatgtctgttgttcaggttttgatataataaaatacacaatttttatttttctttactctttagttgcacttacgttgtaggttttggtctcttttgacagtatccactgtgtactcttcttgttttcgatctatcacataatgcaattccagttgcttggattatatcatcctctttttccagccaagatatccagaagtggatcgggttacttgctgaaagaatacgaaccaaggaccctggatggagactcaattcctttctagtggacgattcttcattggacatttctataattaggtaggtcgttcactgcacccagattcatatttctgtggtaaggtgttaatgtacatgaaactattatgcttgcagagaggccttccaatgcagagttctgttatgcatatggcatgttcgacgtgcctggataagaagcctcttaaagaattgctgcaacattgatgtacagcaagagatgtttaagcaattgggttgggttttgtattgcacaagaagtggacaacactccatggatgcgcttgatgaccttatgcaagtatttgttgatcaatgtacatttatggactactttaagaggcgatggttaccaaacataggtgctttaaatcactttttttattttttttatttttattgaaggcatagtatttgttgatcaagtatttttattgcacaagtatttgttgcttttgtggttttttctttcatgattagaacagcatctttcattttttactttctctctctctctgctttttgttacctttcacgggaatgctatttatgcatttgatgccaatcttgagggatttgggtaggtatggactgtttggccacaaaatttgtagctgtatgactgtctattttcgaaatgggatattctatttaatgcattctttcattttgtagtatttctgatgactattataatggctatcaagtcgtagattgttgtttcaaatactgattgtatattctttatcctgcagaattgtggattaatggcatcaagtctcttcctgtttcaagtccagaacccaatgctgcaattgagtcctatcacttgaggttgaaattgaagcttttcgatgagctgcatgctaattcttgggcacgagttgattggttaattcacaaactttcaacagaacttcattccttatattggttggatcaatatagtatagaaactgggtgttttgaaaatttgagggacaaatctttttcaatgaatgcatggtgccaagctttgaacatcccagatgtcgatgtcgtactagatgagcacaatctccagcttgcaaaagtcatctctcaaacagacagaaacctggcatactcgatttggaaccctggctctgaattttcactatgtaattgcccctggtcaaggctgggaaatctgtgtaagcatgtcatcaaagtggcaaatttatgtaaaagtcggcaggttgcaaggccactactggctgctcaagtttataggcagacaatgcttacccttctgcagaataccccggatgatcctctagttcttgatcatgccattttacatgcaacccgattgcagcatgacatcaaaagcttagaggaattgtctaataatgggttgctccaacctttaccgactgatattagttctcatgctgcagagaacatactttctccttatctttattaaaatggactactgaaaggaaatgctcacgtgcctttggtgtttcgcaagtctgcgaggtgatctttggtctgctgcacatagtcaagactggagaaagtttgaaatttgcgtctgcatgcgttgatgtagtgttacacgtaaactgggaccatggaggtaacattctatttagttgatgtgtagaggaatagattgaaatggaggttcagccttcaggatgtgtagacttaggacaggtactagttgatggctggtctaaaggtgttggaattgatgaatgaagtttatgagtatttggctgattcaaatctataaatcattcccaattttgtgatttatggttgtagttctcctcttgaatcacaaagttggagaagtattgaaggtgttcaaagaaagttacatccattgagtaaaaatttcttggaagtaagacaataacatttgtatgtatcccttcttgttgggtgagtatccaataaagatacattttgtggctcttgcatcaaatttacctcaattttgactatggatatgagcaatacagtatatcctaagactttgagaggaatttgtgaaaccaaatgagattttggaaagtattcaaggaacgtttgcattggagttctgaactttagaattctagaaggcattcttatgaagtaggttgcagcaagaatcgcttccccacaaaatctcttaggaatagtaaaagtgaagagcaatgatcgagccacctcaagaagatgtctatttttgcatctgccactccattttattgtggtgtgtccatgcatgaacgttgatcaacgatcccattataaacaaggtaagggccaagagaggaattgaagaaatctcttgcattatctgttttgagcacttgaatattcatttggaattgggtttgaactatagcatgaaagatttgaaaatttaacttgtttcagatttttctttcataagaaaagtccaacttaggcttgtgtgatcatctgccaataacaagaaccatttgacaccagtgatattggatatttttgtaggtccccaaatatcatcatgaatgagagagaaaggatgatttataaggttgaggaggatagttgttgcgggtatgttttgaaaattggcaaacatcacattggaatagttttggatttttattattgaataacgagtgaaacaagcgctttaaatacataaaattaggatgacctaatcattggtgccacaacataatttcactatccttacttgattcaaaactgatattttgacactaataaataggaacacgacatgaacatgaattgtttcctttgaggatgtataagctagagcaaagttcagcattgctaatcgtctttcccgaatctagatcttgaaaaacacaagagtttgttaggaatttagtttcacagttcaaatctttattaagtttgataagtgagagctaattacagtcaagatcagggacaaataagactaaatgaagagttaagattttagagagatgtatggttcctttcccaacgactctggcatgagaaccatttgctatccgaacagtatgacaactcatagttggagagtattgagagaaaaatgacttgtcacctatcatttgatttgatgcgccaaaatcgacaatccaagggctagaagatgactttgcaacatgtagagaatgcttatcagaccttggttgagtgagtgcccctaaatcagaagccatggttggttgagaaggcctattgaatagttgttgaagcatctcaagctaatattttgtgaaagacacattttgcagattgggcatggtttttcagcttcaactgaggcgtattgcttttgctgtcccaatctcattttggtttctaatttagtggtttgccgtgcaacacccaataagtctccttgtagtgcccatatttcttacaatgatcacaccatggactacctttatgagactaattgtcatgatgctgaggcccccacgactattaaatgctgttgaatcgggtatgacctaatttttaagggctaccaatgttgatccatccatttctatagcagattcaggctgtcccatcatcactatctcgcaactttcctctctacgaacctcaaaaaatgcctctcgaagactaggtagaggtttggtactgagtatacgacctctcacctcatctgaggatttattaaggcccaaaagaaacttggaaacacgtcttttcttagtgattcgtttaaattggttgctgtcatctcgacacctccatgcataaatttcaaagagatctagttgctgccaacatcgattaagggcagagtagtatgtgataatagagtttccaccttgtcaaaggtcgtggagaagattttccacatgaaataattcagaagtattatcttggctggagtaagtatctcgggttgcttcccaaatatcttgtgctattttgtagagaataaaattcttactgacttcaattgtcattgagttgattagccaagacatcaccaagccgttctcagcacgccagctcctatattgggggtcatcaatacttggctaaatgtcagccccagtaagatagtcatcatgtcctcgaccattgttgaacatcataacagattgggaccattgaaaataattctgatcgttgagtttgtgactgatcactagaataatagtgctatcggatgggagcaaagtgattggagttgaagattttgagaattagtcgtggaaaggagtcaccactttttggagatatgtttccaccattttccattaaagtaaataaaaagagataacagattaggatgaaataatgatgaagagtaattgacaaaaggttgtacttttgaggagcaggagctctgttttggttactgaaaaacagaggtgaatagagaagccaactgtgattctgatagcatgaagcttactgtggtaaaagaataattttattctatatctttttcacagagtacaggggcatatatatacatacatatagctaattgataaaccactaattcgatttgttcttgagggtgttgaatttgttcttctggaataatagcctcatcttgatttgggagtt

SEQ ID NO: 111986 - DNA, 6541 bp, Cannabis sativa
  modified_base (6161)..(6163): a, c, t, g, unknown or other
ctcaaattaaatgttattctatttctatttttattctattttttaaatatatatatatattttttgaacagcaatgttcattagatagataaatgttggacctcgcggtcattataaaagatgctcttagcaattgacgaaatagataaacgtctgaattggttgtggataaaagtcaactttgctaaattgtgggctataaaattacaagctcttaaagtactacaaaacaactaacaaaggaagaaataatttttttacaaaatgagtaattcataatttcccatttagagtccatgctattgatagaattgatcactaccttagaatcacttttcacaatggtgaacttgcagcctttatcctttgccacctccaaagccaagcaaacatcgacaacctcaccacaaagtgcatctaaaaatgccaattttgtcgtattcacccaaatcacctcaccaaggtggtctctagctacaactgcaatacacatgtgttccatctccacttttacgtcacacttcaatttgagccaatcttaaagaagaggacaccagtcgacaaaatgggtcggaggaagggaaaggataagggatgcttagaatctccataagagtaaagaatagagtcaatccattaattcacattatccatcttattattatgtaccttatcattctgaactcgctagatcgtgtcaataacaatagatacatgaaggaagacctcatatgtatttatgcctttgtgtttaagactctaaataaatttgacccaatctcacatacgaatacctgtatcagaaacagggaagataccccatggagatgagtgtcataagtgaggtcaagttgcaattgagaaagaggtgctcaacagattcctcctatatcccacaaatcaggcagccattgtcacaatatggaatcatttattcaaggtcgatctttttaggagcgtatcagacaaaatgcttcaccacatgactttggggcgcttaagggttttgctgttccagagcttgttccagagggagggagcagcctcacaatggggcgtccgttgcgaagcttggattaaataggctgacttactagagaaacgaacattaccttccttagtccaaacccaatgatcattcccctgaccagagggtctacccccttcaaaatggcagcaatagtttcattatcaaataagtgtagtagcttttgaatgtcccagtctccagtatttgctaacaggtcagccactttactgtaatcatgagtcggcacaccatttgacttcaaaaagaagtctttaccatgagtctgataccttagccttacacttgagaatgtccttacctctaagtaatttaccttttaagatcttgcaacacaatgactgacattcgacaagtaatttccatccccacttaaccaataaggcttgatttatttctgtagttttttagaagccaattccaccacgggatttagggaggcacaacttatcccaagctttcaaatggatcctatgattccctttatcaaaactccaccaaaaatcttaaaccaagccatcaattttttgatacaaggtaattagagagtttggtagtttgcatggcataaacaggcatagccaaccccatcaattttataagagtggcacgactgaccttagacaacattttttgatttcacccttgcaatttagaggtcaagctatccataataaagataaaatctacatccttctatctagaacgaaataatgggaggttaaagtatttgatgttgcccttcggatcaccaatcccaagagcatttctaatctccaccttcatattctcagaggtattcttactgaaaaaaaatggaggtttttagctgacttgttgtcccaaccagtcacagaattttacaagacaatttcacacacctttagcttccccaaaaatatatgagaaatgatcaacaaagtgccaactaagcttgtcataggctttcataagatcaattttgatggaaaagaacccctctttgccctttttcctattaaaagtgtggaaaatttcctgaatgatcacattattgtcttggatattcctactaggaacaaacactacttgagtggggaagataattttatgaagaatgggattaattctatttgcaataattttaaagatgactttatatgatacattgtaaagagaaataggtctaaactggtgagtcctcttcatgttctgaatttccgagaagagagctaagtttgtagaaaaaacccccttatgcatagtacctgtgttgaagaagttcttcctggtccttaagagataggtgatcaggaattaggttaacacagttaagtatcggctcgttgttacttttatggaagatcccactgaaaaattcaaaaaaaaaaaatcttttctaatcagctcctaggtatggagccaggtgtcatttttatccaaaatgctttcaataacattacgtctccccctaaaagtagcagaaagaaaacataatgttgagcatttatcaccctctttaagccacgatatttgagccctttgtttccaataaatagttttcctttccagcgccctattgagggcaattcaaatctcatgctcaatctgcagtctctcgtacccatgggaagtttttgtaaactgtcaagtttagcttctagatctttcatgatagagtcaatattcccaaattggagtttattccacggaaggatggcaatccaagtagccttaatatttttgaacattttggttgggtcccaagggtgaataatagaatcccaagcatgggcaaccattaggttacttctttcatctcaagtccacccttcttcaaatttgaagccccttttaaacttagcttctatcccattgaagtataagcaaagaggcatgtgatctgagttacttgtctaaaaagaacgaaggaccgctattgggagtaacaagttccatccctcattaacaagccccttatcaagcgttgaatttacatgtgcattgcaagacctatgattatcccatgttaacttgtccccattgattggaaaattaagtagaccttgaaaattcaccaagttcaaaatgataggaatgaaatggtccttccctttataactttctatctctgactcattaagaacaaaattagcatctcccaaaattaaccaagggccaccaaatttatcccaaccttcataatctcagcccagaacttttttttagcatagaaataaggagggccataaacacaagagaggacctacaggtgagagggggtccgaataaaccaagcttgaagtttgattgctagagcaaacaaacttttaagcacaaagccagattttcaagctaaaataatacccctgcacaaccaacagtgggaacagaaatatttaagtaaaaatgaagtctattaagtatatgtaccaatggagtaacatcgatctttagttcagtcagaaaaatgaagtcagaagagcaagaccaaaccaagacttcagcttgcgaactgtagagatctaccccaaccctctacatttccaagctacccctctcatgactcttgtggaggagttgagacatcctcctccacaggggtatccgtgtgggatgaaacacgagagccagcatcatcaatcagggtcgtaccaatcaccagtgtgttcaaaccatccagccagactctaagctcttcctttgaaatgtggttgaaacaacaaccagaacacaaatcattcttcaagaaatcttcaatagttaaaggattgcaacaatcaccatcaatagcaacctgcttcagctcatccttatcttaagaaaaatcatgaacaactcccaggtgttgacaaagaattttcttaagtcaggatcatagagaagtagagccttcgataagctttcttttttgagaggagtggttctttcatttttttttttagaagtaggttgggctccaatgtctccaccaagagtcttaatttcgtagaggtccaactctccaaaaaatttagttcatgtaaaatagtttatttaatttatattgctactcttaattacaaacaaacatttaaatgctcattcccaattcaaaagcattagcgtaagcattgaaatgcttgtatttaaatacaccatttttttgaacggtttcatgctcatgaagcataaagcattagaaaatcctcacttgcccttgttgtcaccatccatcgtctaaagctttattttcctcactcaacctaaattccaaacatctcacaattcccctcatggtgaaaatcgtcatcattgatcatatatattattgttattggatttttctattgttagaaaagaagaggccaacatcacttaagagaggaaaaaaggactttgttttttattatttttaaaatttatacaatttaaatataaaaattaattgcgagctcaacaatcacgagagatgtagatttgggttagtttaaaaaaaataatcaagtggtgataatagatggtgtccatacttttgggaagaatatgtgttaccacctaatgattgattgagatggaagcgcagaatggtccacgtggtgtctagtgagtggactgctcaggcagatatgagataggcattgtcaaaggctcctctcactctagaagataaataagttagttttatggtactaaatcaagtacgcaacggaagaattgttttaattatcattgtaccatatactcaaaatcaccatatatatatatatattaaactaaaagtaaatagataaaaataatatttacctcttaatgtctatcagggtatccttgatttttttgcaagttgtatcctcataacggtaatgacaaaactcacaccttaatcttctagatctttcaccacacacagattaatgtgagctagtaggataatagtgtatatgatgttcttgatttaatctcaacacatgatcaataattatttctttagtgatagagagaaaaaggtttactagtaaaacctttttcgactttcaaaaaagttacgtcaaaaattctatatcaaaagctacatagaaccttgttatacaatctatttaaataaacccaataaatgttttatttaattgattatttaaatcaaattatttattaaatcatatttaattatttgaataaataatataaccgaattcagtttagatatttatatcttataactgattgagggaatctcttaaccacttgagagaatatatcaagtattttttaaattcaaatacttatcatagaaatttaattaattaacccaaaaagacaaaaccaatagagaaccctacatatgttgggcgcatgcactgtgtctagacacagtgcatgtggaacctccctctgtctaacttaagacaagggatgtgccttttgtcctgataatttttgtcttttccctatttaattaatttgaaaaataaattatttattacaaaaataaaaattattattttgatagttataaatagatttttctgaacttccatacataacttttatctcaccccttgatagtgttttaaggtggcaatccaaggaccatggactaataattctatgctccaataaactaaatttatttattgaatctcataaattaaataatcttgtttattaattctatgattactccattataaatatggaaatgaactcttattaattatagaattatatttactaagctttactgcagtgtccattgatataatcaattccaatgactaaccttcctagtgttgattcataattagttttggttaaaataccaattttacccttctaattacttttttatcctttagtacctttaattcacttgtgaaagtataatctagatccaatctaaatttatgcgtaacttttcaattctataattaacacataaagggaaccaacgtttgatccattaggaaagttaggattccataattgtagatcatgttcctagtcatccatattattaggtttccaaaatcgaagctgtaagaattatcttctataagaaactttaacgagtgaatcaaagaaactaatagcatgaagaggagttcgtgattacttaagatataggcggatctactattgatcatcattatgnnntgaattaggtctttatagtaaatagtaagtttgataaagaatgctttattcatattgatccttgtcatataaaatctctattatatacaacacattcacttagatttcatgctacattagtaatctaaattgagcttacttgcactgaataatgatatcagtgaatcgtactagcaatcattgattaaagatttctaaactttaatatggttttgactgttttattcatggctaaatgatcttaattctgcatacaatacaaatcaaagcctcatgcataaaacagtcaaaaccatattaaagtaatcaagattatgtgattatatgtgttcctataatttatcaatacacagggtttaactgataggataatctaca

SEQ ID NO: 111987 - DNA, 1507 bp, Cannabis sativa
tatatataaataatattttattaaataaaaattaaaattcacccataaatttctcaaaaaacaagaattttagttatataggcacactttatatagaatagatatatatggttggtgtgttgatatggcaccaaagcactcactcaccaattaatagttaaaatatctcaattcccacgtatatatattataattatattagaagcaaaagttaaattggcatatattttatttggaatatacgtgacaaaagctagatctagatattagatcataaatagacacatatgtcagtattactatgctttgatttgtcaacgtacgtaagaatattaaacaccttttccttttactatacctcaccacaaatgacaacactaaagaacaagtagtaatggttatatatgctataatcttagaggattcttattggatgctcggtattgttatagtcatgatattttttaaaaattatttgtttctaacttataaggaacctaatacataattacattatatagcagtatgacattaaagatagtgctaaatagtagtagtaccttttagcaattctcataatattattagagaaatgctaaaaaaatattacaggtgcctaaaacatttctcggtgtcataccactattaatataattaaatattagctttcataagaaaataatttttaagaattaccgctaactaattatagaatgtaacctataaaaaatattaaatactattagtattcaataacaatgcttatattattattattgttttatttgaaaaactaaacatcagaatcagaatctatatattactataggattattcgttttttttttcttttctgttgtgatcagaaaatatggaaggaatttggatggaatacgtatataagaagagaaccataaatgaagatatatagatttttgtcccaatagaaaaaagaggctttactcataagcaaagcaaatatataaaagcacattaaatgaagcaagttggaatatgctcatgctcatctaatttagataccaaccataataatatgaaaaaaaaaaaattaaaggatgatactcatggtttctagtatcgtatgagatgtaatattgttattagtgtaatttaatatcaaatcttatacttattttaatttaataaaaattataaataaccgctaattaattataagacgtcatgcataaagtattaagcaccttcattagaacacaaaatttattaatttaaagctctaattatatgaattaaattatttggtgattttgtctactgattataagtgttatcaaagtgtacgtattttttgaattttttgtttgttaaaaattctttagaaatatttacactgttaaaatatagaatttttgttaagttttgtttatctaacaaagtaggggtgttcactaagtatctgatccaatccaatccgcacgatccaattcaatccgtaaaatgtagatatccgcacttgcgcggattg

SEQ ID NO: 111988 - DNA, 6551 bp, Cannabis sativa
  modified_base (6499)..(6503): a, c, t, g, unknown or other
tcccccgccaccttcttctttcagggaatccctatctgttgctaaggattccattcgcactcctcctcctcctacaccacctccttttccaggaacatcgccattatcaaatcttaagaactcattttctgccccaaccccacctccgccacctcctcctccaatactatcgccatcagtcgctagtaagacttgtttttctactcctccacctccacctccacctcctgcttccgtatcttgttcaaattcttccttgctttctttgaagagcacatcaatcaaatcggggcccccacctccacctccacctcctaagcctcacgggacgaacacaagttccaagacttctccagcacctccacctcccccacctttaacttctgcttcaagggattctgtgggtaaaaagcctgcaaacactccagctgtaccgcctcccccagctcctcttatcaatggtttatcaaaacctggtattgcctctccacaatcgcattctgctgttagtaatggtaatgtgccttcgattcctggacctccttccagtactctattgagtggaaaaggacgtggcctctcacgtccaagtcctagaagtcaagctcaacctaaaaagactaatctgaagccgtatcattggttaaaattaacaagggccatgcaaggaagtctatgggccgagacacagaaaactgacgaagattccaagtaagcgttgattgtaaaagaaatatttttcgcgcataattgaggaatttaagtttatcttattcagctttgtctatgtcagggctccagaatttgacatgtcagaactagagagtcttttctctgcagctgtgcctaattcagatcagggaagcccaggtgggaaatcaaatcgacggacatcaggaccaaagactgagaaagtccaactggtattatgaactgtgcttttattttcatttgtagctggcaggagttctcattaccaatgactgaaattgcatgttttgttttgactaaaatttttctcaatctcttgcaaacattaagaattactggtggaaatttgttctacatagggagcaaatttgtgtaaattgttttggcatattggcataacttttattattttttttttatttttcgtagattgaactaagacgggcatataattgtgaaatcatgctttcgaaagtgaaagtacctctgcctgatttgatggtaaagtaaatctaatttatttcctgtacaatgctacttaacactttttaagttttttttagaaagcaacacttttaagttaagaaggcagacccctaacaagtttactcgatttcttggccttcgatggttttcctcttctagagttcattactcgccttggatgagtcagcattagatggggatcagattgataacctcataaagttctgtccaacaaaagaagagatggacttgcttaaggtaagtatgtaacactttctttttagttgtaattcatagctctctccatgttacagtgtgaacctttagtattcagagcttttataacgatatagttttctaaaatgattatccttttctgctcagaattataatggagctaaggaaaacttggggaaatgtgaacaggttaattcctcatcaaatttattttcttggatatttgcttgttcgaaaattcaaattgttaaagtatatgaatggctgaacttggtatcgtccttactagccgtagccgcaggaaactttaatatggatttttgttggattggattttcctttttaaccatgtgttttaattaattgacctgtgaatatctgtaacagttctttttagaattgatgaaagtgcctcgggtagaggcgaagctaagggttttctcttttaaaatacaatttagttcccaggtcagtggacaatctctttgctttatttgttctcagatacttatgatttgtgttttcttgtcattacatgtctgttcattgtcttccccttttcaggtatccgaccttagaagtgatttgaatattgtcaattctgtggcagaagaggtgaggattttttttttgtccttttttttttctttcggaagtttgtcctttttatcagaatcatattcaatgaaaccattttatggttgtgcatatcagatcagaaattctgttaagttgaaaaggatcatgcagaccattctttcgcttggtaatgccttaaaccatggaactgcaagaggtgagtgaataattgattactgcgtcgtactcatactcgtgcaatttgtagtgtacatggaaaacacttagtaaagaaatttactgcaccagtgaaaggcatgattagaatggggccttatttagttttaaaaagaattgcccttttcttatggtctgcaaatcccattagccagggctttgttggcaataaatagctttcacctggttaaagttttgaataatatgcatgctttgacataaaagaaagttgtaggtatttcactgagtagaaaatagacatcattattgcctacagaaaccacactctcttttggccagtttcactcatgttattttgtgatttacgtggtgtgatatttcgttcattatgaacactgaaccaaaaggtaaactatacaccgaaaactgcagtttgattaggacccacacttttacatgtttgtaattattcctgcaactttcaagctcaaattctctgacggccacccaacccagcccctttttgtttctgctagagcagcaattaatttatgatatgtaatattgtaggttctgctattgggtttcgactcgatagtctgctgaagctaactgatacacgtgctcggaacaacaagatgactctgatgcattatctttgtaaggtaaaatgcctcttttgagcttatattgggacttcttttcatttctgtgattgaactgagaagagataatacgaaattataaacattaatctagttgggtctcaaattgatttcttgtattggtgtattgatttgagcttctttcatacttatctttatagttcatctatatctatgataatgattattttcatgtttttggcaagctgtaggttctagctgaaaagctaccggatctccttgatttcccgaaagaccttgttagtttggaaagttcaacaaaggtattttgctgtattatttcgacatttggtatatggatatattatcgtctatttatctatagcggtcttatcattgaatcctaaaatctttagaaggttggaaactctaagcatattttcatgtaggtcctaggaatcaaatcctaaatcctaaccctggtggtagcaagctttggatctgatcaatgaacttactggtaaaatatcttattataatgcagatacagttgaaatatttggcagaagaaatgcaagccattagtaaaggtttggaaaaggtggtacaagagttgaccgcttctgaaaatgacggtcctatctcagcaaatttttgcaaggtactctgaacatcgtgtgaaatcctcgcgacagtttaataatctaattataatactaacataattttcattgataattctcaagtctttaaaggagttcctcagtcatgccgaagctgaagtgagatcgttggcttcactttattctggtgtggtatgtatctaagttttgtttggaggagttgaattttcatctctatggtgtacttgtaactcttaagtaaatcattacaaaattcaacattatttgtttttgcagggacgaaatgcagatgcattggctctttatttcggggaagatccagctcgttgcccatttgagcaaggtatgttaagtagaaagggaaagagaacatgtcttttaaagtgtgtaatatctttactattttcaagtctttgtatggataataaattgtattgcagtggtatcgacaatgctcaactttgttcggatgttcatccgagctcacaacgagaactgcaagcatcttgaattcgaaaagagaaaggcacaaaaggaggctgagaatgaaaagctgaagttgggtgcctcgaaaagggaacctcaacacctgatacaatcttctctcaagagtgggaatatcaaatagaaatagcaactgagttcttagatttagattctacacagttaaaagtgaccgaaaccgttctccaattggttaatatttggtctatgaatgaaaacatcttcaaatataagcgagaacaaacttgaaagttcgaaaaaataaaaatagaaaaaagggtttctggtgactgatgacaatgttaatatcatgcatctaataattctggtcacatacagtaagtatcttttttattgcattttttttaagctttcaattaagggttatcttttgtgttgttgaattaaacataacatggtatatttgctgttttttaagctacaatgcaggattttgtggaagcattgttggcctaatcataagtgactcactcctaagatatcttcagttgcttaactagatgtaatcattttttttttcataccagaagtttattgtttttttagttctttttgttcctattatatatatttatatttcttatgtaatcttgtatatatccaagtatatggggatgtaaatggctattgtagttcatttttttttttgtagtagttgattatggtgaaatagattgaataaaaactagcaagtcaatcagaaacttaggacctgtttactacccaatcagttttcaagacatgaatgatttgttgaagaagaagcattattgatcatttaaattagctgtgatgtaaaagcagtaaatgactattttattgctttcataatttgctcccaagtaaatatatataatacaagttctcctgaaaacaacaggaacaagacaacacaactaaatgagatcaaaagataagggattttgaatttgaaacaagattaaacaaaacaaaattattaaaataaaatgattacaaataaaagaaagagtagttttgaaccaaaactaaagggtgaagcttggagaaaaagctcactctttaagcgccggccataggaagtttctcttattctagagatgcaacatgaggatttttcaagaggtggcttattctagtattactttcgcccaaacacacttagttgcgaagttttaatgagatcctgcatattagtgctggtatgattgcaccactttatctccatttctagttgaacaaatttatttaaaatagaactcttttttatggtcttttattccaaagagaaatgtgttaaatatcaatgaatggcagtgagttgtttctctgtgatttttattttacttttgcgcattcttaatcttgaaatgtacttaatactaagtaataacacatataataatgataatattaaaaaaaattaaacacatgttaaaagaaagaaagagaaattaattattatatattaatatatcctcgtcgtttacactacagtctatatatatatgtaactgaatattctaaatagttatatataatctgggtcgcctgtaatggatcgtgcaactgcggcggctaaagcaacagtgaaattttgatctttggtcaaagaagctacgtactcttccatttctgcaggaaataattctttattattgcttaaatatgtatcaatattcccatcttctctattcatcatgttcatcttattataatcactctgatcatcatcatcttgattatcattagtaatattggaaagagagagatccagggagattatggaatgatgatgttgatgaggagttgtagttacacaactactactactattattattatttaatcttggagataatgaagtagtagaagtagtattagtactatagtttctcatcatcatcatcatagtattgttattattatttttgatgcgatattgatcatcatcatataattcgtggttgtgttctccttcgtatgttgctacaatgattgacttgttctccatgcttctttgcacctaatacaaattattatttaattaattgatttgaaaaaattatagcttaataaatatttaaatataatatatagtcctccactaaaaaagaagagtacaccgggacatcctctcctattagtgttataattatttaagacattctgtaaaattttgaaaatatttaaaataatttacaatataaaaaataatatccaaacagtaagagttacacgtgcagtacatattgtgtttttagcgtgttaaatttttctaaattttataaaaatttgcagaatgtattaaacatagtcataaaagaagttaaactaaaaaatcctctaaataccaaaataaatagatgtacatcagtgcatcccctaaaaatcctctaaataccaaagaaatttctaaatatatatatgggtgcactcttaatgggtattactcatgaatgtataaaattagaaaattttgagttttaatgcttaatttttctatctaattannnnnatctctcatttttatatcatatgcactgagattgttctatcggtaaaa

SEQ ID NO: 111989 - DNA, 1832 bp, Cannabis sativa
ggggggggggggagggaggaagatgacgagaacgagaaagagaaagagaggtttgggtggtggtgggtggtctttttcgtcgaatgggagaaggggagaacaagagatcgagcaagagagatggaagaagaacggtgagaatgagagagagaaaatggggttttcattagtggtgggttgtggttttagtcgagaaaatagggtttagggttcagaatttgggatattcggcgaagagggagagtagctagggtgggttagggtttttgatgtgagaaataaagaaggagtagctgttgggggttttgttatgctcgaggtattcacgataatttaaactagtataggcgacaatttttaaatcgtacgtgttatagtataggcgatagttttaaatcgtcgcgtatatcgtcatgctcgaggtattctctcatgattgttctaaactgtcgcgaatacccaatttttcttgacggtttaaaatagtcatttaaatttattagcgacggtccggatccaaaaaaaaatgttttgaggaccgtcacaaatacccatttttgtagtagtatgtggtatttcctctctatattttttctcctcttgtgtcttcgagaatctttactggttgcgatagcactagtattgtcacaccagtgggttttgcatatctagaataatgccaaactctgtgaagaacttcctcagctagaccaatttcttaacacccttagcaatagctatgtactcgacctccatggtagagttagagtgaatacaatcttatatgtagactttttgtcatcgacacaagcctaagaacctgagtcaatatagcctaaagggttcaaagcaccacccttgtaaactaacacatagtttcgggtcctcttcaagtactttagaatatgcttaactgccgcccagtgtttctttcctaagttggactgatacctgctcacaattcccactacatagcaaatgtctgctatagtgcacaacatagcatacactagactcctaattactcaagcataatgcattcttctcatgtcctttatctcttagggatcaatgagagactgttccttagattaatgcaaaccatatctagagggcataatttccctttggcgttaatcattgagaagcgctcaatcttctatttttccagaatttattggttcttgggcagctgattgagctcttatcgaaatgacaactagtggcatggtcacttaccttccgtcccttaaccaccttgcagtaatcggccccctcactgggactttggtcttggtatggttgtcaaggaccatgatggcaatatttttgcttctactacttggaaaggtcacgacagtcctccttcgtagtggaccgaagctcttgtaatcagttacgttacacaccctctcccaatgcgtctcctttggtatgctcagtatttagatggaatctgattgtcaaagtttgattcgtaaactcaattcttcaatggtctgggattcttctttggatttacttcttgatgatattagatatttataatgctccaattttactgttgtgattttttatttttgtcacaaatctattaatgtagtagttgatacactaactaaatatgctttgcaaactacttctagtatagtttggtgccctagttattcatcttgtattcagaatattattttggctaatgctagctatctatgaattctttggtcgttggccctttttgggagtttttttttctttgaggttattttctatatatatatctttatatattaaaagtgtctatctaacgacatttcttggtttaacagaat

SEQ ID NO: 111990 - DNA, 2134 bp, Cannabis sativa
  modified_base (524)..(535): a, c, t, g, unknown or other
ccccccttttttggcttttttttttttttttttttgaaaatattctgattcccttctcttattaagacattatagattattgcccatgcctcactctttgcttgcttataatagaatttggttgcatagtagcacaaattattgattggaaagaaaattaaagtgagttgagttgtttgtttgttttcaagtggttttgttctggtccatattatagaatataatctcttttgttgtgggggcttatttctttattcacctcacctcaccacccacagaaaaaaataaaattaaaaaataaaataaaaaagtaattttaaaaaatgaagaaagtggaatagatatttaaatcccttgaactatcaacccaactatataaaaaatgtaacttgtgcaaatttcgtatgcaaacaaatgaaacatgttttaatgtgcaatttggtcaagaagagagaaaagtgtatttatctatatcactatgcaagcattggcttttgcattaactatttattattattattatnnnnnnnnnnnntattattattattattatgacaatgtggttgttgggaaatagcagtacacagtgattgattatatatatatatatgagctgtgagtgtgatgtgtttgatttacatatacaattttagggtgcagttccttgtcatttcctcatttcattggctcaaatatttaaaatatacattttctgccatctgctttttataagctatagcccttttaattcattttcatatctatatttatgctcagaatttcatagtttatgtcaatttgtccttaatttggaaattaaagaaaataaagggtacattcttttctttctttccattaaaaacagtatctaaaatatagctagtcagagaacttttcagggtaaacttgaggatgaactacttactaattaactcttttagtactacatttcctcatataatttcttcccatataaatatatatcgaaaggtcagattggtaaatatatataatatgtcaatggagaatatccaaaagattgctcttttacaaaaagtatagaacatattagagatgatgacctattatggagattgaatgaagtctttgtaatccattcagagagagacaagcacttatataaatatttttttatgtgtagatatgtctcataatactatataataaatgagcttttaattctattagaaaagtgaagtcatttacaactaagataattggtagagtatcttcttagtagtgatgtataactttaagccaattaaatgaataataaatgagatttctatctcaacacatacaaattacttgcatagtaatattattaagattacgtacgtgaaaaattatgattaatacgcattttccctctaaattgatcttaatagaatttgaaacattttcaattttaatccaatgtgaaaagtttgacaaggaaagatgtaggtagtacaagtttagttttaacgcaatgcttttactaattgtgtggaaggagacattgaacataataataaaaaatatatatgtgtgtatatgtatatatattcatatatatcatcataacatgttgaaactaaagtagaaatcataattattgcatctgaaaaaaaaaaaataatgtacatgaaatgaaacttataattatgttttatatttatgaaatttttagaagtgaatcaatgtgattaattagatcacaatttacttacaataccggtaatatctgctttattgttgtatatttttgggaaaaaaatataaattttattatgtctgcaaattaatttaaattctttgctgagaaatatgatcaaggttacaggttggttattggttgctctgtgttaaataaaaataaataaaaaaaattgaattaaacgaattaaacacacaccaacttgtaatcttattacatatattagttttaacaaaatcttgttttgagaaaaaaaaaatatatatatatatatatttgtaaggtaaataccgggttacatgtatatatatactagttagaagttacgtgccgaggcacgtaaaaaataatatttgcgagcgaagttaatgctcaaatactctatgaaacaaaaaagaacactaatataaatgc

SEQ ID NO: 111991 - DNA, 4459 bp, Cannabis sativa
  modified_base (4426)..(4432): a, c, t, g, unknown or other
ttttttttttttttgagagaaactcaatattaatatctggctatcataataaaataaaatatgaaaaaaagctcatattttggtattattattttgtccatattcataaattaagtttaaaattaacattcctaattattttattattttaacatagtttttgtaaattgctctactagtttatagagagtgctaggccccatatgaatattggcattcacgatgtccaattcgacaataggttttattggccgaatattgaagcagcttttagaaaaatgactcttttatgagcctttcatatatcatctctcaattatcttttttatttttgcttaacatcatctatcaattatcattacgtcttcttatttaactttcagaatacacatagtttattttatatatgaactaatattgatcatttatgtatgtatatctttatcgttttttccatccatgagctacaactcaaatactgtgaccaatgagaaatagaattttggacaaattatacaaataaaaccttaaaatagaaaaataacactcagatcattcgagaagaaactaataaaacatgtatgtgcggtttagatgacctttcatcataaatagatatatttatataacatgtataaattcctcatataagagtgtgttcaaaagataatttttcaactcattgagatatttaatacttcaaattaattacttcttctttgaatttctttctccttcttataattatttattgtaacaatcaactaaatttaaatctgaagtggacacgttaatttggagtgagaactgagaaccagtgggttggagaaggacaggcatgatcatgatataaatatttatatatgtatgcattgtaatatatatatactattgtggataaaaaggttgaaaacatgagtttaaggctaagacttcttcacacaaatatttgaaagcaaactaaataagttgtcaattcatttaagcatatatataatatatatatacaaagacggagacccacccgctcggccataatcccattttgttttctttcgatcgaaattacagagagcacctcagaggttgatcaatgatctctatagtgcacaaaaaattataattcattactaatttaactcttaatttataatatatagctttgatggacatggatttatatttttcttaaatttactgataaaaaatatttgtaatcacgtttcaaacattaaatatatggcatggcatgtatttgttagaatattataagggcatggtgcctaatattcttataaagtacactattaatataattgaatgtcaaaattcggatgtcgatcgatcttttactttattttaatgatgattataaaaaactacaaactatatattatatattaggtgtgctataagcatatataaagcctatagtaaatgagaattttcttgtagtttgtctttaataaatagagttgattttattcgaattccattaccattaaaaataaagaattttatatatacatattaattgtggaacaccaaagtttgctggcgggaattctgtactcaagtactatgcatggttgatgagattacttgatgcatgttaatattagggaactattaaatcattgaagaatgaaaaactatattaatcattttcatatcattttacactcagtaatatacatctaccgtttatatatgcataggtaaatttaataagcattttatttatttatttatttttaaaattttctatgggagaagaacaaaattgtcattttctttcattcaattataaaagaagaagaaaagagaaactcgtccacgcctaaatatgatgcatctatatttttatatatgctaaagtaatatggatgcgcatatagttaactcctctacgtttcgagcaagaaaagaacgaaaaagaatataacacaaataaatatacagaaattcttttactaaatcatcacttgaataaaaatcaaattacacaattgtggataagcatatataatgattggataaattatgaagaaactttcacaatattaaatatatctctctaaataactttatgttacttggtacgttttttgtattatttatagattagagaataattagtaggtggaaaaagataggaggaaatgaatagagagaaagatttgttgagatatcatgaattcattcttcaactattagagtttgatttgatttagttattctgtaaaaagagaaatgaagttgacacgagaggagggtagaaggccaagccagtccatgggccccactgctaagattcctttcggattcttctggggaagcgtgtggctagtgggccttatcattctcggcccatatcctcctccatctataaattcaccaccaagttgagttgaattgaactcatcaacacaagtagtatataccattaccaaagctcaaaaatcaaacttacattttataaacctttaattcttcgctcaatcaccatgtcggacaagtgcggtaactgcgactgtgctgacaagacccagtgtgtgtaagtaatatattaatttctacaaattatagtctaaaagttatatcctgattaactatatatgcatacgtacaattatattatatatatatacttgtaacagttctagctagtagctgtttaggcataattatattcaagtataatatattattaattaacatgggctttattattatgtgtgcaggaagaagggaagcagctacagtctcgttattgtcgaggctgagaagaggtacgtataacatactttctgattacacataggatctatatatctatatggttcacacaaaagatatatataatgaaactatatatgtattcttaattatttggtatattaattaatattgcagctacatggagaccatggtgatggatggtccctcagctgagaacgacggaaagtgcaagtgcggtactagctgcacttgcacaaactgcacctgtggtcattaagcacagcaaaaacactccttattattatatatatataattataataattaatgtggggagtcttattttgactactgaacaataataatcatgtaatattagtggtcaaataacaatattgtgtgttgttcagatgttaaacttgtgtttgtttatcgtgtctcttctgaagatatatgcatgtgttgtgtgtcttcagtttttactatgtttattgtttccctttgtttcgatctgtggcctatagtgtaactttaaagttaatgaatttattgcttttttaattaattactctctcttctcataatttttttggttcttaaactatatattaactaatattagaacagtactccatgaacaaaataattaatataagaaaagaggaatacacagcgaaagaacaacatatgattttcttagttaaaaggctaatttaatataagacaaatgaatacatacccaccaatattattcttggacctctgatattggcaaaacttgtagaagattagctatagtgtgtggagagctttgacagatctttatatataataattaatataaatattgagatagagattgattaggaataaaggatggaaaataattatctctactacttttgtttggtgacaatttattggtaatatttacagctttatatatattttttatttaaagtcaattttgtataaatattatcccttaaagaagttgtataattaatgattttgtaagaaaacagaataataatcgtttctttttacgaactaattaatccaatgtatactctttttttatagtataaaaaaaatttagtgagaacaaaaaactaaattagtaatactagctaagattgtttttttaagggttaaaaaaactttaataatatttaattatttcgaaaggattagaccatatttatcacaatatttgtaatagtgccaattcacattttatgatgcagagtagtataaaaagtaaaaatatcatgaatgattattttttgctaaaatatcattaatgattattgagagaagttgaagaatacctacttttttttatacatcaactaaatttatctctaaataaaatttaattcaaatatacctctatttatgtatgagtcttgtatttaaattatcctcacgcactcacataaagacataattttaaacgtaatagatttgcgttctttgtaaatggatgtgtaggtttgtgggaaattaagtttggataaaattttgattagagaagaatgaaaatttttgagaagtgataggagtaaaattagtaaaatgattaaaaaaaaataggtaagtataatagattttgaaaaagatagaaaaaattaaggaataattacataaggcactatttttttataaaatatttacatttttnnnnnnnaagaatgttttttttttacatttttac

SEQ ID NO: 111992 - DNA, 2351 bp, Cannabis sativa
ctctctctctctctctgttttcctttttctgggtctcagtatgaaaatttccagaccaaaagtttctccatatccaagaaccaagtccctcagaaacctattcagaaagaattaaaagaaaattcatacgaaaaattcggtttttctagtgacagcaaacagagaaacataccaaaaaagaaaaaaaaatcaaagtgatttgactatttcatcattgattttgattgaaataaacgaaacccattaacaaaaaaacaatccaaatttagacaaattctaaccttcttctctatatttattttcttatgagcactgatctgaatccaataaaaaacgatcaagacaaattttaattggattacaaaaaataaaaaattcgtttgggattttttaaaatatgtataagtaaataaagtcaaaaattgccggctttaaacgaattgttttgtttttctttctctataaaggataagaacccaaaaatcctgaaccccacaaacaataaagattttgattacacaaaacttcagttgccatttttgtcaatttctaaatgaagaggaagaataaatagataaacagatctctgtattacaaaaaaaaataagcattaaataaaaaaaatctataggtttttttgaagcattcaaaatgtggaaagcttcatatctgttcaaaaaataaaaataaaagcatatcaaaacaaatagatctatttctgattcgtaattggtgtaagaaaccttttacatccagttagttttctcagactacagcaaaaaaaaaaaaacgaaatgaataaacacaatttttttgtaataaaaaaaataaaaaataaatgggagggacttacggattggataagaagaaaaaggacttgattggaaatttcaaaactataacaatctctttctctctctcctgtttttttttccttgggttctcggcgttgtgttcagttctggttacttacaacttctctctctctctctctctaattgtcctttggattctctgtgcaaatcagcggaagctaacctttggctttggccaccataaaccaaacctttgggacacctctgctttatctctctctctctctctctatctttctttcttaacccttatattttaaatttatttataacatatagtttctccattattattttccattttaatattaatacatacccgtaacatatgaattaatatcaatatattttgtttgcacatatattataaaaataaataaataaataaaaacagtgagatggaatggtggggctcttaaaaaggcaagaggtgagtagagaggaagaagagaaaaagagaagagtttgtttttggtaggctgtgactgtgagtcaccgttatgtgaccggtaactgggaagcgccgtttgagacacgtgctgactgtggggtctgtactcgagggacaactccgttacgcacgctttttccgcacctctctaatatttaacttctcatttcaattactcctttacaatcttctcctattacacttattcttttcaccttttttaattagtaggaagttaggaacaaagcattcattcatgccaacactttttagagatatattttggacatggctattggttagcacattttagatttataattttgtgattgggtatcatacttaattacatcaatcacaatattaatacataaaaaaaatactaaacattattacaatcaatgaaagatattctattaaagctatacattatattatttgtaaccatattttaatgtatcaatatcaatattgatataaaaattaaaaggatgaataacactaataatatttattaatgtatatatatttttatatatacatataaataacgaaaatatatatatatactaaatagaaatatataaaaaaaaatattgatttaaaaatttataacattaaaagagttttaaagattaatattattatggttaaaaaaacaattaatgtaattattcaaatttgaccggtcaacgaattatttatggtaataattctgatgatcattattttgttggatagtaattacttttttttgaataatggatagtaattaactttgaaatagctgttttttttgtcaatgggaatgtataggttaggtatgttaagttgtagccagctcaatatttgtcgcgaatttgctaccccaaaattatgattgacatcttcatttaatacctttcgtctaaacctccatttgttgatttaaaaaaaatatatatatatctattctatataaaatgtgtttatataaccgaattcttagtttatgagaaattagtgggtgaatttttttttttaat

SEQ ID NO: 111993 - DNA, 2024 bp, Cannabis sativa
aataatagactttaaaaaaaagagtaaaaataaaataggacaatataaaaagagtatagagtagaattttctctagttaattcgccaataaagtaaattaaaaggttcatgagctttagatttaatcatgcaagatgagtagtacaaacggtctttacagcctaataaattaaagcaagaaaatccatacattgacactaatatcttatacatgacacttagctcgagaacaacgttcttgtcatttttaatcaataattgtggtcagttgataataattacacaatttgtgttggcgttttccctatttgttttgtgatcataatataagagtatatatagactacaatgtaaggcaatataagacaattatactaatgttcattaaggtccccacatatatggatggaataatgtatctaaatttatatggctacaatccccaaattaaccgttaagtaattagtaaaatgttttctgctttttgaaggacataaatgaaatttccatgatcataatgacaaacgacatggaatttcaaaagtgtaattgagtgtacaccgaaagcttttgggtggtaatctattgagtgtggtacaaagtcatctaggcagccaatatatatacattcttcctttcttgcatgttataactctataccctacgtatagtttttattattattaattatgattattaaaagaaagaaattagggaaaattaaagctagcacatcccttcatttacaattattcctattcaaaaattaaacattagaaaaatgatatatagccggtaccaaatctagctatggttatggaatcaggttccatctttaacatttattggttagatttcgttttcattcagattaaatagaatcttgttctttattccccaccgaccgtggcatgcataggtagctaccttcctttctatcaatatagtgaagataatgtatatatgtacataaaagtgtaagactatatatacctctctttctaattttgcttttaaaaattaagctcgcatttagttggaagtaatgaaatagagtggaaaggaaataatttttattctattttttgtttggttgcattttaaagtattaaaatatcattccaatggaatagactttccactattttagtagaatgactattttattttaaaatgaaagaaaagatctttccaatgtaaaattttaaaaaaattaataattttttatttatgtattttaaattttattttattttattcttattcttattccaattctcatttttatttttattcatctatttttattcctcccaaccaaacgttacctaagtaattctcaatgaaaaagtctccatgataaaaaacgacaccatttttggatcgtgaaaagtattgatttttgaggtgggcaccctttttgttctattatatattattggtctattgtttcatgtataatactctgtcgaaccgacacgtgggaccacattttagatcatatataaaaataaaataagtaattcaaagatgaagagcatgtaatagagtggtgagcctggacgatcatcattgtccacctacttagtcacatttcaagtactatttagctaattaatcgttgactagggcacaaaatgtgcagcttcgtataccatcgttatttagtccttaaatcattgatcaaatcaaactaattgttctctaattctctgtcaccatatatattttctgtaacgcacgtgagcaactcactaggccccacagacacaaatactagctccggaagatataggaaatggcccgagggtgatctgctgtgtgtgtctcactctatatcacaatgacaactcatcattttctataactactattcattgactctatataactttccttaaatatcaaatgaacgtaaattattattataactatttttttatgtccccaattcatatttggtaattagttttgatggataccttttcgtatttttttttttttttgaactaaaatgatttatt

SEQ ID NO: 111994 - DNA, 7398 bp, Cannabis sativa
  modified_base (966)..(983): a, c, t, g, unknown or other
aaaccccccccccccaatttgtgcgcacgagctctagatcaaggccgagttttctttgtctcttgggtgtgatccctctacatatctctcggtccacaagggacctcgtgtgggagtttctaaggcatcaagccatgtctgcgtgctgagaaggtcaccaggggcctttcggacaaggtaactagttacctgccccctcgttaccaaacagtgcaaaatttgaatattatgggatttttttttttgtattttgattaaaaattcattatttaattaaatagttacctaaaaattctaaaaatttgtgattttgtttttaagtttgaacctaaatctaagttataaattgataatatattttttaaattgataatttttttatttaaatatttaaggggtttaaaattaaattttgttatttttaattagttttaaattatgattttaatttaaaattgattaatatattaattttatttatgagttaatttataagattagatattaccaaatatgatttattttttaattaaaatatgataagcctattaaatattaataaagtttaaaattagtctagatattttacagatatccgaagcataattattcaaattcaaaattgacttgtttagttattatttttattatttaaattataagttaagaaaaatgataataaaaatatatgattttacatattttattattttttaattattagtcatttcaaacattaaaataaatttaaaaatgcctagatattttgtagaaatttaaaaatacttaaaattgagatattttaggatttttaaaccctaaattttgtgctcttcctcatattgtcattgttagttgtttgaacattaaaaatgataatattgtttacttagaatatggtcaactcacagtaaaaccttattaattgctgattttcacgtgtaaagaataataataataataatnnnnnnnnnnnnnnnnnnaataataataataataaatgatgaaagtaacccaggaatttatagagattcgacctcctttatgaatgagtaatgacctacttctcttttagttgtatttattcttacgcggattataggcttggaccttaaaatttatagctatggctctcttcaatggtacagtagtgagaattgagtgttatatagattcgtaacttattagactttgcaatgaaaatgaacaaagtgtcttggaagcatagaggggcatgtagggcttagagagaggctatgggtgtgtgtgacttagaattcaggttccttttcatgtggtttaatgccctttatataatgtaaggcttacaaaagatcataatttaaatagataaatatctcctctaatataggaaacataacttcttttttatcttatatttaaaatgcaaaaaaggataattaaacccctaaaatattagactaatatcttgaggtaatatccctatctttgtgggttgttggatctatccggtaactgaaatttagcttgagaatctttcaaaagatggtcgtgcaccccacaatttgtttaaccttcctttgatgatgtttgaacgtgttggctggcctgccctatttttagggcctggctcgcacatgaagctctatttgccgactaggtatggtccggccaaggtctccgtggctcaccattttcccctcatttattcctacttgacaatctcaaagtcttgacaattaatgagccatgcatggtaactctgtccacttattgagagaccgaatcccacgtggtttcagttctatctatgtggatatgccacactaggtgggaaaaaattgggataacactttcccccaagtctctatgcagacatctgtacagataaggactttttagctccagtcttgactgtaaaagcctttatcggacagcttttcctaatgatgtaattgactcttcaggtgacttgtctttatgacaaaaaatgactttattaacaatcattatggggatttgtgtaacggctgcacactttctcattttggaacatttggtgttcttttcccctgcatgattattttatggaaaaaataaccactcattaaattttgggggaaaagcacttcagaacatatataaggttcatttcgtttcatttcatttctcactctctctctcatttgtattctctctgtaagaaaaatgagaaaaaaaacttttcatctccctcttcaagcccgatgccttaagcacctcaattccttcaggtttttgatttttttttttttttgacaatctaatcattccccgagtatctacatgcggtcttcctcagtgggtaagtctttaaatctcactttttcattattttcttgaatctgtcattgatgactttaagctttttcaagatttttaaaatctttgattctcacattatagtgtagtcttttttacattataattctcttgatagctttaggatgtataatgtatgactttacgataaaaaagattgaattttgaactccattttgactattgactcttaaagtcacaaagaacacgaagaacattgtttgaattttttgaaaaatattattgtgactcgtttgagcttctggctggcacacaaggtttgtttgtgacgttggccggttcgtggcctttacacataaccctggtcagtttgtggtctttacacataaccctggctagttagttgtctcagacaaagaccctggctggttcgttatttcaaaataatgtggtctttacacattattttgaacttcctttttttatattatgtagaaatatggtgagcgacagaagctggatgactttaaacatatgatctgtagagtcctaggggtgtggatgagtttgtttgagttgctcgaatgcaaataaattctgccggagttacacgatgctcttgcaagagatatctaaatgtgaacttcaagactcccaataatataagggtacatccatttgtgcatggcatccaacgatcatacacgacatgttattttcatagggagtcattcacgcaaccggctgtagaaatagtagacaacaatgaataagaaatggcagattcgatggttggtatttaagagaaattctagttttgacgatacaagttctaccactgcttccttcagtgagccccctttgaatgatggtggtaagtacgacgatttattaaaggatatggaaactgaattgttcccggattgcaaaaaatcagcgctcaatgctttggtgaagttgatgcactgcaaagttctcaataagtggagtaaccattcttttaatatgttactctccatattgattgagttatttctggagggtacataattacctaagtctcattacgagtcgaagatgaagttgcgtaaccttggtttaggttataaatccattggtgtatgcaagtatcactgtgccttgttttggaaagagaatgagaaaaaagatttttgtcctatttgtgggaagagttgttggaaaaagaaaaagggagacgggaaaaaagttgctcgaaatgttttacgatactttctgttaattccgagactggagtggttatacagttcaagacactcagctgaggacatgcgatggcactactataagagacccaaagaggatggcgtggttagacaccctgcagatgtagaagagtagaagcaatttgacaaatgccatccatcctttgcaattgaacccagaaatgtgaggttggctttggccactgacggtttcaatccctttggtaacatgagtaactcttacagtatctggcctgttattttagtctcttataacttacccccttggaagtgcatgaaagctgagtcgttgatgttgtctctgttgattccagggcgcactgcccctagaaaagacatggatgttatcttagtcctgtataacttaccccttggaagtgttgtggatacttttgaaaagttccactgcaagtacaacaaatggcgcgatgagcacacgcaacaactgcatgtaaataattttatatttttattaaactcatggtatattttaatttctatttaactctaatagtttcatgaatttttttgaaggccaaaatggttgatattcgtgaaactcaaacaacaccaaccaatgtcctgcgccagtataatgtcaaccccacccaatttcttacagatatgcctgttatgacacatgtgtggggtgagcagtcatgccacttgagaggtctgggccagttgccgagacataagatagggacaaaaagagcaactccctgggcgggtccctccgggcagccaactgtcactttagaggaatataaggcactaaagtgaagggtgaaagaataggaagcacggaacgagtggcaacaacaaatgatggagactcagaatcaaatcatgagtgtgttttagtaataaatgatccaattggccaacgccgttctaggatttaacatgcccgcaatgcctccgattccaccatttcagcctcctagctatgttgttgggtcctcctcccagactggccatcccggtgatgacgacgacaacgatgctgttgtggatctgtaaatttttttaatttgcagtgtacataatattattgtttataaactaaaaatacttttatttagtttatgatgtgttatgtagttttgtaattaaaatataaatttcagtttaataatatatttgatatttcatttatttattattatttctattttaattttaattttaattttaacttttattttaattatatattataaatatttaaatttaaaaaaaatacttttgccggcgagttttttaatattaattattttgccggcgtattaactcatcaacaaaattgtttaattttttaatattaaaaaattttgctggtgagttaatgcgtcgacaaaacttaggcagtcaattggagaattggtgcaaattcgcgccaaaagtttcgccagcacattaactcaccggcaaaacgtcgacaaggacacctcagctggcacaaaattgtcagcgatgaacttatgccggcaatttaattcaccagtgtaaaaacttttgttggtgcatctactgaagtcgttgacaaaaggtgatatgctgacaaaccattgtcggcatcttttgctggtgcaaaatgtcactggcaaaatacttttttcttgtagtgatatatattaatgctagaaagtctacattttggatgttgattactttggacatggagtagtagtttttggagaagtttagaaacttatccggattctctaactctaccagtgagatcgaatcttaaagtagctccgaaggctactagacaattatttagcctaagaaaagttttgaatggaatgaatcatattattttcactacaactaatgtaaagtttcttatacttttacatgtttatttattactttaggattattcatatttaggatgttagattataaactataatcaacatacatgtttagtaaatgtagattctagtaaaataagttccaacaccatcgccttctgatcctgcatcttcctctacaccctccatttcccatcctgctgccccagtttgctctaccaatgttcaccctatgacaacaagggggaaggaagataactataaaccaaagatatacatcagctccaaagaacccttgactcttattgatgctcttgctaatcccaagtagaatgcaaccataaacacttaagtgtatgcttttaaaaagaatagagtttggacacttgtcaagttaaaagtcattggatgtaaatgggtttaaggatcaaggagagccctgatggaacaatttttaaatacaatgcccgattggttggaaaaggctttcataaacattatggccttagcttccaagaaacatttagcaatgtagtcaagtcacctactatcagaatcgtactcactgttgctctctcaaaacagcggccaattaaacaacttgaaattaacaatgactttctaaatggcacatcaaatgaaaaacactttatgaaacaatccctatctttaagcatgaagataccaccttggtctgctaattacataaagtcttatatggcttgaatctagctcctcgagcttggttttgtcaactcagaaaaatactttctcaattgggtttcaacagctttagggaagacacctatctttttgtaagaatcctccctagtcatacaacattcattatagtgtatgtggatgatattcttgtcactggaagtgactttgctatgatctcaagacttgtcactcaattgaattctcaatttgccctcaaagaccttggtaacatcaactatttccttagaattcaggagacacatactgcaacatgcttacatctctatacaaaatatatcatagatgttctaggaaagccaagctttaattttccaatagtttgccaactccaatgtatggggggagaagctatctaccattgggagtgatccagttaaagaccctcaatactacagatgccttgtgggaactgagtcccattggaaaactatgaaccgcattctgagatacctgacagggacacttgactatggtcttacactccaaaaatcaaattcccttgatcttgtaggattccgtgatgatgattgggcaccagatatggatgattgaagttcacatgattctatgtatactttggctttaattgggttagctggatatccaagaaacaacagacaatttcctgatcaagcactgaggttgagtataggagtctaaccaatgtcacaactgaactcattggatctagtcactacaatctgaactcagcatatctattccaaggccaccaatagtgtgatgtgataactttagcactattttgatgtctgcaaattctcttctccatctaagaataaaagacatagaacatgacctatactttgtaagggagaaggtcctaggtaaaactctgatggttaagcatactctgcatatgatcaaacaagtgacatcctcacaaaagcactgtccaatgaaaggtttataataaacaaacttagagtagaatccctgtctactctaactttgagggggagtgttaagagtaataatgtttagtggctattgtaattaactctgttaattagatggttagtatataggtaagggtagtttagtcttttttgaatttctcttataatcttctactttaaaggttgtaatagttaattttcaaatgaatgataaccattattttcaaagggaaatttgattttatacttaaaaaattaaaaaaatttattattaaaccaaaacttttcaaaataaaaaaactatgacatttttttcaaaaccccaaaaaatacccccctcacaat

SEQ ID NO: 111995 - DNA, 1319 bp, Cannabis sativa
tggggcggctagccacggcgaggccgatgctggtggtgatgggtcccccgtgcgaccatgtctccacgatgaatttcgcgttccagccggccgccatggccgaaatcagctccgccacacccgaatctcgaaaaatctcgcactgaagataaaacccagatcagaaatttgttgaaatttaacaattatacaatacccaactctttaaaattaagaataatccgataacgtttatttatttttattatataaacctttggagaaaattgcttactgatttgacagtatcgatgtaagctttcgatgctgtttcaggagaccaaactagcttcatttcttcttcttaattaattggtaaatttgtatatatatatatatatatatatataaagagttattgtatatatatgtataaaggagaggttttttctttggtggcaagccaaactttttggtttgggaaaaaagagttcaagttggctttttattaggagactgaaaaatgagcttagattttttttttttttttttgttattttgatttgtaatttgttggaacgttgacattatttaatagataatagttttaagttgtaaaccatgaagtctccaacgtgtggatttgtattccaatggattagtattagcaacttcttattctaattctctcttctttttattgtattttattttataacattattatttaaattagaaatactagtaccccagatattgttgtactacagcaaccctgtttctagttattattattattgtcaaacatgtatatatataatataaatataaatatttcaaggtggttttcactcaaaaaaagaaaaaaaaaaggaaaagaggttggcaccaactagttttattatgtttgttctatgtaagttttattagggtttatcttgtttctcaagttccttttttttcatatatataaaagactatataatatggtaggtaagcatagaaaagaatccatttttaacagtttatacttgtctactggaataagtattaagttcgttctaggtaaatgatccaaagtttaagtctagtcaagaaaagacattaaacagatcactcctttgaaaaagagattagtcttttattaattatataagataaatctttaagctaactaatatagtaaaatataacaatatcatcattttaatttgaaatagatggggatgaaagtagttgcttttaatagctgatgtttatttatgggatttcaattaattaataatttaaagaggaatttacgctttatactctttttatattgttcttttttattttta

SEQ ID NO: 111996 - DNA, 5759 bp, Cannabis sativa
cttatataatatgctcaaagctatatctaggtgaagatgacattgttaattcttgggtaaaagaaaagtatggagtcacaacaagagcaaaaaaaatggttaacaaaactattatttcttcctttctatttgttaaaactattataatcttgcataacttaagagttacacattcatagactggtatacacaagattctgtcaaaatttcttatttatacttcccatttttgttactttcccatcttatcttgtaattagttatttgactgtacaaattattgatttgtaattacttattttggatgccttttttttttctttcctataaaaaactctgtagacaattaataagagagactatcgaatccactcatgtatatttatatacagtatatgacatgttttaacatgactaatgcagtgaaaaatcaatgtcatatggcttggtgccagtggtgatgattcatggtgcctttgatgactacaagaaaaccaacttaactaatatccctacctttaccaagccaacccaagtaagtttggttgattggtccagtcactttgcccacctacagatatgtatagcacatccctagaatagaaaatatcattcaaaagttaaaaggctagggatgcaactactatgcaaaggtatattattgaattaaacccaaacataattctgttcatgcctattagatatgctcagataaaatatcaataactcgtctcctgatttctaaaacccaattatggaagtaacaaactcaatatcttaaaaacattttcaactacatgcacagaaatgttgttggaaggatacacagaatattcacagtatcttccacttttttattagtttaaatatttagaatgtgtgtcgcaacaagttaccataggaattcacattggcaatatgtcgactataaagaaacagaagagagcataatacaaaatggtgaaagcatttttattcgtcctatcaaacgagcatggcacaatattttcaactaagtcacaacaaataagaaaactaaacaaaaggaaccaatgaattgtaagtacttacctgttccgtcgttagctattggcactccatcaaatgcaagaataatatcatctttcttcaaaattttatgtgcatctgaaagagggttaattttgctcactaatacaccagtcatatctttccgcatctgaaaatagtttctcagttgaacgttttcagttggctggcatgacaaacccagagagcagaatccgacatattttccactttcttctacaccagtaataaaatgcttaattactggtactggaattatataactgcaatcacagaagagaaaaattaaggagtggggcatcgcttattgtgctaaataaaatcatttatgccatggtactcacccaatattctctgcacctgagagattttggaaagcaacgccaacaacctttttggccatgattgctgggccgccactattgcccgggttgatggctgcatcaatttgtatagccatcagctgggtggcaccatgtacatattgtgtaggttcaactctggaaacaacccctttagtgacagaaatgttgtccccgcctgccaaaaacaaggcacagaattgaaaggcctgtttgtttgtctttacatataagtaaaagttgataagttataggaaagtgtcatgagtgtgttaccttgaggatatccaacaacagcaacagcttcttgaaggaaaggaatgtctcctagctcgagggggttgacaccctcccaaaattcttcattttcaacggccagaatggccaagtcacactcatggccaacagcttgcacttgggctctgtatttggtaggagagccatgctttcttacaagtacaaaagtgtgatcagccactacgtgggcattggtgagaatccttttcccatggattacaaagcctaaacattattccaaatataaacaggatgaattgaattgaactgactgaactgaattggacggtgaaatcaacaacgagagagggagagaacagcataccagagcccatcgattcgcgctgagacttgttctgccatgggaggaagtagttggggccactggaaacagtgaatatcttgaccacagaatccaacgccacttctattgcagaatacgcatccgtctccaagtctgcatttgtggccactgccaatgtggactgaaaccggcgatgagtgaccaccgagttgtgggcagcattgttgtgtttggcaaaaagtggtgtggaggagttgggattagcgtgaattgtggatgttgagatagggattgggagaaggagatgatatttagatttagaattggtagcagtgaaattgaggagaaaggaagaagaggaaattgagcagagcctgagtctagctattgtacggaaggatgagcccattgtcatcctcctgctccctccctccctccagtgattgattgatcttgagcttgagcagttgattggcagagctgaatctaaaacaaagattatattataaaaacaaattttgatttcattacagaattagttaatgaaaatctaaatataatcagttttgcttgagttgagcatagtattattagaagttacatttggaagataatcaattacaaataatacaatagcaaatatataatctatccatattccatacataatactttgataaaccaacctaaaggtgaatgaatcatatgattactttataggtgatttatgatcacttgagaacagagcagcctaataaaaagaaataaggttgcacaaatttggagctatcaacatcttaatgcgaaagaaattttaatatgtgtagtctctttggcttgaagttgtgtatgtaatatattgaactatgtgttttaccctattatagatcgtgaaagatgtttcaaaaaagctaaaatctttgcttatgttactgatactgctgtactactacccccaaattcaatcagagaaatgatgtaatagcagaaagaaagaaagaaagaaaaaagcataattaaagagtgagaaggttacttagatggaaattggaatgtttggtctcgaagaagaaaggagttgagtcgccggcggccttttacggcagagcttgaaccaacctcagtttcagttaacagagagagagagaaaagagtgtgagtgtaggagtctccttagacttaggttatggagttggattgggcctctttccaccatttgagtgagcccatacttgatgataaatgggcccccaaaatggaaatggaggagggacaggtccataagaaacaaaacgagaaagtagatgatagagtagagtgtcatctcatctcatggtcacaagactcatggccgggtgagtttgttgatgagaaaagtgtgctttgagtgagcccattaattaatagtccatgagagaagtgggctttgagtgagcccatatttgatgataaatggcccccaaaatggaaacggagagggacaggtccataagaaacaaaacaaaagtagatgtcattgtcaactcatggccggtaataataggtaggattaggccggcatttggaaataaaagcaagacaagattagtcagagtgagaccaatattaatcttaaatgttaatgaagatgatgttgtccaataagttagttagaaaagaccagattactaaacacaaacacaaagattaccaagaacaagaagaagaagaagatctgtcactcttccgggagctgaagaagaaagagaatgatatagatgatgagatgatgaggatgaatctgctgcagcagcctttgtctgatcaatttgatcactctatcatcatcatgaatcatcagaagaagcattaccaccgtattcccaccattgaatttcttgcccaaaacaaccacaaacatgactacgactggtaacatatacactagtactatatataaagactatatatatatatataagtatacagtattaataagtgttatgtatgtatgtaggttgaaaacgccccctgcaactcctctgtttccctccatagaaatggaagctacccactctcctcacactcgcatacctctttccacaacaaccactaccagggtacattattaacatattatctcttaattaacgtctaatttcaaactaattaaactcatcattctatttctatacataataccaaaaccatgcagtttgcagatgcaaataatattccaattattgggaaggccacatcatcatcatcatcatcatcatcatcatcatcatctgtccaaaaaccaacaccaacttcaataagttcaagttcaaatattaataataagtccaagactacaccccaactcacaactactactattaatactaatagtagaaacaagaccagaacaagaactacgaatcatcccatgaaattgaacaagaatatgaatatgcagatgagagatactactactacagctacaattacatcaaagacaaggatgaacatgaatgtgaatgtgaatgtgaatgcaatgatgtggccaaaggaaaaagctcctcctccaacagtaccagtacatcaggaaagagcaagagcaagagcaagagcaacgacgcctactaccaataacccaaatagggcagcaaggatgatgatgatgaccacacaatcctgctccccaacactctccagaccacccaacacatccaatactactactactactactactactactgctgctgccttcttcaggggtagcaccatggtggataagctaatcaaggccagaagatcatcatcaacaacacctacctacatattataacacaaaccatatcatcaattaattaattacattagatacattattaatgttgatacacctgcattccaattcgttgttatatgataaagctagcccactaattaatcctcaatattaatcagtgaaaacccattaaacacatcatgtacaaacaagtattcattatctaaaagtgtagaggaaatctgataaggagttgagacaacaatgtaaccttaaaactttatacttacacagaaactcttgcaaattaattaccaccaataatccattaattagggcacgtacaaataataaatttattcaaaacagaacgccacaattatagcaatctcatcaaacatcatatattcttattaacaaaaacttaaactttcatatagttcctccaaaaattattactttttttttatagaaagttcaatatcatctggagaagcgctcgcagaagtctaacttgtctattcagaaggagtctctaggaaaagctagtcttcctccagaaaggagttctggatggccagccagcgttcattcctggaagggagttccgaatagtcgactttagcggttgctattcctattcgggaagtcctttcaacgtacgcttcagtctgtattccagggagcgtacgtctcatccagaagaactttaacttgagctgacgtggagatatttttgttacgagaaatttgttaagtttgttataaattgtaactaatttaacaacttagcattggcagctaccgactttgggatttatattcttaatttataaataccgccaacacttatcattttaaagtacgtgatttcaagacaagttttgagaggtgactttgttgttgaagactgagatcaaagagagattgagaggtaaagagagagaagtacagagaaaagagagagaga

SEQ ID NO: 111997 - DNA, 2687 bp, Cannabis sativa
  modified_base (77)..(82): a, c, t, g, unknown or other
actttatatgtgtttattttcttgttttagaattcatattaggttgttaataaaacatatatggtagtaaatctagnnnnnngtaaaatatttccaacaacaacttatttagaatatgtgagttctatattttcggtacatgaacgctcaatacgtgaatcgtatagtcggaggcattctattgtataaatgagccttgagaggttcgcacattgataaatactctaagtggtttatgtgtttataaaagtttaaaagatgtaatatcttaaaaatttatttatgattaattaaagtatattttatgaaatatgaagtaattttggtattaagagaaaaaatgagtgagattataatcttataagataaataggcttattttaagaatgagataattaagcataatttattaattatgaaaattgtattgatatatatgggtaatatgaatactatttgtgaaataaaatattttcaaatccgacaatagtagaaaaccctattggttggccagaatgtcacaaatgtaaagtatgtgtgatactaggaaattttagttggtcttagttttacggatataatttaggatattttgctatgactattttatccctttgtataagggattacttaatgatgaaactaaggatggtcgaacaaaaaaaaaaaaaacccgtatacaaattgcatggaacattaccattcgttactgaagtacggaaagcataactccgaaagagtttctgtttcttcgagtcactcaagtacaaaggtttgagtaatctaattgattatctagataagtttaatactatcatgaggttgattaggtttcgcaattggcaaagtgttgcatcctcgctgcaatcttggaggacaacacacacgagtggtttaataagtttcctaaggcctcaatctttatatgggaggcctttgtagacctatttttgacacatttttaggtcaccatgacttagaaacctccatacacatagatgtctctaacataaggcaggaagaatgtgaagtttataaagttattttaaaacattttaatgcagaagtgactaaactcgagaaggcccccaagtccacactgatttgtatgttgatcgtaggtatttcgccacgaattgaaatctagaaagagttggaagttggacaacctggaactttagtggagctcttcaccctggccaaacaccataagcgagttgataattctcttgcagaacttgagaaaacaaaaagaagaaccaatctcttggttcaaaagcttgttctagaagcgcttagcgtcaaagcccgagaggacgcagccaagcaagatgtcacagtcccaaatttgctagaccccctacccgaaaggagatttctcccaagcgcaaggatgtctcctcaattttttaactgtacggagttttctgtcccctgcaatcacatttgcacaactgatgagcataagggagttttcttaaaaccttcacatcagaggcaaccacgacaaaagggatccacataaaatttgtaagcatcacaaagatattggtcatactgcgttagaatgttgggttttgtaggatgaaattaaggaattaattcgtcgtgaacatttcaacaaatacgaaagggaaatagaccgagagctgatgaccaaaatccctaagtggataacagggtaatcgtcacggagataagacgggcagctcccaagatcctcgcaatattttaatcatcgttggaggactggatattgttggtgagtcaaagaagtcacaggagcgatgcgtgaaagaagtaagagagaaaccactaaccaatgtcaacaatctcagcgatagactagtcaagttattcaagaaggagtgcaacgatattatttttacgaaaagtgacgcgagatgggtgcatcatcaacatgttgatgcattagtgatagtcgataatattagaggtgacaatatacatcacatttcaattgataatggtagttcagttaagattgtagagaagaaatcaatcaatatgatttatatgttagaagctccctcgcctagccatgaatcgttctgaattgaagaagttctccatgtggaaaggctcaatctcgatccacgggtcctcgaatactccaacaccatgcaaccagctgaaaaaattattgaggtgccaagtgattcttctaatctttttaaagttttaaagatgggtttgaaattaaccatgcatcaccaagaaaggcttgttaccttcctcaaacaaaatctagatgttttcacatagaaacatttagatatgataggtatattactggaggtcatgtgtcatcgtttgaacattgacccaaatgtgtgatgagtacgacagaagcgctgtaaaaatggaccctacgaggtatcaagtcaaagagatagttgaccatctatccgcaagtagctttataaaggagtcattctacccaaatggttagctaatcccatccttgttcccaagcctaatggcacatggaaaacatgcgttgatttcatagatttgaacaaagcttatcctaaagacaacttccctttgccaagcattgacaaacttgttgatgcaaccgcaagtcatgaacttctcagttttatggatgcatactcgggatataaccaaattctgatgtatgaactagaccaagaacatacctc

SEQ ID NO: 111998 - DNA, 2880 bp, Cannabis sativa
ttatatttttctgttttttttcccttttattatttagttatcattaaataatagatataatttagtttatattaaataatttaatatttataaaatattcgttgcgaagcgcggattgtttcctaattatattatatttcaacaacataaaaacaaccctgtcttttggaaaaaaaaaaaaaactaaaaaaacaaccataagcaaaacattaaaaccagtgcaaatttaattgatcttgatcttattggttatccttatacatgggaacgtggaagaggaaccactaattggatcgaagtccgacttgacagagcattggtcactcatagttggtcactcatagttggtcagattttttccattcagctcaattatttaatctcgaaatcactgcttcagaccactgccctttgttgcttcagcctttggttcagcatctgtttgtttctacacaacaattcaggttcgagaacgcatggttgcgtgaacctctctgcttccaggtggtgaaggaggtctgggagcttcataccgactgctctatacttcaaaaaataagtatctgtggggaaaacttgtcgacatgggggcgtgaatatactggcaacttcaaaactcgaattgccaagataaaaaagtggaagagagggcgtgatgttgagtcggtcagaaaatataaagaagctcaaaatctgctcactgaaattctgaaccagcgagaggtgttttggcgtcaaagatccaaacaactttggctccatgaaggtgatcaaaacaacaagtttttccacgccaaggctacgtctcgtaagaagcataacaccattcatagtcttcaaactgctaccggttcttgggttaattgggacacgaggttagactctcttattgttgattattttcagaatctctttacttcatcttctactgattttaatgatgttgttatgagtattgttccttccattaacactgttgagaatgaatctttgcttgccccgattactgatgaagaagtgaaaaaggctttgtttcatatgcatccggataagtcaccttgcccagatggtatgacccctggtttttatcagaaatattggtcaatagttggttgtgatgtgatcaatcaagtgaaggaatttttctcaacgtgctctctacctgctgggttaaaccgaagcaacattgtgctaattcccaagaaaaaacagccttgtacaatgagtgatttgcgtcccatttcactttgtaatgtcctttataaggtcatctctaaggtacttgctaaccgtttaaagattgtgcttcatcatattatatctgaacatcagtcagcttttatcccaggccgacttatttttgataatattatgatagcttttgaagttatgcactatttgaagcgcaaacgcaaaggcaaagaaggctttatggcattgaaactcaatttgagtaaggcgtatgatcgtgttgagtgggactttattcgtgctatgatgcttcgcatggggtttgctagttactttgttgagttaattttacaaactctcacctctgttgaatacaatgtggttcatagtggtaaaagccttggcccaaatatccctcatagaggcattcgtcaaggagaccctttgtcgtcttacttattttttatctgtgccgaaggcttgtcatcgctgattaccaaatttgaaagactcggtcaactaaaaggttgcaaagtggctaacctggctcctatcatatctcacatgctgtttgcagatgatagctacatctactgtagagcaactgaaatagaagcttccaacgtcatgagattgttacaactatttgagacaacttctagacaacaggtaaactttggtaaaagctctattttctttagttcgaatactaatgatacgattaaagatcgcatctgtttgttacttcgaatggagatagccccagaaaactctacttaccttggtcttccttgcaccatgggcagaaataagaacgtaatattggggtttctcaaagagaaaatgcaaaagagaatacaaagttgggaaggaagattttatccaaagctggccgtgaggtcttactgaaaactgttgctcaggctctccctagctatgcaatgtcggtgtttcttttgcccttagatacttgctcttctttggaaagcatgatgtctaagtattggtggaattcatccaatcaaaacacccgtggtattagttggatgagttggaagcgtttaacaaagcagaaggatgttggcagtatgggttttcgtagtcttcatgactataatttgtccttacttggaaaacaagtctggcgccttcttgtcaatgaccaatcccttgtgagtagagtttataaagcacggtaataccctcatggtaattttctcacagctacacttggaagcaacccaagcttcatctggaaaagtatttttgagtctcaagaccttgtcaaaatgggcaagaatcagaattggctcgggtacttccacaaatgttttgcacactccttggctcccaactgagtctcagccgtgtatcacttcttcccatccgagcctaactaattgtaaggttaatcagctcatgaaaattgaccaaagagaatgggatcatgacataatctcagatctcttcaatccaagagaagctcaaataattcttggaattcctcttagcaatcaagctgttgaagatgtttggtactggtgtaaagaggctgttggtttttactctgtcaagagtgcttacagacatattcaagagtcaaaaggccattgggcaactgatgaaggctctaatttctggaaaaagttttggaaaatcaaagtcccaccaaaagttcttcattttgct

SEQ ID NO: 111999 - DNA, 888 bp, Cannabis sativa
  modified_base (849)..(863): a, c, t, g, unknown or other
aaatcctattttctctattgttgtaaacgattatcagttttaataatagtgaaatttctcaaaaaaaaaaaaaaaaaaaatctcaccgtaccgtaaccatactacaaataaaattaacataccacatcgtgcaatgcaatgcaaataatgtgggtctggtggttaagcgaatattttactcactcctaatcatctattgaattttgtagaaggtagaaacaagtattttttgaacttcacgtcttcttcacgtgacaatgtcattctattattttttattgtcaaatattgaaaattgtacgccaaatagtatttttcttccctttcacaaatgtatacgttcaactttggtgggcattgaataaaagataatgacgagaaaatgtcattttacttttccgctccaataaaaaaaaaaaaaaaaatcatcaacactgaccttaaaattggatagaccttaaagaaaaattattactctttattttaaaaatagtatttttaaaatactaaaaacattcgtatatttttaaggaaaaaacaatttttttagaggctttagacgagtgggccttaaacacgggcttaatctgccttagctcaggtctaaatttcataccaaatgtctcatagagtagccagtaagactgaatattttgagcgggttcgatccggtcccgggcaatccgcccgaacccaacccgatcaacccacaaatttcaaaaacaaaaaaaaaatattcaggcaggtcaatgcaggttagattttaaggaccaccgggtttcgagttaaacccgaacctgcccgccaacccagttatataatatattatagaggaaattacactctatnnnnnnnnnnnnnnntcctcttttatttttaccctctttt

SEQ ID NO: 112000 - DNA, 6381 bp, Cannabis sativa
  modified_base (198)..(199): a, c, t, g, unknown or other
  modified_base (5218)..(5218): a, c, t, g, unknown or other
  modified_base (5325)..(5339): a, c, t, g, unknown or other
tctggttttaggtatattgtataaatttctcttctataaacatgttttggatgggttttgtttcattcattcattatgaatgttttagaattatttacaccatataatgaaatttttaatctttttatttttttattttggggcgaattattttttaaaaatactgtatttttttttatcaaaaatactgtgtactgnnttaagtttttactgttattttacggttgttttttagttgttaaactgttgtttttagttgttctattttgtgttcattgttgttttataaaaacacattatttttgaaaaaatttctgtgtagcaatatttttataaaagttaatctaaattctagtatttttctaagtttcccatattttaagctagaattaccgcgggcttggaaacctacgaagttttcaacttcttaaagagcatacttctcaaaagaaacctaaacctttcaaattgctgctgaatccatggacaagcaagagacaacttggcgaactgaaacattttagtagaatttatctggtccatttatacacgtttaagtaacaaaattttcaagagttttggttcattgtagaatatttggtaaagggttgagagtcattttttatgatcaaataggataggacctaaaaagttaggagatatagttttgtaaaaatgggatctttatgacttttacaagttttattttaattagttaattttttttttcattaaataagtactttgtgtaaaatccaatatgtttttctatctattcatatttttctacatttaattaaaaaaaaaattactaaaaagtattattagtatctagcattctttgcagtgtctatcggtattaatataattaaataacgagtctcatatgatttaaaatattaaatcgttaattaattatagagtgtcacctataaaagatgttcagtattattagcgtccaataaatattttttattaaaatttactttttaaaaaatgactacataattttgaattttatgatgataggtcaaagttgtagaaggtaggtgagtagtgcaagccaagaacaagtgaaaacgacatcgttatggttggccaagaaagaaaatatattatatatataggagaagaagtagagactcttttccaaccccactaaattgaatagttgcatattgaagacggcaagtatctttgattactactacaactacaactacaattacaaaataaagaatatacataacaaattttgtagttttcaaatttgacataatatttagtatttttgaaatgtaacacactatttttgttaaaatatgctaattgaaaaatagttttaaaaagtgagacactaatggagatacttttggaccacccaaattaatattttcctaaataagtagcaaataatatttattaagtaggaaaattctatttaaaaagtagaaatattatgactcttacaaactcaactaattaaatactattactgtatgagtggatctcgttgtgaaacacatgttcttgaataattatgagtagagccgaaaagtgtgacactacaagaaacttaggtattagtagcgactatattacatgcgacctttttgtcactctaatagtatttttaggagcaaattattagagacgactttttaagggcgacttgttgcctctaatagtcattaagagcgattttttatagttttagaggcgatttttgtcgctcctaatacatatatttgttgtagtgtgaactttacaaattaacaataacattgattaaatgagggaagaagcgaataagaatatataacaaaatttgtaattttcaaatttgacatattgtttaatatttttgaaatttaacacacttatttgttaaaaatatgctaaatgaaatatagtttataaaagtgatatattaataaatggtgatacttttggactacccaaactaacattttctcaaataacaccaaaaccaacataagatttttcctttttttttttcttatttatttcttttaaaattttttattgggatgcaaatattgttttgacaaattgagaagaagaactcattcacgttaattccatatataaatatacacaaatcacatataatactacttctcaaatttaagattatatcaaaagaaaaaaaaaaagtaaaatattaatattctttacacatattaaagaaaaagaaagaagaaagaagatggccattagaactagctgttgcctcaaccaacttctaccaccatttttttctccatcaaaaactacttctcaacattattcatggtatgtaataaattaaatatcttcaaatactatttcattaatttctcttttcaattttaacatattttccaataatatatatttattttttatagcatgggaagaaataaagaggagactagtacaaaagctataccaattaaaaaaggtatgataattgtgagtttagtgataatgggaatcactaatgaccaatcctatgactattattatgctaatcatgatcaagtgcctctaataagcattactacaacaacaagagaagaagctaaggcaatcaaatggagccagcgaattagaatgtgcccgccatggcatctcaattcgctcgagtccatagtccctgaaaatcttccccggccatcagctcaccggggatccaaagttttaggccacgtgccacatgctccgccgatcaagtttgatcgtgcttatgttagagaaggaaacaccatagattgcttctcaatgtaacctttttttttttttaatgtatgaaaaatagaattaattgtaaaatgaaaattcaatttggacttcattttatttatttttagatattttttataagtgtacaaatgtgttactctctcataaaagagtttcaaatttgtgtagtacatatatgttggcgtttcttcaaaagtttagtacatgtagtacatattatatttgattttttaatgaataattgcactattattcttgcattagaagatatttttttatatagtaatttttttgtattcattgatgagatgagtatgttatctgcacatatatatatatataaaaaatattgaaaaatttatactaaaaatttgaaaaaaattaaaaaattacgttaacatgaaaaaaaaatttagttttactcttggaattttttttatttacaaaaatatatttcgtaaaattaataaattattttttgttgttttataatttatttatagttgtaaaataattttcatgaagttattttttgttattttataatttatttatagttgtcgtgatgttgatttctcgttgttttttagttatttttttactttatactgagaaaagtgtatttttataattttaaaattgtacaaacatatttttataaataaaaactttaaatcgtaaaattataaataaaacataaaaaaaatatttttgaaagtttctctaaaatattatagggattttttcatttatttatagttaaattatgttcaatgggaacattttccactatgacttctccctgtgttactttgtctcgaatgaaatggtatttaatctcaacatacttggttttgtcatgcaatataggattcttgcaaagatgaacacaaatctgattatcagagtatattataggcacactactcagtaaatttagctcatttattactcctttaatccacattgtctcttttatagcttctgttgctgagatatactctgcttcagtaattgatagagccactgccggttgtagttggactttttagctcacacaattacccctaattagaaagtaataagctgaagtagatctccttgtatccctatcgcctacataatctgagtcacaaaaatcttccaataaaattagattttgtgattgtctaaacaccaatccagtgtctgtagtccctgttaagtacctaaaatttatttaatagctagccaatgtatctttccaagattagccatatacttgcttaggacacttatagcataaacaatatcagatctaatactcaccattagagatactatagaaccaactgcattagagcaggatacgtagctcatttcaaactcatattttagcatttctttaaccaaatttactctagagctttcctttctgattattaacatgtcatgtacatataacagcaagtagatgacatctttgatattactttcatgaaaatataagcaagtgtcatagtagctcttagttaaaccctatttagtcaaatctcctgttccactgtctaggagattatttaagtctatacaatgacttaacaaatttgcaaaccaagtgccattttcctttctccacataacccttaggttgttccatgtaaatatcctctttcaattaaattgattagctaatgccaacataagccttatagttttgtatttggagggaaaatctcaatgtagttaatttctttcttttgtgcgaatctcttaacaaccagtctagctttgaatctcacaatatacaatgctacaaaacatgtcataaaatcaaataaagaacaattatatattttttaaacaattattatactacaataataataaaaaatagtttaatattttatcactctctactttataaataagaatgggatttcgtctattcttttattactatatttgtaaatatttaattttgattaacaaggcttataattatatagcttttaactaagaaattttttattcctaactaaggtgggacaaacctcaaattattttattcacatttcaaacaatactcacagtaaaaaattaactttgatccatattgcatttcctttgaaatagtatttccttaaactttgaaattaatcttcttaattttatattttaactgcatttcctttaataaaaaatagatatatcaagtgaccattattttttggtaaaagaaaactgaacaaggttcactataatttatacaataaattggaatatgggtataagtaagaaataattcaaaataaaattgaaaaaaaaaaataaaaaaaagagagagatcaaatatatattgattagtttgtaaaattgtaaatttttagagataagttaatctattaatcaaatgagtaatttgcgggataaatacttaagtttaactttcagttgtaaataaatacttaantttaatttttggcactaataatacctaagttatatttttagaactctgtaggtacctcaccattaaatattatgtcattatccatgtgtcattttcttattggtatnnnnnnnnnnnnnnnttttttaaaaaaaatacaaatttaatgattttgaccaatcaagaattgctacgtggcaatttacttaacaattaacagtcaggtacccaccaaaatttcagaattacaacttaggtattaataccgttagaaattaaacttagatatttatttgcaactggagttaaacttaagtatttatgccacaaattactctaataaaaatatactctcatattatatttcattaacctaacagatataatgtagacatcatctataaaagtagataaatcttaaaaaaaaaataaataaataaaataaagtgaatatacaatacaattttctttagttcacttcacctattcttcttctatcactctcacactatatatcaattatcagattttgaaaaggttactcactgtctttttttaatcttctttatcattttttcagtttttactgtccaattttacaactttacctcacctattttatataattaaatagcattattattaggtattattagtacccaactttacctcaccttacatataatattatctaaaaattattttcttaaattatataaaatccactacataattataccaataacaatatgcaccaataataccttttaacaattttcataattaaacattggtaaataacattttaaaccctatattttacaaaaattaccaattagacgatttattttattaaaagataaaatgtactttatatttttcaaaataataaaaataagacactaaactcaatttttcaacaattttatttttcttctatcttcccagtttaagcatcaactttcaatctttcgaaatgatattttatgattttacagctctctttacacttacttaataattttacaacaaagaaacataatttgttatttttttgtatggtattggagacatattaaaattaattacattctcattctcattcctcttctaaccaaatggatcctaaatataaagtcaatcatgaagacaaaggacaaagtctgtttaatatgcacacattc

SEQ ID NO: 112001 - DNA, 1252 bp, Cannabis sativa
atttgttaacgaataaatagaagttacttactagagttcacttgagggggaagtcctcccacaaatattttctttttgagttctgctgcagaaggagaacggcttttctggggtcccggcttcagttgtctatgtccttcttcactatgtgaataaaagcacttttctcctctaatacatccttgaggagaagcataatatttacagctctctgttgttgtgcttgagcaaatactagtattgacaagtgcagtataatttaatgagaaagaccatactaatgaatacaacagaaaaatatcccaggaacttagaagagcatttgtagcacctttcacagggggtctctccatctgtcatgcttaggagtgttcctccggcgtctaagaaaaattcggcatcttgtaaccattttggatgtttctgttgcaaagagagatcacgatttactgcatgcagataccagagaagtgagattaaatgattataattgcattacagataaaaagtaaatggattaaaattcaacttaccatgactgatattggttggatttagcataaaacgcatatcttgcgattttgctaagtctattggtctttgtctactggtaaccataagttgaagcgcatatcaatgttccgtccataagtaaaaaaataaataaaatatggatcagaagtgcatataggcgatggtccaattcttaaaaccacaaagttaactagcatagctttgatgaacaagaattaagcatttttcctaccgcaaattcagaacttcactgtttgccccccagcgcaaaagaatctccgcacaatccatatggtcattcttcactgcaaaaaatagtggtgtttctttcatctctgtcttgtagttgataccatcgggatcttccagtagaaggatctgtcagctcaaagttgaaactaataaaaatttctaaaatagaaacaaatgcaaatctgtcaactcaaagagaagacccaactagactgaggagagattttcatacctgaagtgcctgtgaattaccattaccagcagccatatgaaatgcagtcaatcctaatttattcttttggctcactctagcaccatgcttaaggagaagtgatagaatgctgagaaaatgaaacaacattaatttgattagagctgctaaatcctgaattaacttttttccacttttgaaagctttctttgtgtgtgtgtgtgtgtgtgtgtggctgagagagagagagagaga

SEQ ID NO: 112002 - DNA, 3068 bp, Cannabis sativa
  modified_base (28)..(70): a, c, t, g, unknown or other
aattaaatctataataataataataatnnnnnnnnnnnnnnnnnnnnnnnnnnnnnnnnnnnnnnnnnnnataataataataataataagtttacttagttaaaagttcattcataatacaataatgtcaaataaattaaaaagactaaaaattcctctttaaaaaaaagacttaaaattctataaaaagaagagagagaacttctaaataaataagttgttcgtgatcaaaaggttaaaatagttttactacacttaaattgcatcatccaaagctagaaaaggtacgaaggtcattataagtgcaataaactctataacatttagaatgaagaaaactatctgatcacctgcaacaaaaacatcattaatgtaagcttgacaaaaaagagagttaaaatactattgaaaaaataacttatatgaaatacttttacatgtctttgcattagcattagcatttaagaacacctctagtctaaatcatctttatcgaatttagtttgacaaaatcgaaaaactcgattttaatattataacgaagagacaaagctcaaaatatatttctaataagtaggtctcatgtatataaaataaaattttgagtcataaattactagttctttagaatgctagttagtctttctcattgtatatatctcattgtatatatatatatataaatatatatataaattgagaacttatctatagaaatataaaaggactcaagagaagaactcaatcacaagacttacaaaagttgagaaagtcctgaatgaagattattatttatagagagctagttacagagtgaagaaacaagaaagaaataacaaaaaataacagccaaaacaagtggcaaaactaactgacttcacctaaacaactaactgcaactaattgttttcaactaactctttacactggttatcattccctctcaagcaaaatagtgaggaacacactttaagcttgtctttgagatagtgaaaatgatccatggagagacacttgatgaatagatcagcagtttgatcaacagaaggtacatatcgaacctccaatgtcttggccaatagttgatctctaataaagtgttgatcgatttcaatatgtttagaacgtgtgtaaaatgatggattagctgcaagtgaggctgcactttgatttccaaatccaaataatttggcagactggaagagagacaagaatttttttaagtagataacatatctaattcacctcatcaacaacattagtcatagcacgaaattcactttcagtgcttgattgagcaactacttgtttcttctttgcaaactaagatatcatattaccacctaaaaatactgcataaccaccagtagattttctatcatcaagagaagttacccaatcagcattcgagtatgcttgtagatctaatctagtagttagttgtatgaacaaaccctcattagctgtaactttaaaacatattaacaatcgtttacatgcatccaaatgtgttatagttggagtatgtatgaattgacttaatttattgacaatgaaatctacatctagtctagtaagggcaagatactgtagagctcccaaagtatttctatataatgttagatttggaaattgatcaccaatggccagagacaacttgtgggctgagcttgtggggcgaggacttggttttgatccatctatttttattttgctatagatttggactatgacaggtgcattccagcttgagttctcttgacttccactcccaaaaaataatgaagaggactcatgtccttcacatcaaactcattattcagatcttgaatgagtttggacactaaattcttaggacctatgaccaatatgtcattaatgtatacaagaaaaagaatttggttgtcactagaacctgaaatgaagagagaattatcagctctggagcttgtgagccctttgttgtagagagtggatttgagcttttcattccaagctctaaaagcttattttaggccataaatagccttgtgtaatttacatacatgtgtaggataattgggatccacaaatcctagtggttgagtcatgaaaacagactattgtagtgttccattgagaaaagcatttgagacatcaagctgagggattgtccaattgttactgccaaagtcaataaggccctcacatttgttggcttaaccacatgactaaaattttctgtatagtttatctctggtgtttgagagtaaccttttgccactagcctagactaaatttgtcaattgagctatcaacattcaataatattctgtgaacccatttatttcccacaagatgcaagtttggttcataaagtactagagaccatgtgttgtttttcttaagggcaaaattttctttctgcattgaagtaaaccagagaggatcaacaagagcttgttttaaggtggtagcttcttttggtagggtagattcagggagaggatgtagtgtggaagcataggcttttggtttatggatactagattttgatctggtttggatgatatgtttatttgctgcaatagatgaggaattttagctatttgtgtgtgatgattttggtacaggcagagagatatttgattcagtgattggtgcagggatagattgtggtggtataggagagatattgttccctgaagtagtttgaggagtacaagggtttactctagaaactgagctaggaagattgaaactcttgtttaaagcaacagtacctgttgtggtgtcattaaggtaactaacactagcacaatgtgtttatggcatttcaggtgtagaagctaacatagtaacagagcgagactgttaggctatttttatcttaagtttcgggtcactttctatagttgtttttcttctttattattatttttgaaatggaattactgttgttttctttggtttcgggtttcacacttggaatggataaattaatcaaattttaaaaaataacgatctataaaatagagaaaattttacaagaaaataaagctgaaagtttaagcctaaattcgactatg

SEQ ID NO: 112003 - DNA, 7861 bp, Cannabis sativa
attatattgaaatgagttttatctagggcataaaacccaacaataacatacaagcttccaaacatatgttggtttgtactgttataaagttatgccatttggactcaagaatgttggggctacctactaaaggctagtcaacaagatgttcaaagaccagattggacataacatggaagtatatgtgaatgacacactcgtcaaatccaaaaaagttggagggcatatagagtacctggacgaatgcttcaaaacccacagaaaatataacatgaaactcaatcccttaaagttctcctttggggttagctcgggtaagtttcttggatttattattaatgctcgaggaataaaagccaatatagagaaaatttaaacccttctggatatgaagtcaccaaaaagatgaaataagtgcaaagtcttaatggtcggatagccgcactgagcaggttcatgttaaaatcaacagacaagtgtgttcctttcttcaacatcgtctaagacagcaagaaatttgaatggacagaggagtgtgaaaattctttccaagaactaaaaaggcaactcgcatagcctctcatcttataaaaatctctaaatagagaagaactaggaatctacctcgtagtaactgaatatgttgtagtgtcgtgctgatcagataagaaaataacgcccaatatccagtctactatgttagcgaaaggttaattaatgctaaaagtcgataccccctaattaagaaattgacatattgattactcctagcctcgaggaaattaaggtcttacttccaagctcattcaatctaggtgcacaatgaccaacccttacaccaagtcttacaaaagctagatgcatctggtcgactgcttaaatgggcagttgacttgggacagtacgaaattatctaccagccccgcacaacaataaaaggtcaggccttagcagattttgtggccgaatgcacatgcaatgagatagaaaatccaaaaagtaatgtcgatccagatagggaataagaaaaagaatccccaagagtccaaaatctcagacttgggggtagtatatgtatgtgcctctaaaaataatatgaataatcattaattagtttgggagtagaaacaaaaactaaagttcataaggttcatggttttggaactagaacctcagggaaccaagagtaagttgttatattaccatacttaagataaataattcaccagttaactcaggttaacaaattacaaataattttaggcttcaataatataaaaagcaaaactaaagtctaaaaggttcatgcctttgaaaccaaaaacttaagaagccgaaagtaagtaatttttgtaaagctttctagtctaaggttaaaatagagttgttgaaatcctaagttccaggcctttaatgagaaacctaaagtaaaagtccaagtgtgaaagttgaattactaaggttcagccacttcgaactggaacctgagggaacttgaaagtaaactagcttagcaaattaatgaagtcatttagttctaataattaatgaattaaaactattcagtcttcaaagatatgaaaacttaaaaatatttacatccaaaaagccccgcggcaagggcaaaccattgtctccgcaataataaaaagggagactcttatcccctaaacaaaataaagaaaaagtaatgataaaaataataaatccatctcaggctgattggaagcatttgttataatgggttcggaagcagagccgtcaacagccagaatagttatggaagctggaaggggaggttctaaagttggtacctcagttggagggttagttttcgattcagattcttctgcctcttgatcattgggaagggaaattctttccatttcaagaatttgaggaagaaaatctttctcctcatctccaagaagcttcacatcattgggatccttccaccaaagactatggagagcagccatgaaggaatttcccaaatctctcttcatctagttttcagctgtagccagctcctccttagctttcttttgagcttccaccaagtttgccttagctttcttttcaacttttaccaagtcaccttccaccttagcgagcttggtagagagttcaggctcagccttcattacagagtcctagaagttggtcatgatcttaagttcttgctccaagttatggatctagaaggacttttcagcgacatcctttttcatcctatccacttcaagaatagtagtgttcatgtcacactcagtggtctcgagttttttcgtcaagctgaactcacaggcttccaaagtctcaacccaagctttggctatgttgtaacgctctttatactcatcaccatgttgctgcatcatttggatgtcctctttataagaagcaacaacatctttcacaacagattgcaacctctctttgacttggcaatccaccaccttcgcttggttttggacttccttcaacttagccataacttcagctcgctagcatggcctcgtgtttggcttcattgttagaggcaagaaatttaaaatagagggtactttggagctaatgtccttgcgggaagatcagtatgattcctgctccgactcccttttcttttgatgctccatcaacatagactttccaggtaggtgatttcgggactagcttgtctaggaggttacttaattcggaacattccaccacaaagtcagctagggtttgacctttgatcgacacccatggttgatattgaatgtcaaattggctaaattccattttccattgtaacagcctgccggatgcctccagcttttgaagcacttggcagagaggatgattcgtcagtaccttgatggtgtgggcttaaaagtagggtctgagcttcctagaggcaactagcaatcaaaaggacaatttttcaatcaagggatacctagattctacacctagtaatattttgctaacgtagtacactggtagctagaactttccttcttctcgcactaaggcaacacttatggcatgatcagacattgccaaataaaggtacaaatcttcacctttcactgactttgataagataggagctttggtcaaatgcttctttagtttttggaaggcctcctcacattcctcattccattcaaacttcttatttcctcgtaacacgctgaagaacaagatgcatttgtctgtggacttcgagatgaacctattgagggttgtgattcttccagtaacactttacacattcttgtgccttttgtgggatgaaatgttaatgaaggctttaatcttttttgggttttcttcaattcctcgagagctgatgataaaacctaggaacttccttaaggagacaccaaatgtatacttcttgggattgagcttcatcctgtacctccaaaaaatcgagaagtcttcctcgaggtctgtactgtgctctctagatgtcttagatttcaccaacatgtcatcaacataaacctccatatttcttcccaactagttcttaaacatcttgctgaccattctctgataggttgccctgacattctttaggccaaatggcattaccttgtagtagtacacacctttatccgtttggaagctaatgtgttcttcatcgactatgtgcattttaatcttattatatctagaataagcatccatgaagctgagcatctagcacccggaggtggcatccaccatctgatctattcacgaaagagggaagcagtctttgggacagaccttattgaggtttgggaagtcaatgcacatcctcaatgtgccattgggcttagggaccaaaattggattagccagccaaacaagatacaatgcttcctagaggaagtcattcgtggtcagcttgtccacttctgctttcactgcttctgcccttactaggtctgatggtctatgctttcggtgaactggtgtcgcatcttcattgttgttcaaagcatggcaaatggtgttgcagtcaatccctgtcatatcagaatggctccacgccaacacatcctaattcttcttgacagattccacgatgttttctttcaccatcggaggtaagtttcttccctctttgatggttttggtgaggtctacatcatgaatgttgacctcttgtacatcctccattgattcaatcattctctcaatccccacactggggtctaatttgtcttcaaaatcctctcagacagcttcaacttccgctcgaatctccattctaggagcaataggtgcctcttctcgaaccataaacacaaaccggacagagacattataacaactactggtactcttctagtcacccctgaccactccaatgcatccattatcgcaggaaaacttcatacacatatgccttatggaagttactgctccaaaatctaccaagacttgatgtcctagtattgtgttgtatgttgtgggataatccaccaccataaaagtgcaatgtttaaaggcacaaacattgttttctcctttaaaggtgatagagagttggatttttccatcgacattaaagcgtccccattaaagccttgtagctggatgggacaagctgacaagtctgcctttgtgagcccaatcgtctgaattgcaaatttgaacaggatgttcattgagcttttgttatccactaggaccctataaaatcttttgttggctatttaggcttcaatgaacaaggggtcattatggagaaagtgcacgtgttggacatcctcctttgtgaaagtaataggcaaattcatcgttcgaggacactgggctgatgattgcacaataacacatgtttctccctctctgtctaactccctcaagtacctcttctaagagtttctggtgcttcctacaaggtgtggtcctctagagaccatagccacgtgtttgtcaaatggtggcaaagctagtcctgagggatataggtttcccggtcccaaagccaagatggctactgtagttggggatggtggagcagtgagtgctgaaagttgtactccgagagcttgagggtgactacccctgcagaggatttatggtaccctgctgtcctagaatgaccaattgtctgtgagcgatcccctgaccatgatatatgatgggaatccagacccattaccccaaatgtcctgctctgaccaacatctcaatttcatctttcaagtcattacattcattggtggagtgtcatacttcttgtgatactcgcaccttttacttggatctcttttaaacttctccccttgagacatccgtggggggttttttgtagtggatcatgttgcaggttcctctatacacattatctcgagtatccaccagactggagtactcggtgtaccttagctcataatctttctttgctttcttcgaagtctcacttcatctcggaccctttcctctcttgttttgggattaactcaagttgtgctttggaacttctacttttgactgttcgggagtgatactacattcggtctgtgccgctctataactagagaaatgagtccgcatgggtgcttgtacggatgcagatggttcgtagactgtcgaggtgtactatgttctaggaattggaactggtgaggtaaatctgtgagtggaagcaacaggagctggtgccggagggactccaaatgcttgctgataagcatcttccaaattgataaagctttgtgccttagtcatgaactcagacaacgttttggctctccttctttgcatccccccatatgggagagccaactgcaagtccagattgtagggccacaagtttcatgtcatcagtcagcttagttttagctgtcgcctctatcatttgatggatggaactcttcaagctttctccggcctgctgtttgatgttggtaatggaacccatttccaagtcatagtcgtagacattaataaactatttctggaaggcagactgtaactccttctagaaatggattggcccgggagtcggtcttttccactaatcttcaacaaacttggtaagggtcagggagaagcataaacacttaatgtcctcattggctcttgctacctgtatcatcttgttgtacttggctaaatgagtctttggatcagtacgcccatcttacaactcgatttgggacattttgaagttctttaggagcaaagcttccgtgatccttttgatgcatggctccggatcctcatcttttgaatcagtaagggccccactttgcttctagactaattttgttagtgcaacaatttgttcttccaatctcttggtgtcactgtctaggagatctcttccatggactttgtcatttaagtggtttctgaggtcattaccacgtggccttgccttctcgctttttgctttctcatacttgttatccaaacgccttctgagatccaccgtggaccaactatcgtcagagtactatcctcttgtgccaccgtcttggtttacggaatcactagggagatttttcttcccttggactttggtactttgtacaagtcccttttggggctacatggcttttaggggcagaagggcatccaagcctggaggcgttggctgccttctacgcttgagaaggcatgttggcctgattcgtgttttttgaggaggtataagagcatatgggttcttagggtcacttaactttgctttccctttgtcctatgcaggagccgaggttccaatattggtagggtttttcctggtgtttcctccgacgcattccaccgaggggtcatcatcagaatcttcctcgtctagatcttcaaacttagctcgaagccaagctatcattttctccatcttttgagaaaacttctcttggcgggctagcttttgtctggtctcgagcaactcgttagacactcgaactacttcggggtcttgctgtagtggtagccatctttgtagtacccatctttgacgtaattttcatcgcattcctactcttcatcattctcatcatttttctcatcatcgatgttgtcatgctgattgtttgggtcatcctctcgattgttcacattggacgtgtcctcgcctctcgtatcgctcggctgggcatgctctggtgagaggaggtttacctcctccatgatcgtctcgagcccgccttgaagagtcttcttaggaactatcttccacgtgaaaaccatggcaataacactataggtttacgtctttcttcaactctcaagcaccaaaatatttacagaaatttttggaaactaaatatttaagaactaaataaataataaaacgcagaaagaaagagatggagattttttacgtggttcaggtgataatcaatcttagtccacgtatgagtcagtctatcagcctcttaatgcatttttgatgtgtttacaatatttttacaggaaactctaattctatactctcaatttctcttgaagaagaagaagacgaagagtaatattggcagagtatcagctatatctgttatcatcccccttcatatggaatagaagggtatttataggctaagtggcgggtatggacatatccatgacccacctaggattcctgctccaagcccactaatggggtagattacatgcaaagtaaaagctgaatattgggtcccttagaaaccattgtgcccgtgtgtctacaactggacaattggggaccatttgtacaaagttgacacgtgtcatccaaaggtttaacctttaaaagtacaggccacacgtcgccaaattttttctcctttaaaagtagggctgagcatcggtcggtttggtcggtttttttctatataaaaatccaaaattcggttttcgatttggattggtgcaatcc

SEQ ID NO: 112004 - DNA, 3352 bp, Cannabis sativa
ttggattggatcggatggaaaaatccaatatccaataaataattggattgaatcggatgggtccaaatccattggatgtgatccaatgaacacccctatatgagagtccctatcaagtcatcgaatacgctttgtcgtttgaacaagttcattatgtaaggaagcgatctttaccaaatcgcaagagaacgctacctaatcatcgcatatattttgatatatgtgcgacttgtataaacccctcttaatcctgcttattttattttatgcgagacatagttagcgactagacgctatcaaagtcacatcatctcgcaaatttgggttaaacaaggtcaactctcgaggagtcattaattaacagctcatccatcccccagagattggatacacgtgtcaatttcataagagactggtctcgagtttctaggtgaaaattttgcactataacaacacttgttttagtcaaagatgtaaataagggtaatcctatttaactacgaggaaatataatggattatatatgaagctcaaagattgagcaatgttaacgttacatttattttattcattcaaaatgcatatgataatgcaatatgtctcttaaaatgaacataaaaataacagaattcgccctaaataaattaattaattcaaaatgtttgtaaaatttattatgtacattttaagttgatatatcaaaaatgtatcatgtcattattcttatttatttgagaatagtaataaaagttattggaaaaaatttgcaggacaagattttgatgaacgttcgagagtattgaccatcgtggattgtttatattacatgtctcattaatatggatgaagtagcaaacaaaaaagtttgagtgttggacgcaaaagaactaattactactaagcaccctccttgaaaaatgaaaagcaaagcaaaagcacttgtcattaatgacttatccttaatacaaaacgagtcgagtcgagtggtggaacgtcccatattggttaacctataaagctcatattgctccacatttagtctaatagacctcatttttccattaaaatttgactcatgacctattttttttattattattattaaaggagaaatgtatttcatttcatgcatagctttacttaagttaatgggtacttagtgttcaattaaagaaaatatattcgaaaattaattaaaattatcatatactatttattttaattaaatttcgttttttttgttctctttttataaaaacaataataataaaaaaaaaatcattatatatggtcatattaattgtcataatcttatatatcaatatggttaatattaaaattatcacctaattttgtagaatattttgatataaattgtgacaaacttttaaatggaaagccttgaatttataaatatacggtatcaatttattaccatttaaatttctgttatatttggtaaaaaaaataatagaatgcaaaatttaattttttttattaaaaatataaaaaataataattttattagataaaattataaaaaataaatgtaaagatttatataactaatttttttaccatacaatttttttatcaacttttattagagtaaaagatgagattagatcagtaaaaatttgcatcactaactctagtattctataattagtgacaaatcttattcgtatgcctgtagtttttgacaaaataaacccatatttccttattttttttaaaaaaaggaaagcatataaattatggcgtttaatggtaggtggtgaattccatttagtttatcatttacaaagtacaccaactttttttttttttttttttgattaactaaagtacaccaattgtaatattaaaataatcttaggtgcggcatttactatgtgcaagctactattttcattaatttatgtacactacaaatatgaacatctcacccactcatttgctataaaagcaccacttaccaaaatcaatttataggtatgtactaggaggttcataaaataatcgatttaatccaatctgcacgatttaattcgtaaagtgtaaatattcgtatttgtatagattggattagattagaaaatttaaaatctgtaattatgctgactgaatgttgattgacatgtaaaaataaacgatctaatccaatccatacatttttgtaaaaaaaattaaaaaattatatatgtataaataatattttaatgtaaagaaaatggtaatttaaaagtctaatgcatataatacaattatatttcaaaatttaataaatcaaatgtatattctattttcatatataattttttttttacatacaatttataataaaaataaatatttctttatacatattttttttctttgaatttgttattttataatgtgttgttggagacatacaataattataatttatcttattttattgttagttatgtaaaaaaaatatttttttcataaatattaaataatttaatattaaaaaataactaatttaaaataatcgatctaatctatatttttataaactgaattaaattaaatttgagctattgtgcagattcgattggatctaaaaaaaaatctacacactatgagtaaaatagtggagagtaaattaaataatatgtaccaataatataagtagtccatccttggagttggaagttccagttccacgtcggtcgtttgacactctcctagacgtttgaggtatatatttatgtaaacggcattttgtaactgtacatgaccaagtaactgaaatcagtgaagaccaaaactgtcattaagaatttagaagggtataatagtatattcgtggccataagatggcgcgccactttctggtggttgtcttcggtgggagaagagagaagacaaagttatcggataacggcagtgagagggtttaggcccacgtggacgaacatgcaacattcacgaggacacctggatttaaccaggaataatgccaaatctgcattgctactatatgaaaacgacaaatattcattctttccttttcttttattttatttttatttttattttttttatatatttattagctagacacgtatttagattaattgaaacatggtaatgcactaacttggtaacatgtattatgtatagttgaagaccagtcattctatagttgctgacatgtatacataacacctctttcaatgtatcaatgaaatagtgatatctattattttttatttttttattttaaaagggaaatttgaaaaactatactttaaaaactctaatattttatacctaaaccaatacatttcaaaataaaaaaaatatgacacttctatga

SEQ ID NO: 112005 - DNA, 4496 bp, Cannabis sativa
  modified_base (63)..(91): a, c, t, g, unknown or other
aaaacactaaccaaacatgacttgtttttaaaaacttcaaaaactaatttttgttctcatttnnnnnnnnnnnnnnnnnnnnnnnnnnnnnagaaaacaataccaaacatgctcgctcatcatatcttggtgcttttacgaagacaaataatcatccaatcataatatcattatccataaccaacccacatggtgggttggttgaatcaagagcaagcatgttacaatgccgaagagagaaacattttctaggaaatacctaaagatcataacatggtggaattcatgtgattttatgatctactttcaacgaaatgaaacagtctcccacagtgatttaagtgaaaacaatcttggtaattatcaaccagatgtcaagcgaagaagacttataattaccattcaagatttttactagcaggcacgggaaccagcttgactatttcgtataaagaagatttatcaaataacgtctttaactaccttacgcaaactgtctactacatgcagcttttcatacatttctgactcccaacaactttgtactaaggtagcaacataaataacattttctcttccgaaatgtacacagataatagcatatttattggcttctaccaaaaataaaatacggagttattgtcctttcacggcagaattttgttggggtacttcaccaacaacatattagtgacaaacttttatcaatgcagaaggaaacaaataacgtcaaagaacagtttgttaaaatttgaagataagatgaatggagttccatctcaaaaccaattgactatgggaggagtagcccattcatcttatatatcacaatatatttctacatattagcaatgcgggactaactcttatacagtttgttattaacccaagacaagctcctatcccaacactttcctctaatcaaaatcacccgaactccctttattgttctaaattcaaatatgaaaaataaaagaaatgtaaatggaattaaatgattttagaaaaagaaatttgttttttccttctttcgtcaaattattcattttactaccctttcttttttttcttttctttagctttacaaaactaattagctttgatacattgtacaaaatatggcaaaaattgtcttaaaaatgctaatctacacctatactattttgcatcgtaaatacatataatcaagtatatggttcatatataaatgtgccataaataaaacaagttatttctctctagtttagggaaaggaagaaaaagaaaagaattgtgcaattttagctttctattgaataaatacatatttttcacaaatgctttagttggcaaacatgatctcactttgtagtttgtaaaatggtaccttgttagcaatggtttagttggcaaacaaatatcactttttttatatattaattaaaataaaatatacaaatatatatatatatatatgaacatattatatattaaaaaatcaaaaaaaaaaagaaattattaaaaaaaatagtggggagtattgtaatcaatccactcttggtgggttaatataatccctggactaatctaattgataagactatactgtccaatctttccatatccaaaaataaaatgcaccaaacataccgaagcataaaatagtccaaaataattagtagcgaaattcttttatgttataaatgttatacacttatttttattttttggtgataatgcctaaagtttatttttcaataaagcctttcagcccaagtatcccgaccagcccggtccacgtggcggatgcggattggtcagcaatctgcagtcagacttaccaaccaacccgcatccgccatgtggattgggctggccggtatactcgggctagatagcagggttctttattttatatacaaacttgagatttcagttcaattttattgtcaaatattttattatcaaatgccaactagaattgctgaacacctgtatacatatgatactaaaattttgaatcgaatgaaaacatgtctgtatacactatggtaatataattcacatttaacggtaaaatttaattagcatccaaaatttacaagcgaaaatatttaaggggtattgccacctaaaaaaaaataaaatcaaagagttcaaagtgtataaaatttaaggtttcatcctcaattacccaaaaagaaaaagacttacagtattaaattaacagacaattattaaatcaaaaaaaaaattatagactaataactatcttccccaaaatagcttacacagaagggaaaagaattttccaggaagaaattgcaatttacagagatacaacaacaaagaaaggttcagataggctgaaaaagaaacgaagaaacatccagtttcagagttagtggaaaggaaaatctcaatctcggaaaaagggagaaatatatattgacgaaattagacctcgcaattcgcaaacagttgaagatttaagagttaggggcattttagtaattagggaagtcatttctgcaactctgtctgtttctgtaagcaaatctgagagtgctgttcttcatggcgttcatataaggatcaaaatagcaagagaaattgctaagaagaacgaatccaagtatcgttaataaaaaaattaaaacataaacaagagaacgtgtaacttaaagtctccgaatcaaatcgatctaacatataagcttaactaaatctaaaagatcccaagaaatggttcatccaattcagtcaaatcaatttttctaaactaaaatcacagttcgttctccaatatcacaggtagaaagagggattcgcagacttaatcgatcaaaatctaagattcaaaggacgatacattgaaggagaaaaaaaccagatttaccttcctgtaggtggtgccgtcttcctcaacggtccagccagcttcattgcagagagctttaaggacttcgttgttgtcacagtgcttgggtaacttatagtttccgtacatcctcagaccggagtagatcttcgcagcgatcgccctccgacgccgttccctccgcttgttgttctctctctccttccacgtcggcattctcgtgccggacgtcatgattgccctatctaatattttctaactggaattttcttgacaaccaaacaagttgatctagcgaaatcggaccggaaaagtcacggggttgtatggaccggatgttggcgggcggtttattttttaatataaatagagtgagtctttatattagagggcaagtggagtggttaatctttttaatcatatataaaactgagagagagtagttttggaaatgaatagaattgtagctaaattacatgtgaaacgttattttgcccaatttttttgtggaaatttactaaagttgccacttcatttttcgtttttcttttttttttttgtgttttggtttgcgcggaatcacggggattaacacgtgtttaggcttttcataaagaagaaccgagggctttcaaaaaaaaaaattaaataattaaaaaagaaccgaggtatgatgttgggtcgggtcgggtctggtcgacgggtggggtgttgcccttcgcagtagttgctcgcctggtggtcttctgattcacaatttcaaatccatgatcaagaaacagcaaattattattattatatctatatatatatatatggtgaaatacaaagacaaaaataaacgaggattctgattatatttttagtgtaatttgcgctattaatatttaagtttaacttttaattataaataaactaagaaacaaatcgcacttcgcgtgcggttgtagtttatttagtgaaattataaaattatatgaaattttaatatttttatataattttttaaatagtgagtagccattaaaaaatttattttttaactcttaataataaaagaaaaataaattaatattttagagtcttaatttttttaattattttaaactcaataaatgataattgttaattaatttaatagacatatatttttataaagttagttttcaaaatatatcttttgaataaattaaaatagattcaggatatgatagaattttttttttttgaaatgggatatgatagaattttagtaattagataaatgttatttttgtgtgattaaacttatctataaaaaatagaattaggaaaaaaaaaatatcacaattgagaaatctatatataggaaactcatcaaatttaaaatcgttctcattaccgtgtctcacttgtcactaaatttaaagttattgtcatcaccgtatctcatttgtaatcgtcactatcttgaaaaaaaaaatataacgattgataaatttatatatataaatagggtttatctactgtaggcctatttgtttctacctcatcacatggggaagtttttgggccaatgagaatgaattgaggggatggtacatgttatggtaaatacatctatgcacatgtgattttttttcagtttttttttttt

SEQ ID NO: 112006 - DNA, 6096 bp, Cannabis sativa
ttttatttgattaagtggctaattgcttaattttgtgttaaaagttttgatttaccgaaattagtataaatttccaattcaccccccctcttggaaacatatcttgggctaacagagagatgtaccaaatagtcccccttgtacattgcagatgctttactccagtcaagattcagatccatgttgcgccatacaactttggcatatttgcatccaaatagagcacgcccaatagactcccacgctgttttacaaactgaataggtggaatttgtgatgatcttacgcctcactaaagatgtagcaactggtagagcattgtggataaccctctaagcgaaaatcttgactttttgggggagttgcaaggactagaataacttccaccaagaagcttgagaattagaacttgagcaattattggcatccacatctgctatagatgttgcaagatagtacccagattgtaccgtgtaagtacctgaactgttatagtgccataaaagagcatttgaattcggaaagtagctaagaggcagtgtcaaaatgcgatccacatccaaaggggagaaccattgttgaaggagggggacatttcaaactcgttcatctgtaattaaacagctaaccattgtatctgcaggaccagaaaaatgaatgggagtgaaagtatcttgtccaggtatccaaggatcaagtgcagcccgaatctgtcttccttcaccaattttccaacgaaaacctttaatgagtaactcacgtccccaaatgattccttgccaagttaaagaggggctgtgaccatgaggagcatgtaagaaatcattgtgaggaaagtaacgacttttgagtaaatttctaagaagtgaatctggtttttccaacaacctccatgcttgcttcgccaacaatgcttgattaaattgttcaaaagatcgaaaacccattccaccatctattttagatttacacagtaaattccaagctctccaatgtattttcgatccattctcattcgacccccaccaaaaatttgccatcatagattctagttggttaccaacatagattggaagtcgaaagcagctcataatataagttggaatagcctaaaccactactttaagaagtacttcacgccccccagctgaaaagatcttctcgttccaattgtgcataaggcgccaaatcttctctttaatctcactaaaaaaatgttgtttgtctcggccagtgtaagatggaagacccaaatatttttcatggcattcacaaatgggcattgagagatttctgtggaaaaagacctgtgatgccaaggtggtatttagagagaaagacattaccgacttatcatgatttagaagttgccctgaggctcggtgatacatgtctaagactttctttatggcaagacatgaactttcattggcattatagaataggagactatcatcagcgaaaagcaagtgagaaatcggtgatgcatttcgagtgagcttgaaaccagtcaaccgtccctctttttcttcaaattgtaacaatctcgagaggccttcagaacagatgaggaacaaatgtggagacaaaggacagccttggcgcaagccccaagttagtgtcaaggatcctgaaacttctccattgacggtaaaagagaaagtatttgttgagagacaagtcataataaggctgatccattgttctgcaaagcccatttttctcataacttcttgaataaagtgccattcaactcgatcaaaggccttactcatgtccaacttaagagagaaaatccctttccttcctgtggttctattcttaatggcatggacaagttcgaaagccactaatatattgtcggtgatgagacggttaggcaagaaggcactttgagtttctaaaatgacatgtgggagaacaaccttaaatcttgcaacaagaaccttggtaatgagctttgaaatgacattacaaaggctgatcggttgataatctttcattttctgtggctttttaatttttggaatcaaggtgataatggtacggttcaatggagttgggtcagcaccgtcattgagaacacccagcacaaccttagaaactaaatcccctactaaatcccaatgttgttgatagaacatcgcaggcataccgtcaattccggggcttttatccagactcatactttttagcgcttcatcaaccttagctatagtaaaagtctttgttagatcatggttcatatcagccgtgaccatttcaggaatggtttcaagaacagaggacattgttgtactattcgtaggggaagcttgaaaaatgttctagaaatattcttcaattacagtgaccaaatcagaacgtgagtgcactgtgtgaccaacatcattgatgagaaattttattctgttgttagattgtcgagtagaagcttttgcatgaaagaattttgtgttacggtctcccgaattcatccattccacacgggatcgttgttgccaataaatctcctcttattctaataaatcatcaagaattgattcggaagttttgagttcttccatgatgttgtttgatcgaaccaaggtgttgttgagttcagtaacatgggtttgagtctcagcaatctttttcttcattcggtcatacttcccaatgtgccatttttgtaagttagtggcacaagcttcaagattattgagcacattttcaatcggattatgagaagattgatctaaccagcagtgagagatgatttctctactctcatcatcagctaaccatagcttttcaaaatggaaacgactcctccttttggactgctgcactgggtcgttttgtgttgcaatcacagcagcaatagctctgtggtcagagtggaagtagtccaaatgggaaacctgtgggagtccaaacacattgtcccaaagattattaatgaaacaccagtcgaggcgttcttttaaggttgtggcagcagtacaattttttatccaggtgaaagaatcaccatcatatggtgtgtcattcaagttacaatggtcaagacaagcacggaaatcattcattaaacgttcattttgctgtggaccaccttctttatcaatattggacagaatctcattgaagtcaccaattaccagccacggttggttagaaaaattatcagccagtctctccaagagggtccaagaagctattatttcatgtatagcaggggcgccataaaaagccgtaaagtgaaaggatggaccatcttcgaaagccataaaacaatcaaaaaaggtgtgaccgaaatgtgagagcttgacaatcacattatctttccataatagcattaaactaccacttaatccaattcttggggcctctaaaccattagcaaaatgaagactattacgaaaccgagtaaccaaattagaaccgagttttgtttccataagaaacaaaacatggggcgattgttgttgaacaagcaatcgtaaatgtctgaatgcgttcgggttccccaatccccgagcattccagcttaagattttcatggcggttggcggggttgcgtagtaacctccgctgttgaagtaaaagtggctgttgaatctgcattagcagaaacatcagtcacaaagtcatcacctcctgaagcagctgatgacgaaccattcagacctcgacttcgtttaagcattttccttacagacatagtttcacttggtctcttaggaatgcaatttggtgagatgttttcttagtagtataggctggtgtggaggggacatgagagtggagttggtaaatgactggagaagatgaatgaatgttgtgtgtatgtgggtaggtagcaaagacatttttagaactaggatgtgggaaagagttgtagtctagatcatgcgtatatatattggagaggtctgttgtggtatgggtggggttggtagtgggagtgacgtcactaagatgggttgtgtgagtgtagagaaaggggttgtttggttgattgagtgagtggttggagtagagatcgatggagtagtagaggcaatggatgaaagagtagtaacagaagtgtgagggtaggaagggggctgatttggagatggatagaatgtatttgtgctggtgtgagggggtcatttgttgtagtaagatggagccccataagagatggatttaatatggtgtttgttggtgagtacccggtatggtcatggtgtttgtttgtgaaaaaggtgaggttgaagactccccatgaagaagaactcttggctgaggttggccacgggtttgagttgtaggcagtgaggatgaaattgattttctagccaatctagtgagaagtggccaagcattggcttttgaaaaatctgtacgatatctgtcatagccactagttggaagctttgaacctttcatccatggcccatattgaaaatcatcatcattattgctgtccattcgttccatgaacgccacacttcgttcaaaaaggatggccaagacagccacattcaaagcaaaattcaggcaaccgctcatatcgaaagtcaatccaaaattcatcctttatttttagaagtttaatcattaggcccctcatgagtggtttagttactagaagtttgactcggatccgcaaaaaaggaccccagccctcattagtagaatcatcatgaacttccaaaaattctccaatgatattccctagcgcttcagcaaggaatcttgatttacttaggaaagttaaacgatatatttgcacccaaaaaggagtataaaccatattatcctttgtgacattttgcagagcatctggtgccaaaaggataattaagtagttttgaaagtgccatggttctttgctgagtactcgtcgtatatcaccctcgcatccaaagcaaatgtggaataaaccttcttcatttttgtattcagtgattgtgacagggtactgtccctgccagtgccccgaaatttgattgatgaagcccgatttgtagacattctgggtggttaggacccttgctacaagtccaaaagcaggctgggatgttgtcggatgcagagcagcaacgtcaggcagagtgagaattgaactttcctcatcagtgagggaaagagcggaatggatattttccataacagagtgcatagagatggggaaggtggtgggattgtggcagagagaagagatgtcggcagtggagaagaagaacaggaggaggcgggaacaattttcttcaaaggatatttaaaaaagtgggaaaacagttagggaaaaagagaaaaaacagttaaaaatacataacttccacagacccaaaaacgggcacttttagatatcctcaaataacttttaaatatgaaataatacaatattttttttagtaacttatgaaattagttagtttgttatgttttttttttaacaaaagaaatttttttatttaaaaacagagcaacaatacaacctaaggagtgcaacactcccagacccctaccaactcttaataacactagttatatacaattcatctttttcataataaactttttgtgaagtggagaattaagtttattatgtttcgataaaatttaaagttagattttttttctttctttttgatatgtatgggtgggatgtcgtaagctacaataaatttactaattatttttatttccttacttcagtttaacagtaaatacacgtcaatctcacaagggctattatcaatttattatttaaaaattagtgacaagaattagaaaaatggagttttgattatgagaataaaataacataaataaaaacaaaaatgaattaaatgtgatatcacgatatgagataaatagttatatgttatctccaccctcaacaatcattcttaacttctattaatgaatgtaattttagttttccaatcaaactatttattccgcagataaagctaaaacagttaaattatcccaatatccctattacatgtaatcaaggcgaaacactcaataattaactcttttacctaagtagtaaatttacgaaacatgcaatttatttaacttagataaaactttaaaatttatggagataga

SEQ ID NO: 112007 - DNA, 1994 bp, Cannabis sativa
taagaggctatattagggatcttaaatggccactatgaccaacaaattataactaaattaacttattcctattttgtgaactctgtgccaggaaattaaactagtaacacttatcattcaaaacaaactattataatatcaggtatgtaagctaatcttcttaaaactgaacactttgtattactattttatgtgattaattttaagtacttgtcaaataaatgtcaatggattttgtagctggtacaacaataagagatattaattttggggttttttacactacatactcaaattttcaatttttttttttgtagaattttttttcaaaaatactgtatttttttaaaaaaaaatactatgtattttttatactgtgtactgtgttaaattttcattgttgttccactatattttttagttattctactgttgtttttaattgtttcgttttgttgttttacagttgttttataaaaagacaatatttttgtaaaaaatttggtgtgacagtaaaattataaatatttgccaaaaatacaatatttttgtaaaaactccataattttacagaaaatgacattaagaaaaaagaactaaatcattccatttatatcagattaaaattccaatgaaggttttattaataaaagaattccaatgaaaggagaacatgttgactggcatgaaatgtttcatacaacatacaaaatttcctttttcatactcaaagtatatgatctacaaaattgtgtctacaaaactatgttagttctaagctttacaatcaatttaactgagaagtgagatcaatgaagatgtcttctctgcatggaattgtgagtcctcccattggatgatcatatccaaactcttcttcagccatgtttagcaactcttgaaatgcaggctcattaaggtacgaaagaggtactacatatctctttttctcgtcctctccaacatagattgcaatgtagccttttggaatcgagctagacttcaaagttgcttctttaagccccgaaagtgatcttcgaagagtcttcttgacattgagaataccgggcaatttaaacgccatgttatcagcaatcttcaatttctatctcaatttagttcttttttttctcacaaagctagtagttgtagagaagggagatgagagttgatgatttaggtgtgtggtaatgttgttgtatatatagatgaatggatttcttccaaattatctataggctttactaacaagtggtgtagattaagttagttgtaagggacataggcatttcaagttcacatgactctgtcttctgagtcatagttactattcttatcaagagaacaaactacaaagtcaggaggagcccacttgacacaagagaaacaccaaaaagaaaaaccattttaagaatagtttaatccacaatttttttttcttcctattagtggttgttgaggtatgaatattaaattccacttgtatgtaaagttcttctgagtttttctttctttttcatttttatttgtttgactctttagatatgggacataactaaacatcccatatgctaaagtttggagtcttgtttatccacattcaatcactaaccaaatagatgttgatgtaagtcaaatattaaaaatacaatgtgaaatattatcctttgaaaaccaaaccaaaatgcctccaagcatttcacctctttgttcaatggcttacttggttgattttttccctttttcctttctttttctacattcataaagatcagtagctcaatattggatattaaagattggaaaagacaaaacaaagtatatgtacttaagtagtctcaatcaaggagtacattattgattatagaagttaaagtaataaataaggactcaaatgttaaaaaataataggtaaatattattttagaccttgtattttgcaaaagttatcaattagatcctctgttttgttaaatgataaaatggaccttata

SEQ ID NO: 112008 - DNA, 2192 bp, Cannabis sativa
agagagagagagagagaaggaatggaagagagttaagagggaatttgatcaagtggcaactctcttctcatggtttatataaagagttagtttgtacttgtggtgtgtttagttggaaagtgatgctgatttggagaaccaacaaacagagaaagtagtcacgggtatttctgaacagagagaaaataagggaaacaatctaagccacaagagatgatgcactttttgcttattaaaaccttgtttataatgcactttccactttttagttgttcttacttccttggtcttgttagtattgcccgtgagtcttctctcttttctgtttgtgtgtgattttttctgaataaatattcctgtgaagatactagctagtactactatatatgtttatgtttcagcaattatatacttaataatataataagaatattacctacttcttttctttccatcatgacatctctcaacttaacttgatctcaaaaacaaatcacaatctgatcattttgaatggttgagattagcttggcctcttccatttccaagctactagtagttaatgatacgaagacaacataataataaaccaggcccacttgcagagaacaaacaaaaagaaccagaaattagcaacattgctgttctctcttaccatattctacttgtgtggggggaattttgctgatgtgaaagagatcctaccataaggattgattgttgttatatgccaaaatctactaaacaactatttgatgcaatttattatggtgtcctatttacagagatggctgtaatttgttattgcatcttaattatttatttaaatttaaaatattacagtgttatacattgcaacatttattaagtgtcggacaatatatattcataagaatttattgttcttctcttctattattataaataattcttgaaatattatatgttgcattccaaacagagtattctgtattagtgtcaaattgaggagcccgtcactccttttagggtacaatgaaaagtataaatttcaggaagatgaaaataaaaaatataaatatataaaaacaaaaatgataaatattaattgtatgggacaaaaataaatagttataattctataatttaatttcaatttagggtgttgggttcatcttttaaatccaaaaaaaaaaaaaaggtagaatttttgttttttacttttaaaaacaaaaatgtgtctcataattaattttataattaattttgtaaagtttcatatatatttattttattatagaagtaaggtgaaagaaagtgggttggaatcagggtttggggtttaggtccgggcaagaggttgggatcctgggaaggagtcaggcaattaaggtcggagtctagggttagagctggggttgaggccttgggtccgatacaaccccgagagtatgggtccgatccagagttcgggtccaatagctggtggtcaggtcaggtgccaagttctttaaaatttcaccaaaattctacttttttaaaattttaatatattttatttattttcgtaaaaaatatttaattcatttcaaacatataatattactatgtatatatatcctcatataaaaaagtaaaattaaaacctcgaacaattaataaaatatgtttagtaatgaattgtattctgtaaatatagagcataaatagtgaattttaaaaaagttttaaaatagagaaataatttaaagtatctgatttagcgtgttattggtttagttatttaaatattttaaatatgactttcttaatgtgctaatatgtatatatatatatatatattttgaaaaagaacaaaaatatttaattacaaggcacaaaacctaaaaggtcataaagcacaaagaagagctcaaaatcaaacaattatatttatatccatacggagtcccaaccaatggtaaggaatgagacctaactaaaacaagcgtcctctttgctaaaaatgagcaatagtatttaaagacctactactaggggtgttcgcggtgcgggtggtgcagtttttaaccattttttcaaaccaacccgcacatgcagtttttctaattctccaaacccgcaccgcgatactaaaaaaccgcaaaaactgcaccgcaaaaaatgatgcggtgcggtgcggtttctgcggtttgaactattacaattttttt

SEQ ID NO: 112009 - DNA, 3948 bp, Cannabis sativa
  modified_base (3916)..(3921): a, c, t, g, unknown or other
tttttttttctttttgaataaaatcattttttattttttaagggaatcatttttagctagaaatgattggaaaattctatttataaactatatagtttatacaattcaatcaacatacacaatcccatgatttccattggaatactaatctggaacttgcttcacataattagtgtgggaaagaacaaaataaaaaaataaaaaaaagaccataacaaattaaataatcttttaaattaaatagttagattttatatttggttctgtcaaatccaggaaagtggactttttcaaaacattaaataataataagagaaatctacacaattcgtataagtttttggcggcttcctggaaatgtatgtaaaaagagaaatgttaaaagataccttagcactcttttatgtgtcaatatcgctattggtccaattaaatattaggtctcatataatttaatataataacttttaaagagtatcgctagccaatcacaatacaacatgtcgagaaagtgctaaacatcactggtacctaatagcaatcttcatataaaaaatatccaaccaactacattatgtatggagttaatgaatcttacttaaacatccaactaccacctgtactcactactcccacttagtaattgcaacttataatgacacaaactcatgatgatcactacataatatgtatatgttctacttatagaagtattgccctcaatttattattttgtgcatgtccataaataagactgctatcattaattttctattataattttttagtaaatttttatactagaaaatacaagttaaaatattttttgttttaaatttttttataattgtatttgttatattgacatcgttttctttataaatttttgaaattttttgactagtttagaagttacgtggtttcataaattaaaaacttttttcactttttaaattagaaaacaacttttaagaactaataagatcgtttggctgaattttttaaaaactagaaaacagaaaatattaaaatatagttttcaattttttaaaataattttttttatctaacatattatattttacatttttgctcacatactcagatcttggacccagaccatggaacccggaccctggactccaaaccccaaacctgaatcgaaccccgacctagaccacggacacggaccccggctccgaacccagaccctggtctcagtcctgaacctagacctggacaccatatcttggacacggaccagaacaccagaccccgaacctccaaactcagacccggaccccgacctcagaccccagcttaactcagaccctgaaccccaaccccgattcagacctcgaaattggacccaaatgctagtctaggtctgggtctgggtctaggtttagggtctaggaccaagtccggagtctagatccggtctgggttcgggtccgggtccgaggtttggtccgggattggatgggttcatgtcatggtatggtgtagaatattgattttttagtaaaaaaatataaaaatagttttaagaaacctaggccaaacaccattaaatttttaaattgataaaaaaaaaattattttctattctcacttttgaaaaacacaatcctgaaaactaaaaactgaaaaacacaaccaaatagcctcttatagtgcaagaataggtttgaagttttagaacacacgtggtaaattagaatatcacgaactttgtccaagtactgtaaatgttgtatatatttttttaccaaaatatgtggcacttaaatgtggcaccacgtggcagaagggcccacccacacatgggaagactggttatcgctttgtagatccttgaaccgaattactaaagcaagagatgcatccagagggctcaaataaattagaagaataaccaaggcgctatgcaagtaagtaggcctccgaaaggtggtagcctcccaaatcaaatgccatcgggagttgattatgcgaacaacacgagttccaaggcagatcacttggcataggataattatcattagagagccataatgttcgaacatcccatttacctataaatataaagtgacggctaatcttgtactgtcataaagtgacagataaagatttgaagtttacatcaaaattctgggtaagtctacagaaggatgagtacaaaactgaaattcagtatagcttttcacccgcagactgatgcgcaatccaagagaacaattcatatattagaagatttgttacaagcttgtgttatggactttgagagttcatagaataagtattttcatttgatagaatttttttacaacaataactatcagagtacaataaagatggctccctatgagatgttgtatggtagaaaatttcgttccccaatttattaggacgagaccgaaaaaaggaaatatatgggtcctgagttaattcagctgaatagtgaggcaatagaaacgatcaaggctcgattgcttactttgcaaagcgatcaggaaagctatacggatcctaagcgtaaagacatagtttcaaatggcagaacatgttttcatacaagtctcaccaatgaagggtgtaaagcgccttgggaagaggggcaagtaagctctaggttcttagggccattcaagatactcgagaaggtcagtcaagtagtgtatcggctagccttgtcatcaatgttatttgttatgcataatgtatttcatattttaatattgagaaaatatgtgtcagacccaactcatgtcttgagttacaaaaccctagaactatagtcagatatgtcctatgaggaacaaccagtttatatcctcgataggaaggaaaaagtccttcaaaataagaccatagcgttggtcaagatactctggaggaacattaaggtggaggaagccacctgagaattagagtccagcatgagggctcaatattcgaagttgttcaggttagatttcgaggacgaaatccttttaacagggggataattgtaatgactgcatacatagaatatggattactagggtaattagtattaattatttatatttcataattatatgtaattattttttttattgtgggtaagaaataggcattaggattataatttatcaattctggagactttattaaactctaactgtattatgtatgacatatgtgaaaaaataatattttatgatttttgtttggtaacaataaaaatgtgacggtttggccaatatagtcacacggatttggtttcgaatctttattgagcggggtatatttatttgatatttagaatattgggcttagatgaggttgtggtatttgaccctcttacctctcattattgagataacttaagtggaaagtaaaagggcattttgggaatttttgcctaagaggttacatttgtcctttagtgaaattttaaacttatttggctgattattattattattattttcataaggataactaaagtttttttagtggataaacattaagaatttaatgaaaaaaaacctaaaaccttaacctcctctctctctctcccccttgaactaaagaaaactagaaatttaagctgccattttcaagttcttttcagcaaatgaattagaggaattgaaggagtaaagtgaaggtaagtcttagactcttcttcttgtgattttggaagctttaagtagggttcaaccatgcattttgagaaaatagttctgtctgaacctgaacctggatttgatttgggttgaatactgggttagtattgaattgtttaaagcttatttgaaaggaatttggactagaggtggtgtcgcctaaagagtgacgcgatactaaaattctacctatatggactagatgtggtgctgcctcttatgagaattgggagtattcnnnnnngagtccatgaattagaattttgcacat

SEQ ID NO: 112010 - DNA, 4479 bp, Cannabis sativa
gctgaggacacccccgaagagcggaagtgacctctctctttttcgataaaaataaataaatatatatagacaaaggtcacatgtccataagtgagtacctcccaaatatagtgagagccctcactcatggcttagttaaattgtggttacgaatctgtacaaaaaacaaacaaaagagagaaagctatttttaaaaaatattccatcctccaagtaaatcatagaattaaacctccttaaaccccttcaaaatatgtagccaaagagctccccaagatctaatcttatcctaaaggctatccgcatcaatatcttgtccttcgaaagtcctactcctttctagccacaacccccaaaggatagtcgatacaacagtccgtcacaacatctgttccttgcataaactaatggagagcatcataatttccaattccacattaacatccatgaaaagactttacttaggtgggattggtgattccatatgacatcagaaatattacaatcaatctttcattgtttcctctaaataagttaagggcaaatttgcacgaaaatattccaaagctatctcccttccaaactctacaattttctagcaaccgaggagggcatttggtattgtgggaggtggtatgtttgcctacggctaaagatggccttggtactggaaacattagagacaaaaacaaagcctttcttatgaaatggttgtgacgatttccctaggaaactaattctctatggtgtaaagttattaaaagtaaatacagtcttcatgaaaatgggtgagacatgaaaaagggaaatcttctagatgcccttggagaagtattgcagaaatttaaatgataaatattggcaactgccaactagtttaaaatcgaagatgagaagttggtatggttttgagaaggaactcggtgaggggataaaaattttagaattgattccctagtctgacactaactagacttttggtgaagagtaactcttgcattgctctatccgtgtgttaagtgaagggtaggtgtggaatgggattttcacttcaaccgcaacctaagtgagagagaagttcctcatcgtattgagttaattcatagggctgaaaaatcattacttttgctcagttttggaagatagaagaatatggttggggattcaattgaggtattttcatgtaagccagccatcaaaatgttggtaggagatgtcactagttattcgttcttataggctaaagtgatatggaagggtcttgtgccatcaaaggtttgtgtcaatgtacgactgctatgctaaatcgcttaagtgttcatgatattcttcaaagaaggaagcctcatgcttcacactctctcggtagttgtgttttatgcaggaacagtggggaagattcttcgtgtatttttctacattgcgcttttactatgaagatatggtcaagattattcaagtccttcaacaaccattgatgcatgcctaatagttgtgagaagctcatttttcagctcgtgttagagactggagctaaatattgttatggaggacatggattatgactatctggtgggtgatctggttggaaaaatataaatgactcttcgaagggatagaagagagcgcagaagctttatggtataaagtgaggtattcggtagctattggctgtccaatatgaaagagtttagagatgtgtgtttctctagatttatgtagagagtagccagttttattgtaatgttcgtgtttcttgcattttgttaacgtttttcatatgttttattggtaagatggaaatacaatcttcgtactccttatatttgtattattctttccattaatacaaatataataaaaaacaaaaaagttcattgaagtatcacttaccacactctcagaattatgacggcacctcccagcacaaaagtcgaagacatttgcataagttcctgtgaataccattatatgcatcacgtgttatttgaagagagattccaatttagaaaaagaaactttgattttgactaaatcttatccctatatatctagttccaaatgaacaatttccggagcccattaaaagtagctgcttaagttcgtaaaattcatattacaaaaaaaaatgttttgtttcccactcaacagaattacaaaagaattggtccctagtaaatggtctaaatggtagcaagctatataaaggaaccttgagaaataatctattttgtggaggatatgtattataaatttaaacctgcagtagctggctttgcaatcttcatctttatgatactgtgcttcatcgtctacaaaataaatagtataaatacaatcaactgtgcagatgactaataaaaaatagaaagaacgttaaagcaaacagttagaaagagacgaaaaatggcatatttaaaaattacctttgatggatttaagcagcaagacacacaatattcataagaattgcaacactgtgaaagaaggttgcatccactgcaaccaggaaaacaaaaatgtgtaattttgtccacttttttgcatatagcagtaaacatttcatcaatccatttgagagaactcactgacaagaaaatttgtctcctatttcaggacagcagcgagattctgaatccactgatagagcatcacaaacatagcctacatcgcaattagcaaacactgacaatgaaacaaagcaatacagaagtgtagacttcatgtgtctcaattgctaaaaagaaactagagagataagtagcattatagcaacccacttcagtgcgagtattcttaaagcgaattctagccaaaaaaaaaagaaagaaagaagttaaacagcatgataaactagtaaagcaggaagaaccattcagatactagctgtagcataaaaaaaacaatttatatcttcaatcttccacattcttcatcgcataaatgagtatatgcattaaaaatcggtatttctaagctctttgcatgaacaaattagcaactaataagtgtaacctaataagcttaaccatacactttaaagcagccaatgtgcctgcagcatgaaatagacattttgctcaatgcattaattgaaattttgtgcaattactgagagtgttctgcaatgtcttcttcttgtccatacagaaactaaatcatcttccaacgaaaatacacacaagcactcttatgcaaataaatgactaaaaaatacaaaacatctacatcatagtaaaggttaaggtaagattaacaaaaaaaggcattaaaagcttgaataaaagaagggaaaattcttgaccattgtcatcggacagtgagtatcttccttgaaccgtattcctgcaaatacgttttcctaatccaatatccttcctgtaataacagaattgaaacaatgggtatggtcacccattttgatcatatttgcattataaaactaatatcacagagaagtatattacaaatttcaagaataaagaacgaaagatgatcattcaaataaacccgttttcttgctccaagaaccgaatctaattacagacacaaaatccatggaaaactgaaatttgcaaaattaaaaaactaacagcagattgggttacctgattgctgaggttcttaatggaaaatgaaagatgagtaagttgaggattaggaaggaccaactaagatggggcgtcgacattctcttcaaaagaacaacaaatgaaagtgaaatcagaattcgagttggaggttcgtcaaaaacaaaatatcgagcaggaactgtgccaccaaacctattatgtttgtatttttacaaattccacatcaaaacctccctagcaacaagtaaaacaacacgcatataagaattactagagtaccggatcaaccaacgtagcaatcaaaatttatatagaacccacttaaaaactatgagaacaaaccaaattgtaaattaaaaaataatatataaaataattccttaaatttttattagcaaaataataaaaatatttgacaaatggtcgttttgacaaatttctcactttcaaatcatgcaacccaaatttttttttcttttttttgctaaaaatacttctccaactattcttaacattaagatcttttacttaattggttttgagccaaatatgaaattttttaaatttttcaaaagtagagattttttatgcatgggtgaagatgagcatatctagaataatcatcaatgaaagagataaaatattcataaccatcgtgattttccaattcaaaagtccacaaacatctgaatgtaccatctcaagtggtttaatagcacgattttcctttacaaaaaagatacgtttaatagtttgccttctagacatgactcgtagactggtaactcacaaagagacatgtttttcaaaaaaaaccacctttagttagtctacgaattctgatatagcaaataggggtgttcattggactacatccaatattttt

SEQ ID NO: 112011 - DNA, 6121 bp, Cannabis sativa
agggtcagtcctcaatccaggaagcatctaaagtgacgtactcgtgtataagagtcatcattttgtaggtgttagggtacagtagagacttgaagtgggggcattacaagtggtatcaaagccttgacccaaccaatagtgtggtcgacgaggacgtcagaccccgtaaggggggtgattacgacagtcagtagtcttgtgacccgttaggagaaacactaggtaagctatgcaatcccacaccgcttggaaaatgtcaagtgtgatgattctgagattatgtaggtatgggactatacagttgaagaagaattaattggatttattagtactaactatatcaacaaggtgcatcttgttttctagtagcccatcacgaaagaactcgacagttaagcgtgtttaacctgtgataatttcagaatgggtgatctcctgtgatgtgcgagtaaggacaaagtacgcgagaaatactcgtgttggtgtgtagggccagtcatcaatccgcgaagcatccagagtgacatacttgtgtataagagccatcattctgtggatgttaaggcctaatagagacttgaagtaggggcattaccattattaacataattaaattaattattccataaaatcatcattaaagtctgaggaaaaaatatcttgatttgcattattaaagttaggcggcggttgtggcggtgaatgaacatataattaatttgatgataagccaagtgttaattctcctgattgagcttaattgagtattggagtagtgaaatttttttactcctacgaagaactcctaagcccaccaaatatcccaaaattagcaaagtttgaagagagcagaggagactggaaaggggttccatataagaactgactttgattttatgagtgctgctattgtggagaagatcgatgttgttgtggtggaggagcggtataactctgagaagacgaaccaccaggattttgtgactaaccatacatttggataaatttttcaaaccacgagttatataaattggcacattattcatgtatcacactacttcctaatgtgtcacgtatagtcgtaacatatctgtcacagtgttctatatttcattggggggaaaggaatgtgtagctaattgactttaactagtttatttttttcctttctctttgatcctataacacacgtctatttgatagtcaggtctttccccgagtactttttcaagtacctcaaattgataactaccatcagatttcgtaccacatatatcactctgagattatctttcaagtaccttgaattaaatattaatgtgagattataatattatattatcaattatgtgttattatatgtgaataattgagtttaagttttcatttatttgatagcaaaaatttcgtaattttgacccagtaaggataaaattgtaattttattatactaggccctgataaactacattatcatgtagtgtgtttgttttattgtgttagaggtaatttttgacaagttagtgtgctatagtcacatcaggtattttagctcggactaagtttgggatccaaatttcaagtcaaatgtgtatggaaattaaatgatgttatatgatattacatgtgtatgggttgtattgaaatgatatttatgcccttagtgctctttttggagtgatttttaatgttgagggtaaattggtcttttggccatattatagtgaaaaggataagtacattattatttgttaaaattgatgaaaaatcattttcagttaagtttgaagcttctcactgacctcctcctctccttctctctcttttttattttgtggttttgaaacttagtgaattgaagcaagtttgtgttgaattttggagtattgttgttcgattgagcttagaaaccagtttgaggtaacaatttctttattttttctaaaaattaaatcttagggtttcgagtttgtgtgttgatgaattagttttgaggtttaattagtgttgttatgttcttaggagttgagatattgagtttgagctattctttttcttaagctttggtttgtaaatattgtggacattgtcccacatggaataaatgttagagaatcgagtcatatataagaacatgggctactccactcattaccaattagttttgagatggaaccttatgattctcaacatggtatgagagtcatatcctttgcaggcaagtgatcctatccgatccacaccaatacagatagtgaccatgtccactctaatacggtttaagattggtgagcaaaaaatagccaccatcttgagggagaatattgtggatattatatcccacatgaaataaatggtggagaattgagccatatataagaacataggctactccactcattaccaattggttttgagatagaacctcatgattctcaatagtaaaaattatatagttgttgagcttagttttgtgcaaattcagcatggattatattattgtgagagatgttatgtgcatgcatatacattgttttgggcttagaaatcgaaatgcgtaataaatgttaagttttggattgtttggagcattttcggggcccttaaaacatgatttttttttggattttttgaacccatgcgtcgtggccctattcatgggcaccgcgtcctcttaagtgaaaaataaagcatttgctttttaccaggcacgttgcggcactcctgtggtgcaaattcccccagttttttcccgaacattttgtgagcttgtgtttgctataatttttgacttcgaactccgttttcgaatgttcataataataaaaaaaaaactaaaaaataatgacgaattaacctcacaataatggtaaaccatcaactataaaacaaataaaaaaaaacaatcttatgacaactaagaacaaaatataaaactttcaaaaaaaagggtctaaagcagggacagaccatgttgtattaatgtggggactatagcccccattaacaaaaatattgtattttaaaaaattaaatgtaattttttaaatttaataattatagatcaaaatcgtagaaaagcctccatgaaattaaataaatctagtaagaatgattataatataagtataaatatttttgaatgataaataagccttcacaaagtaaaaactctgggtctgtcactggtctaaagagcatatttttataaaaaaataaaataaaataaaacgtaaaatatttaaaaaaaattacgtgtcaaagtatttttataatttttaaatttttgataatttcaaaaatatattcattcacacactttcaaacaaaaaagaaaaagaaagagataaattggtatatacatatgctaatgctatggtggctctctatgtttcttgatgagtaattagttttatttggtatgacttggcttggcatataaattgagtgcatgcaacatggacatgtggtttgtataaatacttattagtaatcaatgcatatggtcttctttctcgatggatatagaatcttgaagatacattaaaaatagagttgggaaaattttctaggctatatatattttgatcaaattggaaagcaaattcgattattttattaaaatttttgcgtacttcatatctttctaaatacttgtgcaaagattataacttgactaagtacatgtattcaatactattgtctctaaccaactaaataattaaaaagctacactaagtccataaaaggaccaaattagtcaatataaggccgagtaagatttctataaataattacaaataaaaaaatggttcaatttgatatatataaaaaagaatttgtctctcacccttctaatgcaccaaaagacgacccttctacctaccctagaatattatcttcatatatatgtaaacattaatttgctcaaaattttgaccccaaaacaatataattaagtttcttctatactatcttccattaataattaatatggaaacatttaaatttaatttgggtaatcaaaatttgcacgtatgaacaagaagaaccttttttccaaactttgctttttgatacgtaattttaaatttcaaaggagttgagtaagttccaagttattattataaagatataagttacacgttttaagattgtgaaatgcacttacttacaaaaaaatatatatgttaattattcactaaaccaagccaaagcaattaatgaaattcttttgcttttcatttttagctaagagaagaatatatatgttatatttcttagacacaaggaataaaggtttatcaaatctttggaataatattaccttacaccccattttcatttgatctttgtcttaaaaacccaaaaaagcaaaccctatctatcttatctaaatgataatgatgataatgatgatgacatttttatttagatgaaaatttctttcttagttaaatccaattgaaatattaaaacaagtccactctcacacgggtcatgagtcactactactcctaatatactagaactacgtacccttcccatccaccaagaggcagtacaattacaaaccccacccctcaaaaccaaaagggcccattcagggcccatttaaacccacgtgccacctcgtgccacgtgtgggcccattaacgcttccaggtagccacgtcacgagcccatgacggtccgaataaaccctgcgagtgacttggtatatgccgcaacgtgtcaataagcctagtcggatcttatcacgcatataccagaagagtcttctaattgtcaaactttttctcttgaccaattacaaaatagtaattttaatttttaaaataacaaatataaattaaaagtaatttaaaaaaacgaatattctcaaataaattcctttaaaaccagtttcctttatttatttataaagcttctaacaacattccagtactgggtggtagctagcttcatctcaaaacccattttcgaaacaaactcgaatatttattattataaatacgattaaccgttttcaaaacacaatcaaattattctcttctttcttttcgttttcaaaaatggctggtttcgtacgtacaaagcgactcagtgacccgctcgacgcgcgagttagagatcgactcgtcgggagagattccggctccgaccacggctattccagcagcggaagcgagcactctgccgatgagtctccctgtttatcagaactcgttcattgttttctcgaggaagacgagtccgagtcaactcggtctggttttgagtactacgattccgagtcggagcaagtcgaatcggtatctgatcgagtcgatgcgaccgagtgtattctcaggtctaccgtagctaacaatgccgattcgtacaggaaacttcttcaggctcatgtttcccaaggcgttgaagctttttctcacatgagatctaacgaggtaatgttcaggcgaaaagtcatgtcgttattacgtgatttggggcacaatgccgcgatctgcaagactaagtgggattcctccggtggaatcacaggcggaagctacgaatacatcgatgccgtactaaaacctagctcctggtcaggaacatcagccggagaaactcgccgctacataatcgatctagacttcgcagccgagttcgagatcgctcgtccttcggcacagtacacgaggcttttacagtctcttccgagagtattcatcggcaatggcgacgaattgaaacggatcgttagaacaatgtgcgacgcagccaaaagatcgttaaaaagcacagaactctcaatacctccgtggagaaagaatcgttacatgcagaacaaatggttcggtccgtacagacggacggtgaatcaattaccggaacaaatatccccgtcggtgacttctccggcaccgactcccgtcgtgaaatgccgttgggtgggtttcgataacgccgtctctgacggccacgtcaacattgtccgaacaagatgataaggattgcaataatcgcaattaatatatataatatatttttaatattaaaaataaaatagattaattaaactaatctcatgagatattgctctttaatcttttattattttaattaaaaaaaa

SEQ ID NO: 112012 - DNA, 3630 bp, Cannabis sativa
  modified_base (3394)..(3394): a, c, t, g, unknown or other
cattttgtacttttattatttttactacaaaatttaattatgctcatcctaaaattaaattctaaatccgtcacgacctcatataacttataattttgtatgttctttatttatgtttgtttttatcttttcttgataagttgtataccccttattgtgtattctttactttatattcatttttattttttgtatttaaggtgtttaaacacgtcgggttaacgttcaaatagaatattggtataaatagtttcataaatggataaaaattaattatttaatttaaataattaagtggataatatcttaaaaatggaatttcataaaggagagatgctaaagtgttgtctatcactactacaagatcttatattgttcgtaatgttattatacaaaatatattttcttaaatggtaataaatcacaactctttgaccaagagttccacaccatgttcgggctcaatgactaactttatggctggtttgtggacataattaggagaaagagtgaaggagaacttagatagaatgagagctaagagaatcttgagctcaaccatggccaagttttgccccagacagattcggggtccgactccaaatggcatgtaaaggtggggaagtttgcaagcctctctgattcctttcgagaatctttccgggttaaactcaaaagaatcgggtccccatatttgtgggtttgtatgattagttaaaaccatagtccatagattcacacctttaggaacaaatatgttaccaattttcatgtccttgaaagcctctcttgacaccactgatacaggcgggtacagtctcaatgtctcatgaatcaccattgttagctgtatataaatgaaaatattattattatgtatcaaaaaaataatatattgtacttttaccaattaacccatttgaattacctgtttcattttacggagcatatcgaaattgggatcttggccacagcagatgtcgagtacctcagaacgagctcgttgttgccattgaggattcatggccaacaacatgagacaccacgtggcagctacggcagttgtctcatagccagccaagtatatattcttgcagttatccacgatgaattgatcagttgcttctttactaagatcactctctttagctccctctagtaccatttggagtagatccttctcatatgcagcttccattctctttttcaccacttttagaatcaaatctttcacctctttttctagtgcccaagcctctctgttgtttttagtaggtgcatacctatttcatcaccaacaaacaaatatacaaacatatttacataaataatcaattaatttataaaatcaacaatgcccaatcaagagatcttttcaatacctagcaccaggtattcctgtagccaaacactttctggacataacttcttggagctttcttaacttgatgaatatctcttgtcctttagagaaattgctcccaaaacaagcttttgaaataacatctgcagaaaaattcctcatatcctcatcaatttttatgttcacaacctttcctccactactctctttctcaatcctactcttccatgagtcaatcaatgtgtttgttgactctgtaatcatattcaccattccctattacaaaaaacccatttactataaagtcaacaatcaacataacttttttagagtacaaacataataattgtaccaattctttttctttctcataccttaactttgtccatatacaattctggagcaaggattttcctctgatgagcccaaacggtgttgtttgaggttagaataccttttccaagtaaagggccccgttccttgtgttgataacttggctttcccaagtccaaagaggtacatgttgttaattctctcacggcttcactctcattcacatacaatatttgtatgttaccaagtgcaaacacgaacacatctcctgtaattattttcaagtacaataaatatataactttgataaattatgatatgtaagtagttttttgtaacaataaatatactatatgagtttgataaatttaccaaatttgtttctccactcatcaaaaaatggaaagatgaaagaagcgagattgtgagtctgggtgagttcactggccgagttggactgagccttcttgatctctcttacgtttccgagcaaaaaattggagggtggtccatgaatcccttggtctttcaaaatggtccttattctctttggtttcagaatcaaaacattgtacaaacgaacaaccaagacaaaaataccaagaagaacaatggtcaagagtgccttcacaatctccatagctcaaagctagatttttttctttgtcaaaaactagaacaaaattaaagttcaaatggtaagtggtggtgttgtgtgtctcactatataaaggggaagacaacacccctgccctcaaacatttggacatttcttagaaaaagaagttgttagtgtgttactaagtgtctaatctttactagcttttggagtcaaatacaaacgtggctttacataaagtttaattagtagcttctccatttttcgtcaaatggaattgtaccaaatttattgaaaccaattaactcaatcttttaattgcctggaaataactaatattctatgtttttgtatactgagtcttttctgtaaacacaacatactttttagagttagagagtaaacataaacattaccaggaaggtaattgtgtcacctttattaatgtattgtcattttctgtatataaacgcataactattcttgagtcaatcggtcatggtcagttaagtgctttttggtcttgagatactgtatatacctcgtgaaaacacacacttcaatcttcatcaaatcaaataatgtgtaacacaagccacaagggtgtcgattatattacatgattatcatcatttttcttttaatgtttgaatatttcttacacgtttggtaactaatttctgattttattttattttttggaataagacttctttatttttgttttggacagtttagttaatacggggtcaggcattgattatattgacactctaaattttattattttatttctttcttttcaaatgaataataaattaatgacaaaacaataacatgttcaaacaatatttattcataaaaaagtaaattaaactatacttcgtcttcaatttattcacagttaaaatacaatacaaatcaaactatatttgcttaattttatttaaattttattaatttgttttattaaaaaatcatatattttgggttttttttttcagttttaaccaaaaaaaataataatattacaaaaatactttcagctagccaaataaacaaatatacaacccaaatanaaaaaattacacaaataccacttatacacaccttcaactcacgatccatgcttcctgggcaactatcgtgcagccttcgtgcaactacgcagcaacccaacgcaaccgaaacgaaaattcaatgagaaaggaaaccaccattaattccgggaatttcacctgagaagacgaccagaatcaatcaaaacagggacgacttccaattcataaaaaaggtgtagaaaaactactacgaa

SEQ ID NO: 112013 - DNA, 7815 bp, Cannabis sativa
ttttattttttatttttttgctaagaatgaaaccttggttaaacgtaaagctctcatttttactctgtttttttgggtgttctttacgtttattcttcagatgggtctttggtatatgatgatattttgtgtgatttagtttctttttctttttctttttttcattgggtatttagtgctatcataatcagtacttagtagcaccttactttctcgaacggctaaacaaaaatctttgatttgaaattctctttcacaaattccttttatgtaaagatgaatgtagaatggtgaaaaatgcaaagatagttccttttatgtgaatatgagtatagaattgtgagaaaaatgtaaagatggttccttttatgtgaatatgagtatagaattgtgagaaaaatataaagatggttccttttatgtgaagatgagtataaaattgtgtaaattgtaaagatgattccttttatgtgtttaagaacgttgagaaaggagaagttttaagattaggatttttcataactgaatagaggagtgcaccttttttttttgtcgtaaaacagccttactgaaaagagatttgtcaaatgaaactcaggctaaatatctgttttactctctaatttgatcaatagttgaaaggtgtagaattgttttcttattttggtgtcactctctaatcatgaagctattctctagttagtggctttgatcagttgctcagtgtctacaaccatgaccttgtttttattggttttatttagaaaacaagatgctggaaatgacagaagaagtatgtccaatggaggacgctcttcttgcacttttagataacttagttggcccagtgctgccagctagatttattacggataaccctcctttatctcatcagcaagttgttgcaaaacaggtactttatcttctattttgttatatccttaaatctgatatgttaatgtttttttccatgtttacatagacattattaaatggatttcttgcattcttcagaattaactttgatacagtaatggagatagttagaagaaatgtgtgtttatttaaatatgaaatctttatttaaataagaaatgtgtgtctttatagtgtcacaggtgcagataacatttcttctcggtcacggtctttgatagttttcaaataaataggggttttatattgttatcatctggtggcatggcatggttatgaagagaacgcatgtaatttgtgtatcaatttcttatgaaattaactttacattatcagtgataatctttaatttttttggtgctcacaaactcccatttgtaaggtgtgtttttttgactatccatttctaaaacacggaaatcctttaaatatgacattgtttgtcctgcactcctgtagtgtctgttcctagaagcacttaataaacaattatatacagatctttgctcaggcaatagtaaattcagtgcacaacctaaagcaatttgagtcatgttatgtctgatattattctgctttgatgactaattttatctctaattcaactatgatgatccttaagttttagagtgttcaagttatgcaatcaattctaaccactgaaccagctttatattaagtttgagatattatatataaccattttcacatctagaattctgtatattaacaatttcttaagtgtgaatatgtctgatctgtaaacaaaaatttcaatgtatccactggcaaggaaaatttcatccatttactcacatgcacaagcataatgcattgaatgttagtcatgtaattgcttgttttgtcttgatttatgttaggtacatgctgtagtgttattgtacaactactaccatcgaaaaaaatgcccaaagctagattttcttggtttcgaatcattttgcaagttggctgtggttttaaaaccagcattattggtgcatttcaaactgacacaaatgaaaaactatatgaagttagatgatctggagaaccatctatcaccaacagagaagtcaattatgcaagcctgtgatatatctacagcattagatgcatcaagaaaagaccccattgttgaaggatggccaattactaaagttgcagtatttttgattgacttgaagaaagagaattgtttgttactagatagtgtgactcaaggggtttattcagtgattgaaaaagatgtagaggcctcaaaccaaagtttaaggagtacaatggggaaatctcaaacatgtaaaaggaacaaagtaattcaaaaaattccaaaagttgaacccgggactaattcaactgattttcagcaacttgcttatttagctgtcttggaagctacaggtatgtagctttattatataccatattattcaagtttgcactagctacaagtatgctctcttttataaaaatgacaactttggttcttttgttgattaagtagtatttgtacaacaagaagagttgtattgtattttgtagcaaaacagtggcctccttttttaaagcttacactgataattgagaattaagctggttttctagaagataattaatgagataaatctcaagtcttgaccatcacggacacagatacatttattctaagatatgatctactgaatgtttttgctcttccaatatttctgtatctttaaatcttctaaaaaataagttagattgctcatcgtaaatgattctcatacatgctataggtgttaatcagacagatctgacaattttggaagaccatgttgtgtattctgatagtaaagaaaaggcagcggtgcagttttacatcatgcaagccaaagcagtcacagaaaatattattcaatttcccatcaaagatgtcattgacaggtttttatgtcaaacaaccatttctgttcttttattttctgcgtaccaacctattaaactgcttttgctagccacttcagtaacacacctttgataatgtgtatgtgactaatcacttgattgtttaactttttatattaccttttctgaattccctttaacgctttgttgatgatgaggttctaccgttatctaaggatggtaagcatgtctgctttgctgatgctctttatcctttgctatttgagtagtctgcagggtcctttggttagaaagatctctggaaattggacagttaccccagttgttgaatatttccatcttcttccttatggtgggattttattaaattggatgaaaaggtgagctcatctaggctgtcctgaatatgcttttttgcggttctaaaagtaggtttcactagagtttacattaattttctctttaatatttcatatttgctgttaccaaggcccttaataacaaaaatttggcttagcatcttaattaatgtctaaagatacaacacatttatagaattttaagcatctcctatatgtttatgcttccctgaaataacttaaaccatcccataaacaaggaaaactgcaatttgattgcttcattttttcaaaagttatgatgtggtgatgtcattggtcatttgtgtaaagtgtaaactaatagctatgaatcatctatcaaattgtcaacatctaggattgtattttcttttttacttgccgtgattttttcttctttacaaacatgatacaagaggagctacttgatctaaaccatgatgtgcaaacatgctgtatcgtctacgattacattgggggattgaacattttgaatcacatgtccccccttttaagaaatcgactcgtacaatggcttaaatgttatttctcatgcttgttattttcttcattgagatattttgtttgggtttacgctctatcttattcatttatggtagtagtaagatatttctgtatagaacagtctaccaacttcctaaaagtcgagctgtacaatcaaacattcccaccagtcttgatttagatcagacaagaaattaggctgattggtttttgtttcatttaagccacaagtcttgcaaattttacttttgaatatttttgttcccaatattatcccttgtatgtgcttaacggagatatgtttgaatagtttacatgattccaggcagggaaaaagccctgaaaggacgacaattccaaggacattggcagaaaataaaattcaagttaattttcatgctggtggcataagagaagttaatagccacacgacaactgcaactgatctcaaatcaccaaaggatgaagatgctattggcttttccaatgcttctaacgagcctggtatcaaggtaagcttcttttggctacctattacatttatttatttattctttatgtacgtatgactcatccagttcttaagttcaccaagtctggattacaaagctaccgtctttggccattgtttggacttagaatttttctgattgaaggaagaaaatgtgaggaaatacattgaacttttgagaatcaaagttaaggtaaggaaaattagttgacaagcaagattttattgatggtagatcaacatgacaatgagagtcaatgagataacatttatattttctttattttaaaaagcaaaaaataattatgttctacaatcaatcttcttgggactttgcatctcatttagatctggttacagtttcattttctgttgtatgttgctttaacactacagttttcatacacttatttatctttccctctttcatgatttccccctttaaattcattttgacttcttgggctggcagtttgagatggacttaacaacaaagtcaaacagttctgactgtgcaattgagaaggcttcttttggaaatagaatcagtgacatctcaagcggtcaaaatggaattggttgccgtgcaatggttgcttatcattccaacggcatatcagataaaggaggaaattgttatcatacattggccacttatcaatcttcttctcagcatcttgagaagatacaaagtgtcatggcttcgaaacacaacttaatgaccgagactgccttaaaacttctcagaagtagaagaaataagctggtatgtttttgtttatgacatgtgagtatgctggacaagtaactaaaacgtttttagagatataatgtatattaggctgcctctgttttgtacttggtatttggaactggcagtacttcttatctcaatctcaagcctcagattatccttctttcaacatgaacccttgcagttttttggtttatattggtgatttcataaggtgcttaatctatttggtagtcttttttatatgtgcttttagctttttccctgctgtgtgtcagattctctctctccctccatttttgcatgtgttatagaattcattttcttgtttatgcagtctttgaagttgcgggatatagaggatgagattgctgagtatgatagaaaaatggagacaattataaatggtacactttttcaagtttgatttcgcgcccttcactaaaaccattttgtaggttttaatggtgcctaaatttgctttatggttggatattctcaccatcaagtttgtctattctgctctactgtttaatgcttaaagtatggaacacagtatataatggtgtgataaaatagaaaaacaaataaaattgagtaaggattgctgagattttctcttagaagaatcgaataatccttgagaatgctttcattgtttttcatacatcggtagtattatctcatctgtaagacataataacaaataaatagatatatagagttattccaatgtcaaataaacaaataaaataagaaaacaagtaagcataaaagagagcttgtccatccttctgctagtcacagggtgttagaaatatcatgtgcttattatatacttgttcttgctctacaagcaggtggtgaagatgaccttcagctggtgttagaatccctcattgaaggtggtaatgaggaaagccaacgaagtgctgctgaccatgtaaggactaatcaacgggttgaagacacgttagacaacaagagaaagaggttgtcagaagccattcttagcacacgaaatgctcgccaggtaaatatttgttcactatccaattaacgaagcttttcttaggaaacaaaatacttgaagctttaaatggatattttaatgctctctgtggcagttgaaatgttttcttagtgtgactgggtttcattttagataagcatcatggtttttcccaatcattgaatttaaagcctctcctcgatccattttattcaacttttctggtgtttgttaccaatccagttcttttttttttccctttatttatgttttgttgattattctaatcagaatagaattgacaggaattggatgatatttgtgatgcaaacaattggatattacccatctaccacataaacccagcccaaggtatgattctgcaccctttttatgtattgaccaaacagatacgttggccataattgcttctgacgtttactgctatttgatcatttattacccagttctcattttcacacgtacaatttttgaaataagcataaaaaactactattagaacttaatctaactatacagtgtatttcccaaatccctgcataaaatgacttaagtcctcaaaatatgagaaaaagttgatgaaatattttattttgtgaattcagaacatcttccacacataaaaacatgtgatttgatagtgtttagcttcagagtttttatggatatcatttgaacttggaatagttcttagtaggcaataactttttgcacttgcttacacttgaatggaacatggcaggacaagaatataatggaaaaatgaaaccaaattattagttgtaatttcaaattcaaaatcttgacgaagatcaatatgttctgattatttgtgtaatgggcatggacacgtataattatccaaaatatgtttttttaaaagattatcatacattgttggtaagcttaattttggtaattgttttttcaatgaaggtggatacatagccaatgtaagcatacaaggagcaggtttcgaatgctcaagtgagggagaggtgcattcaagtcgcggggaagcacgagaatcggctgctgcactcatcttggtgaagttgcgcatgatagcaactcggtctctagataattagtaggttacagttggtgggggatgctacaatcaaatgcaaactggattttgtgcaaatgaaaagttcatgaaaatattttaacgtggccctgcagctactgctacagctacagatacttttttttaccaaggaaaagagaagtattaatacaatctcaagggaacacagacttttagttttttttacagatgtctttatctatgtgtcatgatgatcttaatatttcatcatgcttttacctcagatttacaattcttgaattcacatcacaattttggaagttgaagttgaaggagaatctaatttgtacaagacgaataaaccgctaaaaccaaactgaatataagctcacattaacccgtcaatttgggatctgattcgggattttccttgggaggtatcgggaaggaattggaatggattaatatcgatttacacagatatgtttatacaggtacagaagaaaagattttctattgattcaaatgctgtttctttttcttttcttaggaacacatacaagatttgttactacaaaaaggataatagtaactccaccattaactacttcatttatgaatttcatagtaatagaaatacatgtcctaatgtaggactggtgccaacagttcacggaagaaatgactcactgagtcgagatcactaactaatactaa

SEQ ID NO: 112014 - DNA, 12213 bp, Cannabis sativa
  modified_base (155)..(157): a, c, t, g, unknown or other
  modified_base (378)..(386): a, c, t, g, unknown or other
  modified_base (674)..(675): a, c, t, g, unknown or other
taaggctcattgatgccccaaccacgtaaaaatcttgtgcattaactccttacagctttcttaaatattattattatattggttgccgaaaacctcagtcaacaagtgattaatcttttcactcggtgtacttaataataataataatagtaatnnnaataataataattagtatttttgtcccctgaacttttgacattacctaatctattctcctaaaatatacggcttcttaaaaattctccataaaatataacagttacataattatgtcccttctgttaggttttgtttcttttaccattaaaacttagcaattttaccctctaaactttgaccaatacaaaattttttccccttttattaaaaaaaattaannnnnnnnnttataatattctattaattttaaaaaaaattaataaaaacctcataaaaaaattaaattaattaacaaaatattaagtttacttgcaaaacttaaattcttcctaaataaaatatttttaaattttattttatttataaacacgtatcttaataaataacaccaaattattaaaaatccattaaataatttaaacaaattaaatttttttgaaaaaaaaaatcaaacttatttatatttataaattcatattttaaaaaataaaggaaaataattaaaaattcaatannaatataaaattattttaaaaaattttagaaattaaactaaaaaaatattgtatttactcaaacaaatttagatttttggagaaaaaaaataaacttaatctgtttccgtaaaatttagttttcacaaaaattaaaattttaatatatattttttatatcaaaatgaattttttaataataaataaatacttttttaaatcgcttaattagttttaaaattttaattttcttaatcattcaaaatgaatttttttttaagatctaaattaattttttaagatttactaaaaaagtattaaatttttgtcattttttattttgagagggtacaatttaataatcgtcaaagtttagaaagtacagttgttaatttacaaagacaaggcaacatttaaaaaatgaaatctaacagaaggacaaaatatctataaatgtaaaagttcgaaaatttttttaacaagttgtatattttaagtgacagaatcagaattgacgaaacttgaggaagtaaaattactaattattctaataataaataaataaatctttttgctggggtgcaaaccattctaaaattatattcaaaatgaacaaatcaggcactatttgaaggaaaatatttgttgtcctcaaattatttgggatcctactatttatatcttagaaattggctgtgtattaacacataaatatagacattttaacaaattctcactattattaaacaaagaaaccaaatgtgtatttatatatatatatatatatatatacatagacacacacatttgattaagaaaaataattatgagtgagagaattatgacgaaattagtaatgaaaatgttaataactacatcaataatgatgatgatgatatgtgttaatgaagcaattcttggaagtgaaagaattcacgttcgaataactaattttgttggaataaacactaatgtgaagattgagtgtcgtgatgacataagtcatgggaaggttattgttcctccattcagaacctacgacctcaattttaggtccaaggttgaagctttcggagctgccattgttagatgccacttccaatggaagaatggtactaaacaagttaattatgattatgaaatttacaatcaagatgaaactgtaaatcgtctaaattgttgggtcctcaaggttgaaggtccttgttactgtgattgtaaagatgagaaatgtgatttcaccaaatgtgacaaatggcccaagaaaaattgattctatgtaattttgtaattttgtattaatattcattttttttttttgataatatatatgtttagtgaacatccacttgttggtatattttcaatcaaaataattaaattcctttgaacaattttatcattctctctacttatgctattatataaatattttatccatcaaaaatgtattttatactgaagatatatattgatgaaattttgagacttaattccacttagtgtgaaatatgggatagaccttggatcccttggagagggcttcatgacatcaaagagaattttcaattcatacacaaccaagttctttggaaggttaaggatctgttccatcttgggactcgcatatggaatgatagtttgattcgggaatgctttgctgaagagattgctgaagatattctaaagatcaagcctttgaatgaaggtactgatatcactttttggaaggcaacaaacttgggaagattctcggttaaaagtgcgtactggttaagtcaacaacatcggttcaaagagttaaagaagctttgggaaaatctgtggaaaactagaattcaccatggtttgaaacatttctgctggaagctcttcactgatactctccccaccgaaagcaaaatcgtctttctccataaggagcatcaatgttgttttttctgtcattcggatatggagaatgctttccatttgtgtccgttttcccgtggtatctggttcagaagaggcatatggtttgatcacaaagatgagcctgctgcagagaaggaagggattgtctcgcccctgttgttggaccatttggtgctgcaaagttgatgcttctgtggcgggagaagaggctggctttgctgctgtccacacaaacgggctggacattggggactcttgggtttctgtggggttctctggggtgcttgaaggtgaacttcagggtattgctttggcgctgcatttggctatagagaaagaggcgaaagaggttcaaattgaaaccgattcgttggcagctgctactgcttttgcggctgagaatcttccctttggttggagcacttttcccttgttttctgagtgtttgaatctgtgtaaggcttttaacaaagtagtcgtgttgcatgttaatcagaacgaaaatgtcttggctgacaaactcgactgctgggctaggatgcataaagctgaggcttcaggtttcctaagggaagtagccccccttttttctcgttttcaataaaagtttttttaattatcaaaaaaaaaaaaaaattccacttagtgttgtcattcaggactaaaggatggaggtgttgtatgttgatgattccttccatgttcattaatatagcccatttagccaagttctgtgccataaagttactccttctagagacatgagccaccgtccaccttcgcagattgttgtagcactttacgaaacaagataaatacattcttttataatcaaaatactaaatataatcttacataactttttaaaatttgatgggattgtggttagactgtattccacctcagatgcatgtagattattcatcaccttaacatcttaacatggtggaatcaattttttactgctatatcagtagccatgcaaatagctcccactttcggatctgtaaaaaaagtttttatggtttttggagtaagcacttctccctgatgattcctaattacaacagccaacatagaatagtcactagcaagtgatatatttgagttacaagatagccatccctctagaggaggggtccaagagagtacttcttgaactcacttggacgccattagtttctttgattcactcgttaaagtttctcagaaaagagaagatgattcttacaacttctgttttaaattctctggttcggtcacggttttaaaaatcttggtagctgttcaaaccaaactaatcgtataattattatatatatatacttaatatttcttttggacaaaatattgatatttgagaacaattttaggtagaatattgatattaggttcatattattacgataataattttttattattattatttatatattataaacttattaaaagtaaaaaaaataccgaaaaataaacaattattgtaaaaaaaaaatagaagaactatgaaatacaaaccatggttcgaaccaagcaatctgtggtttggtttggtttgatcatttaactggtctggtttggttttaaatttttaaataaatgtaatactggtttggtttgaaaaaattaaaaattcgaatcaaactaatctgtgaataccctttgtaaagccctccaagctaataaactgttagcaaatttaaggtatcatctattttttacaattaactgccatcatagactacttatgtatactctcttgtacacataaacagttcattagttgagaaagttttaccgctaaaatttatggaagattaaatgcaagtaaaataataattgagagagcttaaccactaaaaactctaattattataatagagaggacaagacaacaagataggcatctaggaaagtgatctatttaagaatttttttactgaatgaaaacatctttgttagatctttactttgatctcttctgccctttaactaagttgacaattttcacattcaacacaaaatgatattacatttagcatttggctatatttacatgaatgaacaagttcaataatataaagtgattacaaatgattataatgatataaagtcggatcaaatcacagcaccaaggttaaatttatttaaaaataagataagatagtatttcccaaaccaagaatcccatcaactaataatcataataatatcattaaccattgtcattacaatagaagccctgttttgaatcgagctcctttttctttttccatttcccattttggtcttattttgccaaacagatgatccaacaacatgatagcataacataatcacactaatgaaaaatgagcaaaacacagctactccatcgatccaccactggtgtagtgtgtgtgtgtgtgtttcatcatcgctttaggctccaatccgtcgtttgatcattttgcattacaccattttcttgtaagtactccacaaattcatcaatgaggtatggccatgcgccttctgcgtcataatttgaaagtgaaggctccaccgtctgtcacagaaaaacaacgaactttccatgagtaacggcttatgaatttgttctatacattatgagaaatcatgaatagttcaaaagaaaaacacctgatttttaaaacctagcaagttttactcaatacatcacaaccaaaattgaaccataataaaattatgtttggaaaaataaaaaatgataaaaccaagttgttcaagggttccaagatttgggatttcattaaaacgaaatttgtcatttgcaaagacatcttactcttgcaaactccaacagctgagaccatgtgtcccttgatatagctttattatgccgagcctgaaaggatgaaatcagataaaaacaatagttatttgaaggttgtaataacataaaacacacaaatgacaagcgtaataaatacacacttgaaaagtacgtatcgaagtttgacaatctttcaataacaaaacccatctaaatcatctggtaataaatatcatcaaagaaaactacctccaacactaaacaagtgatattctttacattccagtacaaaatggagtgcatagttatcttcaagttttcgtttaacacatgactcgaagcttagtgtcaagtaaatattcaagtattaaattaatatgaaataaaagctcaaagccagaaattcttgatttttgctcatttggtcgaaatccaacacagcaggtccaaaataatgtcggtaattccccaacctcaaccagtcatgaagattatatataaaaataaataaataaataaacagaagaccaattctattaacacaaaaaaaaatcagaaatttttggaattaaagagagaatatttaaagagcaagtcatctaaagagaaaagactggggatcctcagaattataatgaaagaagacacataattacccttttttgaaactcggatccccgcctaaccctaaaatatttggaaacaagaaactatagcaactgctgtgtaggtacccagaagggacacaaacctcagaccttgtgggagtagaaagagaagaaaaaaaggaaaaaattaaccaatttaaccttcacagaattatcactatggggaactgaggaacacatcatcccttaatttttaacatattctgtgtgataggatgtcttgggaaattataacgcaattcattgaaaaagaaataccctggcatattattaagcaccaggtgctcatctgagaatatttgagcaaagggagattttcgaaatttcctataacagataaataaaatgcatgatgataggcagatgcacattcttagctgtaaataacagagattatgtactactttctcacaactttaaactatctaatcacaaacagaattataaatccttagtcacctggaggaactggcaccaatgttccaccagcggccagtgcttttcagcaaacaataactgccacatcccaattgcagtatccaaagccaaagacttttgaccctgatatagagaaaataaaaatatgaatataagacggatatagttgactaaaatctccagcaagtcattgaaaagaacagttaacagtacaaatgacaacaatccattcctgacgatgaagttgaagattgcttaatttcaatctccattacatgtatgccaagtaaatttatttgaatgtagttaaaataaaaattacagacgcacatgagaactacgtctcagtagccccaataattaagcaacacttgcatacatatacacacaataatttatagtaatatattgttcaatactcaagagtcaatagttgcattaatagcccttaaatacttgttcaatagttgtgataattattgaaaatcttcaatatatattaatatatatttgcatatgaatgtggttcatataagtggcttattagtcaaataagaaagagggatgatttagtccaattttcagtatatattaactagcatttctttcgtaaaaatagacaagtacaataaatatgctgagacatctgagtaccttttcttttgcccaggcgaaggcaaagttatatatctcgcgaaacttttctgaaaaaataaaggtagaatattaatacataagaataaaggcttaagttttgaatcaacaattttagataaaacaaaaattaaatcgacaaaataatatattatccgtattgctccagatggaaaagttgccacaaaagtgtaatcaatctacgtataatttataaatgaaaactaaggagcttttacacgtacgttcatctttcagctcagagcgcataaatggtattctttcacaaaacttttcaagagtatctatcctgccatcaaaaattaatcacaaataaacaacaaggaacatgagctaatttttcagtagttccaggccagccatttggacttagatgtgatcacgaaagaataatcaaaacatttgattacctaccctagtgcttgtaatcccccaataaattcctgcttggaaaattcacacattgttgcagccttcatatgccacgaaacaactaactgtttcaataacccgtggtccacaaaatccaaccaaattattagatgaaaaataaagctgagggggaatggatggttagaaactgcaaaactaaatagattttagatgaaaaaattggggtagaaaatgtattgctacaaaagatcataaacatcacagcaatatttttccaattttttgctgagttctgtaaatgttcaacctcaagtcatgaaaccctagaccaagatcagctattgaaaatttgaaaaaaaaatgagaacataattaaatatcaatcctctttatagtctatcctcccctattaaaaacattaacagatatattttgaagagagaaaatgttaaactaagaaagttgcatttcataacttggtccccatatccaagaagtcaacaacgaacttcctttcagttccaatataggtaattttgacgcgttcttattaggtttgacctgtttccttgaacagattgagctcctatttctttgttcacgtttgattttatatgcttcattttgattaataagatggtatctcaagttccctcatcccatcccaccccaccccatttccgccccccttttctcgtaggataacttaggttatactatactcttaacagtatttatccaagtccatgttttgccatcaccccatcctcaccctgggaaatcaacattggataagcaattattctgaaattgcatcatgttgtcaaaattcatagtaaaaatgaaatgaaaaagttaactcctggtacacccagtgatgtaaatttcatcagagggaacctaacactccatagtcactttgaaccagggaaataaaatggaacagactgtgaccaagtttcataagttactgtattctcaacataatttttttgttagtagttttgcaacttaggtaatctgtttcctcactaaaaaagaaaaaaaattgaaaaatctaaaatctgtctacaaaataaatgcatcacattcaagaaacctaagagaatttttagaataaacatccatacattaagagatgattaagaaattaaatatacataccatgacgatatcttgagggtcaacctgttgaataaagagacatcaaacaccatcaaattataaatttaccatgatttagtatgataaccaaatacacatcacaatgaaatttctgttaatcaaccacaatctgaaaagaggttcgacaacagtaaaagagtcacctgaaggtcattacaaaggagagtaatcccatcagctagaatcatgtcagcatatggatctgcacaaagacaattgttcgagtgagcagaaattcttctaaacaatacacacatatgcaatccaggagacacccaataaaaggacttacttgaagttattgacttgtcaaaaacatttcataatcaattcactttctaagtacgaagttattaacacaattctgaaatataacccaatcaaaagcagaaaaccatgtaatttaaaagaaaaagatgacagctgaagccaatctccatttccatgacacgaaaaattagaggtaacaaaaatccttaagaaacacaatcataacacaaggcacaataaaaaaaataatgtctatcaatgatcacatggacagagaaaatgcaacactgacacatacgaaaaatggcattccttttataaggtgaataccacatactaatgcccacacatgttaagaaaagttaaatgaacctatttatcatttctttctgaaagtgctttaagcaaatcaaggtccttatactcttcatatacaaaaacaatcaattttctgtacagtaccagagaaaaatgtgcaactacttcttgtaggggaaaacaagcaaatgtaaacttaaacctgcctttatatcttttgtaaagttcctctaaatgtctagaatcagtaaatgatttaaactgtggatggctgtagaatagatcaaaagctccttcaagattccagtcactggccttcaaagcctgcagtgcaactttttcactgcacaaaataaaattttcatttttctatgaatcgaaccacaaattaaaattcacatatagattagaagtcattaaataagctggaaaaacaacgccatcaatgccacaccagcaaatttggtgtaataaatataagataaagacataaagaacatgtacaatgatatgaacaaggaaatcaaaacacattaggaggaaacaacacaagtatgcacaatcaaatcatatccaaaacaacaatatgacttccaagcaagaccaaactatatatcattatttctccatttgtcactgaggagtatttgttctcagatttgataacacaatacatccagtaaatgtaggtagaactcatcttatctaaagatatcaaatgagaaattaaactacatcggcttgctaaaagaaaatcaaaatagaagttgccatgtttgtgtctgcaagacaagatctaaaatattatatacaagatatataatgttaaaacatacatgaacaaacaatatgtacccatgaaaggacttagctagttcaaaagagcttcaaaacaggaaggaaaaaaaaaagttgcttgttttcacaacatatcaaaaatattacatatcactactttacaaaaactagcttccaaaatatttccacagaaagaaacagaagtttatgatagcaaagattcaagaagaaaataattttttccttatattgataaaaggcaaaattttactaaaatcggattcgggtaacagaactttatattaacatcattgatttcagaaacctcttgaatggagcatagaatatatttgccaatatttacatagccatcctgcctataaaacctatacaacaattttacaatcatataatggaatagaaaaaggatagttcacaagagtttctctagagaaaagttcaaagaagtccaaaacataattacatcacgatgacacaagtcatcacgagcttaatcataaaagaaaaaataataaaaacaatgatacacacaaagatatacatataaacacatgtaatacatgtcttgatgtatgtatgtattccatttcacagaccaatcacaagcacgttacacttaaacaattctatgaaacttctgactgaacccaaaactagagattggtgcagagaagataatgaatgaaactagagctcactcgagaacataaaaggcttaatgtatcacatagagaaactgataacgcaacataaccagttgaaacttgtatacacctttgtcaattttttaaccaactttattggatctccagctttctactggaacaaggtttattaacacattgtgaatttaaagtgaaattcacaacgagaggttatcttatcctctgaaaattttcgccactgtttattcgtttcccttttgaacaaattctttttgtttatataatatgttggggggagcttaaagtcattgttctaactaaagtaaatttattcacatagatgaaaatgaatagaaaaaagtaatatggttctcaggtaccttgctccagttatagctataaactgctgcactttgtcacggtggcccctacccagtttgtgctgtaagaatatggtacataaatatatataagtgtataaaaaacccattaaaataatctctctatattaagctacatagaaaatttttacaataagtgaaaaatatggaatagaaatgtactcggttcaagtcaatgtacagttatccttctcaaactaaataacagttttatcgaaaacccaaaaaaaaaatctcctaaaattaaaaaaataaacacagaaaacagaacgagggtaaataatcacttcaaaccttctcattagaaaataaaataaataattatgtttatttattcgtgaactaaacctatttgaaggtggaaaaaaataataataaaaaaaagtggaatttgtgtcattctcagtttctcatacctaaaataacaaaatctacaacagtctcatcaatcaagaaaagtagtaacaacgggagcaagcaaatattggaagaagaacgcagtgatgatgaattaggtatgaaatcataggttagaaaacaagaacaagaaattgaaatcttaaatggggagaatggaaaggactaaccatttcggaggtggtggaagtagaggagggtggtgagagagagagagagagaaagctagggtttcttgcgttttctttctttctttctttctttctttctctctcgctctcagaaacacttcctttctcactcagcgactcagcctctgtgtatctatctcactattaccgtattattattattattattaataaataatattatttggaagagaatactattattttgagaaaatgcacttattattattaaggatatttgtgggataaataatttattattttcaattttttatattcatatatcatatttttttgaaatttttacaccaaaaatacaaattacacactttattacatataaacctacacacggtcaaatcaacttttttaccttttctcaatattttattacacatataccaca

SEQ ID NO: 112015 - DNA, 4032 bp, Cannabis sativa
tagctaaataattcattggtttgtttaatctttgaccgtatacaaatatgtcaacttaaatattttgggattgatggaatgtcatattaaaaatatctccagataatatttaagtattgtttggtatattagtaatttgagtatactggaacctttttaatatattatataatgtgatctgttgaaggtaaggtagccaggtaggtcgcttactagcttttagcacgtcaatttttaatttttaagtttggatatgcaataaataatgaatgagagctagcttttcaagatatataacattctcagatattaaatattcgccaagtgttatttcataataaccctttaactgtggtccagtgccctttttaaaaaaaattaaataaattaataattattatgatgctttagttaccaagtccagttcattaaacataaggtcgactcgtaatcatactttttttatctttctttattaatttgttttatgaatggggatggggacagaatggaagggacctttacttctttccccatcttttttccttgtttggctaggcgttactttcttcttttctttttcttttacaaataactgctcatctatagtacaattatttttatatgttaaaagagctactgtttatgaactttggtacaagcaacaaagaaaagctattgtttatgaggtgggcctttgatcgacagagacattgtcattcgaaggatcccataaacaagaagcctgcttgaatcctttaaagtagccagcctctattgaatcttcaaaagtgcacaacattatcatattcctctgctctaccaataataattaaacacacacacacagatttcaggttattttactctgaatgcattcttataattatggcactggtttagccggcacaaaagtcaaaatggggttagcagtgtaacttgtacattcaaatgaaatgtttcttccttaaattcataatcaaaaaaattcataatgtgtaccctactctgcaacaattactggtccacaaaaaaggattaagaataacggttactcaaaggtgtagtatactccatgacatctcccctttcttttcggagcccaggatgctcaaaacgagacaacatctaaagtaattgaactgagttaaaaaattgttcaaaatcactagaatcagctattccaaattcttttgaataattagaataaacttatgagcaaaaagactacagtaatgtatttgaagtgttcctactagcagagatacaagcaattgaagaaaaagattaaggaagcctgttcacatgaccatcaaactgttcactaggttgatatctccttttcttttctttttcttaaaagggactagtttgatatttcagtggactagttttctcaatactgcttcagcacgctgctcaaacttgggcatggcccaatcatgctgcattatgtcaaggttgtccttctcagcacctaaattctgaagtgaagaaaaaaaaaacaaattgaacactcatatgttagtaatcttgccgtgtttgacggaactaatagttttgttttgctaaacatgaagtagtaattcaaactctttgcaactttttgatggtagggctaatctgtgagaaagataggagttaaatgattccatttctttcttaaattgcctatagcttatgaaaaccacagaggaccaaaataatcttgaaacatgaatacttaagaaacagtcatgtacatagctgctaagtactagttcattaaaaaggaaaaaaggtcaaagacatccttaatagtgaacatagttaaacctaaaccatttatgtttgtacctttgatggatcaaagccaaatcctcccatctgcatcatacgctgtgtgtcatccatggctagaacaaaaaatggcaaagattagtatatcaagtttatagtttcatcacatttttctgtttctgatttttgaaaggatagccagcatgcataagcaagttcgcaaaaagcatcaacatataggaacctttagacactaaccattttcttctcccaaaatgagactaaataaacctcttaatccaaatagattgaggaagtacctgataaagaattttgaagaattaggaatgatcaacaatactaaaactctgaagacagaaataatgtagaaaaaagaacagagtacttcagtaactataacacgtgaaagattaaaagtaccatgagcggctactgacatagctgacatcaacagtgctcaaatcaatcccattctgtaacatggacctaaacctctgagtcaggggaaatggtattttggctgtcaaattaaacaaaaatatttcagctaaagataaagcaacaaataaataacttgaatctagctaacaagcaagaatatagaaagaaatattgcagaatcaaagaactatttgaactaaaacatcaatgatcagaataaccagaatagtagtatgaaaaaatgaaccaacaaggcgataaccaatcaaagcggcttaaaatcacattagcagatgatagtgtaatacacatataaatgaagaagataatcgcatgaaaaagaaaaagcaaggaataggttctgacctgctacaaatccagagaagaagaaattgacccaagcaaaagtaagagtctgatcaagaagcaagatatctcaatattaacacgggcaacaaggcaattaaagtgaaataagacgagaaattttcaatacctgaggaataatcattgaaaggtttttcttcatcatgtccattgccatattagggtcagaaaacatttgcgcttgtgggttctgaccctgtcctttcggaacatgtaacaacccattttcctgtgatccccaacatattaaacttcaatatttaaatttgcaaaacattgagggttgtaacatatgaaatagcatgccaaagcaagactatctagtttcattcaactcatcctaatctaccaaaaataaaaaggatattttcattaacaacaaatgtcaatgtttaagtcacccttctagaacaactcaaactcaattcatgaattgcgatcgatccaattctatcttagtaaaagtcaaccagaaaagatcaagcaactcaaccctaattatacatagtttagtttaatggtactcagtctcaaaaataatagtttcttaatcagcaattacatcgtgaataacaaaatacatcgcaccccccagacaaaccacataggtagtataaaaaaactaacagagcgttaaacatactaacctcattactgaagtaaaacctacgagcgcgaaacgatttggccggaatgaaattagcaccagcacgcaaattccgtgccctaacgacgacttgcctgaaattcacccccaaaaaatgaataaaaaagtaagaagggcaatcgcatatatgattaagtagattagaagttagcgaacccttctttgacgatttttggatcggggacttggaaggaacgcatgagcttagaaacaaagtagcggaggactccgataagaaccatgacaaccgaaagcgggatcaacacccaatttctgatcggcgtatctagtacaaggtcttccgccatggccgccgtagaagaaaaaattcagtgaggttgaggagggctcgcttaacagtcgtttgttttttcggatctctatatgtgccctctgctctgctacgtcgtttgtcgttttctttttattcctctcacaactacgaagtaaatctagaagggtgttatcgtctttccccccaaaaaaaatcattttcttgctttttccttatatttttggatcacaactatttatttatttattattatttttaatagaaatacaatttcattaattcaaatattacgtaaattattcaaaatcataagtacgaccaatatttaaccaccaaccataagttaaatagtgaccaacataaattataaatccacccataggcggacccacattgtagcgaaggggggcagtcgcctccctgaaaaaaaaaatcgagaaaa

SEQ ID NO: 112016 - DNA, 2729 bp, Cannabis sativa
cattcagtattcaataataatctcactttcaaataacatagaaaaaacctaccataaaatttagtatacgtgcatcgcacgtagttttttgctagtatatatatatattgttaagtaaaatacttataattttgaggaaattatattgtatattcatgttattttatttattttaaattttacctttatttttatattttttaagatttacatatttttatagataatgttttcattataccgctcagactaatataaaatatgtactaaatttaagtggagagtaaataaagatatattaagaaatcaattcaaaaaaatgaatatattttaataaaatataatatgaattaattaatggatacaaaaaataaatatttttaaacttatccctataatttttccaaccaataagtctatttatatttgagcattgttatttttgtcacttaagttacttttttttttttttgagaaaaacacttaagttacttaatactatgttgatgtgttgctttttaattatttagtattttttcatattatttattaaaataaaatatgtaacacccaatattaaaatgcaactatatatatactaagagataattaataccttaacatatcctttaacaattctctttaaattcataacaacacacatgattacatatatagcatagaagaggagaaataatcaataccaaaagtgccatacacataaattggcaccttacattattaaactcaaaatacacattcttatcagtacaattaagtaaccattttaacaatacatattaatttggttgtttattattattaactttagacatcattgtaacaaactcatccatattaataaaaccatctccatcaatatcaactcccttaaccatattccggcaagccctcatgctacaaccttctccaagcttcttcaaaacataacaaacttcctcggcgcttattcggccgtcgccatcaatatcgaaaacccgaaaagcattttcgatatcctcagccttagccttagccttagccttattgctgctgccaccaccaccagatcccaggttgaataactccacaaactcctcgaaactaacggagccatctccgtccgaatcgagtgcccgaaaagagttggctatctcggaatctgtcatttgacggtcgagaagagtgagtgctgacttgtactcttctctgctgatctttccgtctctgtttgtgtcgaatttctcgaaagcccatctcaattcatccatgttcggcacctgattatgattatagtgatgagagtgagacgacgtcgttttgttcttcctcggggatactgacttggaagaacgacgtcgtccctggttatcatagtttgtaaagctcaaatgtgacatttttttttttatgaattcaaatgaatggatgagatctttggtattttattacacaatataacttctctatatatagtcattttataaggagagaataatataatgcgctatatgttatataaagaaaaaggatcgatatttttatttggggaagaatataaaaggatatttattataaatatcagcttattcctaaaatctaatattttttaacaaaaaaaaaacaaatatattaattataatttttgatgaaaagccacgtttttttttttttttttgaagaaattgcagaggttgttggctttttataatatatatgtgatacataatttttttaaaaaaattattaaacttattaagttatgagttttttttcacaatatttaatttattattaataacaatgtacatattataaatttgtagacacaattatattttactaatcaaatactcagacacaaatttaacttttataaaaacaaatcgttcaagataatcatacaactttaagtacttaaatctaaaaaaaaaatcaaaaacactaaatttttaaagaaacctaacatttacgtgtgactttgcaggtaacttccatctagtttagtttaaacttaggattttttttttccataaaacttagaaaaaataaaatatataattcaatattttgcaaaataaatttgagctgaaatttttctaataaatttataaatgatcatgaatttatagcctgtatttataaatattaataatatgaaaacacaagaggatatgtaatttagggcaaacaataaaaaaaaaaagttgaaaccaacatctcatgtggctatacgacagcttttaaaattacctgaccaacctggtgcaaccacgtagctcaaaatcaaattattggtttcaatgtattgttataaaagaaaaaagaaaagcagagggagataataaatgagaaagttgaagattctaaaggaaaaaaacaaaagaaggaatatgataaaatgcgtttacgtatggaattttcaatataaacaaataaaaaatgcaaccgcgtttctccaatatattgcgaatctttttcaattataccattgctacattatttgctttatataaatctcgcggttcaccattaaaataaatctctctgatttttatttttttatatataaaataacgcacttcttattatactaggtgaggttcaccattagctcttcttgctacatttttatttttatttttgttggtttaattttaatactataaatatttgtaacaaaaacttaagtttgacatttaaattttagtacaatttaaaacttaaaa

SEQ ID NO: 112017 - DNA, 2469 bp, Cannabis sativa
tttttttttttttgtattttattaaaaatgtaattaaaagtatcattttctttttaattctaatattttgaaagtaaaatgacgtggtggagagagagagagaatggcaagtagcgtggtgagcacgcgcctgtaatggccaagtaccgacctttgtttgtgttttggccacgcgacatttgtatttgctctctctctctctctctctctcttcgagtcccatcgcctcctctcccggcctttcctctctctgcaacggttcacagtcacacccaccaccgttggatcttggcggtactggtaagataagcttgttcatgtctaagtatttgtaaatggattataaactttaatttgagtatgttttgcttgatgtttgatttaatagactcttaaatccttatttttcatcttcacgaaccaccttctccagaaattggcgcacatataaactcaaacctttacttcaccttccactgtaactaaagctctgtctttcataaaataagtcttgtttactcttttcatatgcacatgcttatgcttatttagggtccatgcttgaattttattgacatgtctcattcgaatcaaggttagtccttatatcttgttttatcttcatttctaaacgaaattccacaaatttattagtggttgatctttattttgtgcttattttgggaattcatgctcttattgatggaatgggaagttttttttttttaatttgttccttttccatgtttatggcttatccattatgtgtttgtataaatgcccaactgccttctcgaataaagagactttgaattgaaccaaagttgtgtctcacctcctaccttgcttccatttccaagggtactctcgtcgaccgagtcgaatgatgactaacaaattgtgttaatatttgacatgactttccgtattcaatttgacttatatgagatagttagaaattattaggatcatttacaactaaatttttgtatggcttgataatcctgtaaaaaattagagctaatctttcccttcagaagaagagactcaactcacagacaaatgagttagccttacaggtatttgaatttgtttgaaattataagatagtattttacaccttcaaatgcttgaaaatagattctgacatggctatgattctaatggttggttgttacacttaccaacaatgctctttttctgcaacatcctttcattctaacacaagtatacttaccattgcagttgtcaatgtcaattgtttttcataaacaacaaaagctaaccagtccaaactttcaataatatttgaacaattcaaaaaatcttgtccttcctttaattagatattagaggaattagtgtttggcaagtcactttaatcattgtactatcatcttttctttctatctgccatacataacatctttcaactcttggtgaaaaattctgaaggactatgaagatatatgatgactcatggatttgtgaggtgtgtctactttttctgtcatcttatttatacttctctgtctctctgaaactcttttccaaatccaaattctaaaggtttctgtttcttgttctctaattatcccattttctcactaatatatttgctcaaagtcatctcaatgcctcacttcaaagcactcaaaatttgttttgtttattctttttatgaaccactacttcatttgcagcaatacattttagggtgacagcttacaatgaaaaaatccagtaaaaagttcctccaattggagttcaaaaatccatcgactgtcattatacagaaactttggcctctgatatagaaggatctcaggtaaacattgatgtatacatcctaagaaccagtatgacatactacaaagtgtatcatcatatagaacaaactaacatacacactaatcagccgattcaaaggcacacagctgccagtctcatagcagcattgagaaggataagccttgaattctttactctataagtttataattatttagcctcagatatcatgctttggctggcttttatgtgtaattacggtgatataagaataatatagtttgtgtacttaagaaaccaaaacttcattttaataataagattattgagataagacgattaggtaccctttttacaagagacacaaaattacacagggaatcattaactagaaactatttggattacaaatccttacatctaatcacaatcaaattaatcaactaatcacctcatagttatcaatatttgattagtgtaatgcattgacttattggaagctgttattagatgagtatctttttcttgaaaaggggaataagccttttttttgatttcacattaccatctttaagtttaggttggttaatgaaaaaaactaaagtcttgcaaaacaactctaccttctagaactcatctttttctttcttataccacaatctctctctctctctctct

SEQ ID NO: 112018 - DNA, 4888 bp, Cannabis sativa
cgggcggtttgagcggtttgagcggtttgatgtacacccctactttctgttggttagatttccagctgatgcagtccccaagagcagttaacacaaaccttgttaggctccttctattggttaggtttgctccttctataatttacaatatagaaaataatgtttaaatagtctattttacacgcgtataaaataaaatagtcactcgtacaacacactgtttgaacgtatttttcagcgtgctaaacttttctaaatttcttaaaattttgcaggaccataaaaaaaaatttcactaaaaaattatttcggttgtaaaaatagataagagtggatcaatatatcaattttaaggagtggtagaatttcccaatattattttagatagggaaataaatagagatgtgaagtggattatattgtagaattttcctaaacattttttttttcctatgttgtacaaaaataaataaaaaagcttcttcttctacttcttcttcgtcgtcctccagttccactgttccatctccagttacattccattctcaggtaaccctaatttactcatccttattcaatttcactttctaattgtaattcactattccataatctccaatttcaacaacaatttcgctttgattcttttgaaagtagaaaaatggggacaaccaccacaggctcaggcaccggcacaggtacattggcacctggtctctcccggaaactgaagaaagtcttggaatccacgagaacggagtcaccggatctgttggcttccctcaacactctctcctccttctacgccgataacacacctcactcccgtcgtaatctcagatccacaatcgagaagcgatctctctccatcaaccacgagtttcttcaagcctccgccactgctcaggaagccttggatcgcgtcgaggtcgaggtcgatgcactcgccgattgctgcgataggattgctaaggctctctctacttgtactgcttccactggcgacatcatttccaccaccgaacgtctcaagcaggagctggatgttaacaatcagaggcagaatattgtctcttgcttcctccgtgattatcagctctctaatgatgagatcactgctcttagggatgatgatctcagcccggctttctttaaggctctttctcatgttcacgatattcatgccaattgtaaactgctattgcggacgcatcaccaggtatccgtgtttgagtttgtgttattgcttattggtttgctatagtaatcaatcgattgttctattgcattccattttgtatagcgtgctggtcttgaacttatggatatgatggctgtttaccaagagggagcttatgagcgtctttgcaggtcagccattattactgttaaactagtttgttgtcctaatctctgcaaatttatctatgttatgtttggtgaaaaatcagttgtaattatcattgaaactaattaacaccctctcaagttggaatatagatattgatcatgcccaatttgttaagtagataattaacccgaaccccattcaaagttcaccggtcttcacatatcttgtagaaatcaagccttgtcgaatgaaatgatagtcaatttcaatgtgcttaggtagctcacgaaacacaggataagatgcaatatgaagatcgttatatgcaatttacagctaacatcctaaatgattatttcaattcttgctacaatgtcagagtttgaacgatgtatatggtcttttattcattttatgtaggtgggttcaggctgaatgtagaaaattgggtgatgctgataatcctgaagttagtgaactactgaaaaccgcagttcgctgcctcagggaaaggcctgttcttttcaagtattgtgcagaggaggtgatgttctatcagattatgaatttgggtaacatgtcactaatgtgtgctttagtatggttttacaatatatttgtttggtaatttccaggtagccaatatgaggcataatgcattgtttagaaggtttatcagtgctcttactcgtggaggacctgggggcatgcctcgtcctattgaagtgcatgctcatgatccccttcgatatgtaggggacatgctagggtggttgcatcaggtggattacaggctttttatggttattatgggtttgagattttacttcttgtatgcttattagttattacttgctgttaatctctatacaggcattagcatctgaacgggaatttgttatcatgctactagatcctgatgcagtggttgataatagacaaaatgaggaccattcttccaagagcatgcacagtgattttgcaaacatagaatctgacttgacatttgttttggatagaattttcgaaggagtttgccggccttttaaagtcagggttgaacaagttcttcagtctcaacctagtcttataatatcgtacaaactcagtaatacccttgagttttacagctacactgtaagtggtatatactctgtttagatggaaagtaaagctatctgtaaacctttcctaacacacttcatttggcagatatcagatttgcttgggagagaaactgctttatctggtacactatggacgcttaaagatgcagcacagaagacattttttgatattttaaaaagtcgaggggaaaaacttctaagatatcccccgttggtggctgttgatctttctccacctcaagcagtaagggagggagtctctgttctgcttgaaataattgatactcataacagcatgatggtatctgcttctggaaataaacttgactttgatcctgtgatatctgccttactcaaccctataattcaagtaagtgtggttccttttctgaagattagattttttatgttagagaaacagaagagatactgtgagattttcaatatagcacttgtagataccaaaccttgtctacatcaaacttacgcttaatgttcgaaacacaaaaatttacattttctaaaatgtgttttcttaccgctctcgtttcttaaaagtggcatcacatgattcacctcatgtatgagcatatcagatccttgactgtaagttaatgtaaattttgtgtctttaacatctcttagatagactcgatcgtttggcagcctgcttcatcttatttttttatcatgttgtaatgggcactttggttttgtttccttttccgcaaaatgtgttgctgtggacataacagggaattgtatctgttgtagtcatattttagcctccacgatcagattattcaattccttaatacaattattgtagatgtgtgagcaagcagcagaggcacacaagtccaagggaggcagtcactcatctcggagaagtagacttagctcggactctgctcaaaacagtaagtcatcagttgacgcgctgttgtctagtagcatttctgcctcatcttctcaggtatgtcaaatctgggattttattttcgatgctctgttctgatctcgtataaaggtttcttccattccaatgtctgattttcgcaatttttacagaatagcgaggcactgtcgaagatattcctcataaattgcttgtgcgccattcagcagccattgttgggacacgaggttgcagctgaatacgtgaagaagctcggagtgatgatagagaatcatgttgcgatccttgtgggaaaagaagtcgatggcatcctaagtaaatgtggcttgttgcagaagatgaaccattttcgtgattctgctgggaccccgctggttgagatagaggacacgtcgccagcacatctcttggaatgcctcaaatcattctttggtttgattttgggaagtgagagttcactaccagagtttgagcagatgcaggttcccaagttacgatcggaagcttcagtccaggtggcgagatcgctggcagaagcttatgagctaatatacgacgccattatggatcccaagaacggttatcctgatcccaaatctctggcaaggcatcctccacaccagataaggaccattttagggatataaaataaaaccattgaaaaataattacctctctgtaacttgttagttttgtttttgtattatgattatcaatgtctgtgtattcttttcctgcaattatataaatgtgagctttttggtatagattttgggacattttttcactggccaatggctattttgagattccaatacacatgtaagaccacacttggcattcttctttcacttccaatctataatttgttagccgttgctgttgtttttttttttcactttctcaaaaagaaaattaaaataagattaaaatgcaattataaacattaaacaatgtcaattttcttaatcaaatcagaaaacaactctagtaataacacaatgactttgtgggtgaaagagtaaaatttgactttgaaaaagaatgaaaataggaactaggaagagtaagatttaagagatatcattacaaaagaaatttatacaaactactattttttttgtaaatttgttacacttatgtaaaaaatatattattttaatatttttacaacattctataaaaaaaatataaaaacaacataaaaaaaacaacactaaaataaaaccacatgaaagaaaataatatcttttccatataagaataatatacaaataacaaaaaaaatattaaaagagtattttttaaaaataaaatcttaaaaattataaaatatttaaaatttcctacaattatattttgttggtaattttgttatttttgtaaatctcataaataatcccaagaaaacaaagggaaacttacaaaaatactgtttttttactaaatattttcaaaaatactgggacacggcaaactttacatttttac

SEQ ID NO: 112019 - DNA, 2367 bp, Cannabis sativa
ataaagtttgcaaggcagtaaactccaaaaaaaaaaaacagtataaaagttaattccagcgtgtaacagtataaaagaaagaaattgggaaaaaacagtaattggtgtaaattttcctaataaattgaagtccatttcccagcgtgcattggaaagtatgggcccgcaggcgtagcccagagattaggggctgggctagaaagtgtcggtcattgcagcccaaactagcaactcgttatttatttctttatctattttttgacaaattctctttattctctttagtcttttcaacacaagtggtaagtaagatatcaaattaagttaataatgacaaaaagtttttagccaccaaattcggatatctatatacatctcaatcaacttaattcaaaaatctaaaccatcactcttacaactatattcttaaaaatgcttgcttaagcagatatttaggtatgggtcatcatttttcgcctttactgtagttataatttcttttggtactttgagaaattacaacctaattttttataatttgatgggaatgggatataatgttgttataaaaaatatcccaccaatttttttaaaaaaaataaatcaaataatttagtgttgaaattaaaggttaaatacgtgattatcttttatatatagatacatataaatgtgtaatcaactattttaaactcaactttaataccgcaaataattgaaaattttctcaaaatttagtgatatttgcaataactaattatcatttctctaagatctcaaaacagacaataccttaccaaagcccaataatttcgcattaaacttacatgttgacctctctgtttgcatttttgcattttatcgtataattaaccattttatgttgaatattttccaaaacatcactaattgaaagaatcttttttacacaaaataattaaaatataaaaaccactgccgacaaaaaaaaaataaaagtaaaaataaaaatgggtgcatacattttataaggtgccaaaaaaatggtccatgaaatcaaattttattttggaggtacatatattttgacaaatgggtgttttattggcaacaaataaggaaacaaataaaatcaagaaaaaaaaacatttaataataagaaggccataaaaatgtggggtattagtctcttgctataatactctcactctcaactaatactcactaataattgtaatgtacatacattgcttccttcctaccgttggattgtctctctcctcaaattggccttaatgaagtgtgggatgccactctctcccatctctactaaaacaattatatgtcacttgaatgaatgtcctaacctaaacccacaatccccaaactgtcctcatcctaagaatccaaaactagtattgtaaatacacactgggttttttaacgcaacaagaaaccagcacaagttcgagagacaagagcatgattcgacatgaaaaatatatacttaggtacgacaatacaaaaaaatatgggcttaagcactatgcgttacgatgttgtaaattagcacgacatgcacgaaaaatatgagcttagtgacacaatacaatacataagcagggcacattaaaaaatctgataatgttaatgttaataataacaatgataaatattatttatcaattaaagtgatagtaattttaaaattctaataatttataattattttttatatgattctgtgtaattatggttaaaaaaataaattttttcaataatatacttaaaatataaactgtttacaaaaataccttaataaattttaattacaataatactttgccacatcattaaaaaaatatattaatttcaaaagaataatttgcggcataatctccttaagtgtgcaggtgtttgcaactaacccccaattctaaaattttagtagtaaaaccccctaaacagttctaaaattttggtggtaaaaccccctaaactagtgttctgttagcagtttagggggttttaccaccaaaattttagaattgggggttagttgtaaaaatttggccacttaaggaggttatgctgcaaattactcatttcaaaataatatgtctgaaatgaaattaatcccaaattttgttttttttttaattattttactaggttttcataagtaacattttggttacttatgatgttgataaaaaaaactaattagttacgtaaaaaaaattatttttcaattatataatttgacacaatttagtacctctaaaacctatttgtaaacattataataatcaattagctatttttaagttatattatatgctatcttattatttaaaatacatttaggtaaccttttttttttttttt

SEQ ID NO: 112020 - DNA, 3393 bp, Cannabis sativa
atctcggttgtctttagaaaccaaaaaggaaaatagtacaattatggcgcctcatattgaaccggtacaacaagcatatcgtttacttggtggcttgagcgattatattgcttatagaactggcttcttctttagcagtctccaccaaagaatcctaaaacaaaatttacatttgtaatcagcaaccaatagaaatctccaccaaatagtgttgaaaatctttaagagaaactgtacctgtgcagcgatcaaccgtgcaacagttttcttgctcgattcttggagttcaccagcaattagaagctcatccaaaatataataggcctacaaatttttaacaacagtaacagtgaagtgaaacagccaactttgaaatccatgaaaatataagcaacaacgtccgaaccctgaggctacacctattctactgctgaaaggtaataccctttgccttaagattttctttcttatttttgttttacctggccttagcctttagccttttaccaaacatttctggatttccttggattaattaaggtaatatgtgattttttcactaatactataaacctaaggaacattagttagatatactatcccaacatttatgtagaatgctagacatcctctgaatctaaagaccattttaccagaatttaatgtgcaagcatcatatttccccagattttcacttatttgaaaagtgtgtaaagaaacaaaacataccttatgaaaattgaagatcaagtctagttcacagacctggaaaaaagaaagaatacagtgtcaataccattttatcactcatagttatgttaatactcttgaatatgatgaagaatactgtttactcacactgccaaaataccgatccagaatctcaacataatgatgaattatttcaaggacctctaattcattatcttcttgatcaatgcacatgcagaaatagagactagcatatctgtattgaacattcattgaataaattagatcacaacatagttttaaatacaaaagttcactctaattacaaattaagtctcattatccagcattacctcttgtaaacaactttgtatcctctccactccacaaaattacacagcttgggtcctcgtgtaagaatgactccgctgagttcccgtaacacctgctccaaccataaacaatgcgctcatcaacaatttgaagtacaaatacaatgaacagttcagttagaagcatcaaataatcagtagtctattgtaagctagattaccttagttctctccttctgtgagtaaggtgaataccattttgtcaatctcactttcccttgtctactaataagaagcacaaaatgaatctggaaatacaagcaaaaacataaaatattacagccaatgaaatgaaaaccttctgttaaatcatatcaaattactgaataagaaaaagcaacagctgccaaacagaatccatcatgaagtaatttccatataaattcaaaccaaatcatacattttcagcattcccactatctcaattctcaatcacacatatatgtctagatccccaattccacccaaaattaaaaaacaagaaaatccacatattttcaacaacatagtaataattcacatacaataagtaaatcattctataataatttcaaatcaataactaagaaacacaggtgtgagggtggtgatcatatcagaaaattctaaaccaaaattctctcgggtatgattttggtaaaacagaccacagcgaatggggaactagatctatataaactttctaagctacccaattaagtcaattacagaatgaaaaccaaaaatcagcaaaatctaatagtttcgaatcaaaacaaaacagctacgaaatattgcatcaagtacatacagtagcaaagagaaagaggaaatgaaggatttcaaggcttattcattaccatttcttcaaggttttgaagggatcttggtgaagatgaaggctttcccctgcgatttctttggtctgattatgtgaacggtactctcttctcagctatggttttccccttttcttcacctgaactcggacgagtcactcactgatgttgaatcagatctaaatttgttgttgggctcacatgaaaaatctatgttgggcctggcccatatgatgtgaattattattgggcccagactatgagcccaactatttcataaatacctcgacaagacaaaactcttacaaaaatacgcatctacagtgttttttagggattattttttaaaaatacacaaaagcaacaaaaaattataaaaatacggttgtatgggattttaaatatttttacggtttttaaaattttatttatataaaatacgatcttttaatgtattttatattgtgttcttgttgttttgttgtttttgttatttgtatatgttttttaatgttatttttctattattttcatgtagttttttattatttttgtattatttttataaatattgtaaaaatatttttttacaaaaatacgaacagtgtttttttactttatttttacaataactatgttgctttcatgttattttttattgtttacatgttacttttacgagcatctgcaaaaatgtaatgaagaaaaaaaatccaatttattttcttattagtttttatctgtattctatacaactttttaatttagattagatgatgtggtaaattacaaattctatgaaaaaattaagaaaataactaaaataatgttatttaatttatttttgatttcttgtagttctcccattattgttattagctagtattggatgcttcttcttgataacatgattaagatcaatgtgaatgtttttgtaattagtaggaataataattttagggttggttggttagcgcttaataatagtagtaatgtcattgaggccgagtcgaaattattacctagttggatttagccaagtattgttgaagctatagatatcaaggaagttcttagttggattaaaaaacatacacacaaggaagatgaaactagtaaagttgaggttggacaactaatatatacatacatacacataaggatatatacatacacataaactatatattagttgtgatatatattagttcttgccatacatacacataaactaatatattagttgtatatacacttagttgaggtgtatatattagttgagatgtatatattagttatacacttaataaaccctaatcttattatttattagttttattagagccgaaattttaatattaaaacagaacttctaaaatatttaaaacagtcatatgttagacttttatttgggcttacattaaattttattggttttattaaaacttgggttgattggatagttctttgct

SEQ ID NO: 112021 - DNA, 5411 bp, Cannabis sativa
  modified_base (5361)..(5385): a, c, t, g, unknown or other
ttggatttaaggactttttttcaattttagtaaaaaagtctaacatggatgaaagtccaagggccatgatttagtacatataatagtttgggatgcatggtttagtatataaacaatcactgaagtagtaaaattaaatgaaattagacaaaagtccttaaaatcaacaatctcaatagttcagggggcatttttaacgatcttaaaagttcaaagggcatgatttggtacatgtcaaaattcagagggcaaaaatcctaattagcctttattttttgttaaaaatattactgtttttctcaaaaaaataaaaataaaataaaatactttttattagattctgataatgggccttcaaagattgggcctatctattgttaaagcccattaaggtagagcccaaaggcggcggataaagcatataaactccacacaaccaaaaaaactgtcttttcaattttctctgcaactctctgtacggacggcggagaatctctctgaggtcagatccggcgacttttcttcttccattccgccattgaagtaaaacccaagtttcccatcaatatgtatctttatatagacatatgtatgtacatgaaattacttaatactctttatgttttttcttttctcttaataataatatatactttactcacccatgaatgaaactgtgctcattaactgtttgattaaatgcctctgtggtaagtctttttaaagctaaagactttgagttgaactatttgaaatctcattctgggtttgaattgggtttcttttattgattattacagagcttaatatagtatttttaatggataggtgttttgaggagcaaggttggaattgaatggagtgaagatgagttttgctactagatattcttcttcagttgcttctgtttttcctgttcatgatattttttggaagagccgttgtagattggatttgaataagtttcatggtaatttgattggtggaaggagaatacataataattatagtcaaaagcattacttttgtgcaaaagcagagatggttgttcagaagtatcttcctcctttgtttaggtaagaatcttgtattaaattttggttgtgtgaaagtagaatattgaatttgttatgcattatcttgtattttaatcaatgattagttgctaatacagattattaaacaaacttacaaaaagaacctgttgagatggaattggacgaaattacacttttagtaatattggatagtttagccgctaaatacaaattttgggtagttatgaaatttggttatgtgaaaggagaacattgaattagttatgcttatcttgtattttaccaatgataagttacttatacacatgattagacaaacttacaaacggaacctgttgggacggaattggacgagattacagttagtaaaattggatagtttagccgctaaaaaataaatgggtagctgctagttacaaatccaaaatattgggtagttatgaattttggttatgtgaaaggagaatattgaattagttatgcattatgatcactaagctactaagctaaatgacatttcgggattgggttgatttctctctgtttgcagtgttgctcctatgatggaatggactgatcatcactatagaactcttgcccggcttgtatcgaaacacgcatggctctacacagagatgcttgctgctgaaaccattgtttatcagaaggataatctggtaagttagttggatgatggattatataaagttcatatggaatgatttagttctaatgacaaacttacatcgtttgaccgataaaaacttacatctgtgttcctttctcaggacaaatacttgggattttctcccgaacaacatcctatagttcttcaaattggtggtagtaaattggaaaacatcgcaaaagcaactgcacttgcgaatccttacggctatgatgaaattaattttaagtttgtacacttcctttaactttacaatgttattcttttatttttattcatgataattgtaattaagtttttcttttcttttccttttcaatagttgtggatgtccaagtccaaaagtagctggtcacgggtgctttggtgttagtcttatgcttgatccaaaggtttgatagatagatagattcgttgttcattgtgtgtaaaaaaatgagtatttttattgatatgctcttatattgacatttcggttttacatgggaagtttgttgctgaagcaatgacagtgattgctgctaacacagatgcccctgtcagtgttaaatgtcgaataggcgttgatgatcgcgattcatataacgagctctgtaagatcacttactttgtattctttgtttacattattatgcaagaaagaatatgactcagcttcttatctcacttgattttctccctttcaggtgattttatttacaaggtttcttctcaatcaccaaccaggcattttataatacattcccgaaaggcacttcttaatggcattagcccagctgaaaatcgaagtataccaccccttaagtacgtttttccatatagtttttttcgttttgtaatcttgacatttgtgggaaaattaactaacaaatacagatcaagaactaaacaactaaaaccatgaaacacattagcaagaacttaagcaaaattcaaagataatgaaaagaataaaccaatgcaataaagtaaaagacactaagaaatatactggttcaggatcaataaatcgatgtgatctataattctacaccaattttggaacaccaccaaatccctttattgattaagcaagaagcttggtacaatacagttgagttgatacaactcactaggtttctcacaaagtttttctctccactcaaacactcaatcccgagcttacatattcatctacatatgcagctccatacaaaacccaagtagtctcaatctcactcttttctctgtaccctctctctttctaacttgctcttcttctctgtcttgaatgagatgagtaaggctatatttataggcagctggttctcgagtaagccagctgagttagtagccgaagtagttaagttagttacaactaactttcgtaacagaatggctgttatattattatataggaactaacttccacaacattcaatatgaatgaagtttaagataacactattttatactgtgtatgcagatatgagtatttttatggcctcttgcgtgactttccagacctaagatttactataaacgggggcataaccggtgttgatgaggtgagtctttttttcatctagctttgaatgtggacttttagactcgaaaaacggctatattatttatattatttcaaattataggctaatgcagctttgaccgccggagcccatggtgtaatgattggacgggctgcatatcacaagtatgttacaatccacagcctggaataattttgtcacattaaatattgaaacaataaataaaatgtggaaagattcaaacacccccagatcttcaaatagtgatttgagtctgaattcttgaggcttaatctcactttatccagtaattcgtcgcttctttttatccggatattttataattaatcctgttcttcttaaacagcccgtggaatgttctaggacacgttgataccgctatttatggtgtaccgagctccaatattacacgtcgtcaggttcacgaacaaactcggttgttaaacttcattgaacttttctttgttaagtactaacaattttatttaaacttctctattgtttttcaagattattgagaagtatcaagtatatggtgactctattttgtggagagatggacgtagaccaagtgttcgagatgtagtgaaggtttgggacgaaatatcttacatttttctctatgaaagattatttttcaagctgttattgtgtagttatattctttttctgaaatttttttgcagcctttacttaattttttccatggcgaacccgggaatactttgtggaaacgcaaagcggatgctgctttccatacttgcacggtatgcaatcaataattacacttttttgtgtaaatactgatttagaccttgtgtttttacaaaaattaccgattagatcttttgttttgttaaatgataaattcgatcttgtatttttcaaaatagtacaaactagtactttgagtagattttttgtcaagactaaatcataatacctctctttaattttgtaacaaatttgcatgataacaattatccaatccaatcctatttttcaaacatgatttatgtggtttgtctatgaaattcgaagtgttacaatcatttgaatcctacttggggaaatttgattcattccgaattctttaaggattccaaatgtcttatacagctttttgtacctatttgtagaccgtcaagtcatttttcgaggaagccctagtaccaattccggactttgttttggataaaccgttagccgagctgcctccaccaggccgtgaagaacttttcgctaatgtgccgagtttgttgccacccccttatgaatctcagtcaagggaagaagaagagatgatgtatgcttagtttggaatctaattatactttgcacattcatattaaacatagataagttgttcaatagattattcattgcattttttgggactcaaagcctgttttggtccccttctataacaaaacaaagttggattttttattcctttctcgatgtttatttacattatatattaatgaaacatttttaaagttttatatcacttattgaacaaaattttactttctttgtagttttgaacctattgtaagtatatacacatatattttttctagaagaagagtataaaataatttttttttttgtttattactatgttgtatttattgttgtaattgttcaaattcattgtgttctgtaagttttattattaatcataccatatagttccagcaattacaaaatctgaaaaaagaaaaaagaaaaaaggctgcagtgatacgagaatagaatagattgtatctaatatgggttcactagaaagagaggagtgattactgttcgtattaaaaattgtcttcaaattggttggtttttttttttaattatttttttaatgtcaaaaattatcttgtgtactattttatactatttcagaatatacaagattcattttgtcatttaacaaaatagagtatgataggtaactaatatatggttcaaaatagtgttaatccatataatatgatgatagttccatatctatgtttaacgctcccacttaatttgtattatctgttaggttttgtgccctaannnnnnnnnnnnnnnnnnnnnnnnnatttattaattaataaagatcagaaa

SEQ ID NO: 112022 - DNA, 3249 bp, Cannabis sativa
  modified_base (3208)..(3223): a, c, t, g, unknown or other
aataatttcctcatctgacggctgtcgtatatcacagattacaatccgtgaaagtacaataacgggacaaaatcatatccctatatatattactggtgggatatttttaataacgaataagttatatctaatatgcaactataagaacatcttaaacggttaaattttgaaaaatgcttgaaatgtttatttagcaaaatataagaatactatatataactgaagataaattggtactataataaaatattatgttgacgctattatatatatagcattaatgctatttttaaaaaaaaaataaaaaattaaaagtaaataaattgtgtgataatatttataattaaaataaataatatattaaataataatatttgagatcataattatttttaaaggtactgtatatttttgaaaataaaagtatttaaaataatatgtgaaagagagaaaataaagtattatattttaaataatgtaaaaatttataacacttaaaaaatactaccatttctaagtcacgaaaataatccaattaattatgaattttataacatgcatatgtttcttcgtcatgatctttttataacacttttgtttgtttacatcttgcctttccaaaaagaaaaggcattaattacacacaaacgctttaaaacattaataaatatattaatatgttcatgaatatgtagaaagttttatttatttatttatgtattttgagggaaaattcttttgataattaattaaaagatacaaatgttcttaatataaaatttaatttaatgataatatccaaatgggtctacactcgtgcgcattactgagctatatatattacatcttcatttaaaatcactgaactacataaaaataaaaactttgggatgattttcactcaatatttgtaaaatatattcattcataattttatcaatattatgtaaatttttctgatagatattactcaataagatatctaggtattcgattttctttattgttaaactagagaactaagccgtgcttcgtgcggtgttgttgaatttttatagttttttattatataaatgtattatacttgttgagtgattaatttaaaatatagtattttttttttgaaagtaaatcactttattcagaaaaaaagaactacacatggtcaggcttctctgcactcaaataggcagcaacacaagaaggtaaaatctctgaccaaaaagaattacatctttgagtaaaggcccacttagctaatgagtgagcaaccttattacaatctctattcacaaatttaattcctatacaaccatctaagagattactagagagaatttccaacaaaggcaccccccaatctgcccgaggagctgccttcgactggagctggtgtatggcagtaagattatcagatgctacaacaaacggtgtaaccttcaatctttgaaccagttgcaggcccaatttgatagccgagatttcagccagcagaaccgagacccaaccagattgaaaatcagcttctgcagcaactaaccggcctccattgtcccttatgacagctacagtaccatatccctgtttgccttgacagactgctgcatcacagtttagcatataggtaccttcctgaggagccaaccatctattgatcttctttattttcgttgcttttctgttttcagtgtctccctgcagaatattagcaatgtaatcaagagcccaaggagtccaactttccaatggagtattcttgttttgaaaaattcattgattcctttggctccaaaccatccaactcaaccccagaattgtttcaaattcctctttagagcagttttttctcatgaaaatgagaaattcaaccaagtccgtcatcaaaccgagaccttttgggaagaggtgccagaatccagccgctctccaaacactcttcagcttagggcagttccaaagagcgtgtccaatggtctcatcatggttccaacaccccgaacaagttctatcaatcttgatgcctctcttcaccagctcactcttcgaaggaatccagttgtggcaaactcgccacacgaaattatttatcttcggagttaacttcgagtgccaaactgccttccaccaattcctctctatcgttttgttagaagtctccgctccttgtttctcaagttgtgttaggatatacccgctagctaccgtgtaatcaccgttaattatataatcccaaagtagttcgtcctccccacaacctcttcgggcttggatccccaaaatccaaggaatgtcgtcttcatgcatcttctcctcaatagactctagattccaatcaccattgtcactcatgagagaattcacataagtattgggggacaccttgaccggggctcgaaggaggaaaggggctcatctaggaatctaacgatcttcattaattctaactttactaccatccgtcacacgccaccgtatcccctttaaaagaagctcccggccccaaagaatgcctctccaaatattagaacaccaagtaccgaggccagccttcaagaattcagaattcggataataaagagcctttaacacctgagcaaacaagctatctggttttgtaacgagtttccaaccttgctttgcaagcagggcttggttaaaatcttccaaatttctgaatcccatacccccagaccatttatctatgcataatttctcccaatctccccaatggatttgatgttttgtagttgtagaaccccacttgaaccgagctattagggcttggatctctcaaatcagacccttcgttattctaaaacagctcatgatatagaccgggatagcttggataactgatttaattaacacctcgcgaccggcttgggagaaaagacccatcttccaaccttgaagtttctcccagaccttatttcgaattagaccaaaagcctcctttttatttcttcctacaaaagcgggaaggccgagatactttgtatggttttctataaaggtaacccccagagaagtagcaagtctttgtccttccatatgtcgaatctttcgaccaacacataagttagattttctgaagttcatgcattggcccgacaaagtagaataaatttgaagcacctccgcaagagcatttccctcttctatcgttgcatccaaaaatattagactatctgttggaattattttaccnnnnnnnnnnnnnnnnaccaagtatgtttgattaacatccta

SEQ ID NO: 112023 - DNA, 7207 bp, Cannabis sativa
gatgggattgtacatgtcgtggcaacgtgacctggagtgttcggtctcaggacatctggggattttattttgttgtccctgtgcgacctggatgttgtattttagcatattttgtataaaagtttaaaaataggatcccggtgtttgtagataattacctaaattataaagtttaatattaattacaatatttttaatttgacacgtttttgagataaatctttgattagcaaagatagcactatagcgtgcttagcattagggcgttacagaggtttagaccattggaatcatattacaaggagttcagatgacttgttaataagaaaaatatttaagtctaagcatttaattaaaaatttaaaggtctaggcctttggaacccgaacctcgcgaggctagtagcattaaaacttagcaaactctgtagattgaaatgcaaatgtctaagtagtaaatcaaatagtactacgtacttaaaaatcccacgacaagggtataaaatattttctccgtacacacgaaaagggggacccttatcccctaaaagataaaaaaaatatatatataaagtttttaaagcaagataagagtggatagatgtagctacggctggcaaaatcctttggtggttaagtacctttgggttgaacatcaggcaagacctccgggattgcagagttggttgtagaaggaacatcaaatgccacaacaatgaagccatccaccttctcatctacagaaagggtagttccaagatctaccactctgtattgtgagctacttccttagctttattcgttccctccagtgctaggatttgaggcattaataaattcctatcttcagcatcaaaaagttccatcaccgagttgttgtgttgccagatagtgcctactgagtacataaaagctggttccaaagctttggtggtcttgacttcatgttcttgctttgttttgattacttgctgaagttgtcccttcaatcctgagttttctccttccagcttggtaatttgttttgggactcttcatgagctttctcagaagaatccaacttagccttagtctcctcagcccgttggattaccttttgttcagcttcccctgccttctgctacaactccatatgatgctttgcttcctctcaagcgtggtttcattaatgattttctcatttatgattcgaacttatttgtcatactcttgagataggacgataagcttttgctctttctgttagatgtccaactttgctaacttcaagtttgcttccaagtctttgatctaagttagcgcattggagtatagatccttatttttgtctctacagtccctcttagtcttggtggcttttgtccaaagaatctgttaccctctgcttaatcatagtgtccattatggtgttgccttcaactatatctttgatagcctcctctctcctttttttaggattggcacgctccgcccgtaacaccttgagttcataagcctgttgaatggccatggagtagtgcctctctgccattaagctcacttgtcgagagaaaatggcatgaatcagtctagtgaaaaagatatatcctttattttaagcaaaatcaacttatatcattgacatgggtcctcagagagtccaccaaaaaagtaggatccccactccccgtcaaggcaaacctatcagctttgagtttgctgctcgttgaagcactctggtccaaacaagtcagccaagaatggagccacatcggttcccaccctagggaaaagcctatcaatcatttcaaccatgttcatgagatcaacaaaaggcttgtcccacttgtcgtagtaagcaaactcaacgttctactttgtggcaatattgttgatcaatttcctcatgtcatcaagctcactactatgctcttattgttaaaattttccaaagcctctagataggtcttgccttcctccgtcaatgagataggcttgatgggaagattgaaatgtggaggaggcaatgcaggcaaagctgtgtttcccatagacagttggatggagatagtaggaatgactttagacactagggtggcggaggaggatcctggctgttcttggaagacccagtactccttcttagtgatcttccaccatcagaagaatcagatcccttctgagactgggctttcacagcctcctcgaagctgccaattgtaagacctaatccttggtctttatcgttgcctttttgttggctccatcatttgaggatccagtccatttcttattgatcacgatcggcccatcgcaattagaactatccgctcaagtgttctcaaaaggaaccttctgtaagggtaccacaaacaaaatatgttccgtcagatcgatgacaaaagtggataagtcttccgttcctgtagccttaggagtagcctctagatttgaagctggaggtgctagttgttgagatccactcctggaagttcgaccttttttgcccttgtccttgcattccctggcaatctctaggacctcttttgatcttgattggatgttacccaataacctgttgagtagaaccatctgaaaggtacctaattgatctacaaataaaaaacacaatatacatcacacaacaccatgtcaaaagatatgatctttcgaaaaaattattagacaacacatcaagagcatccaaacaataaatgtagctaaattgactttccccaaagaaaaaagagtaatgtcttgctgaccttagttagtctcatgcaagaagaagcataggaagtaaatcttattaaccacatccactctaaaatgatggtgcactggtggaatgaagttgttaggactctttacgatgtaatctaccttatctatgtatctatttgaaggatatctactctcgtctaagttaaggaatatggataaaatccaccttggtcaatattatcaaagtaatctaaagtgggagctcttattatatgaaagggtatctcaccactaccggaagtggtcgctcccagagcacccacatttcgcataacctcctcgaatcaaatagtaagttcctcagcctcgctcaggtcttataggaactgtctcctccaatctgtcagccattgctcattcgcctttaatgcttttagagccttttcggcagatacaacggcaatagcctattaacctattttggatcccctcggagagagtcctaaaatttttccttcacgaaaagatgttccacatcttgatgggaagcgatgaagcctaatttttgtaagttctcagttgtcacgagtccttatacttgattctccttagataacaaggatttgtacaaggctaccctctcttccaacttcagggtcaagggaaactaaggaagacaatctaatagacgtaaaaaaaaacatatcagagtatagcaaacaagaggtgaaatggaatcctaaaatttaagaaaaggaataacacttacttgcaatgctgaaatctataatgagggtgagaaccctcttcaacggggaaaacagaggtgtagaggtagtagtctctgaagtcatgcatgtactgcatggagattgtaggacaaggaaaattcttggagtagcattccagcatatagaatcctactttctccttgtggcctctcatgggttgagacatgatcttgtagaagtacaagaccttctctagcatcgtaacatgcttattttgttaagcacagaaaatgtaccaccccaataataagtgatatgcctggggaatgaattgaaaagctgctacgcctataccaacatagaagttagcaaagtagcacttcaggggctagtgcacacacattttgacatgagcccaactctggatgttgaagcctccttctgagcacttgctaggtctttcatagtgaacaaaaagtctattctagaatatccttggaacacgtttgagcccccattgggtctcgtacttcctcagaatattgtgaatcctaaacttatttatgtggtagtccatctccaatggacaattatttatcatcaatttcaaaacattttcctactctataatttcctcctccgagtcaatttcatcttgatggactcgtttaggcatgatttttgaacagaagaagaaaatccaagcagtcagccaccctaactacctaacatagagagggagctaagggtcctcccccataaattgagtagagaggtcccaactagaataactatctacaaatgagaattctcaggggtcattcattctagataggaagtcaagaatggaaaagaggaaaagcaagatggatgttaagtgagagcccaaaaaaaaaaggattttgggggtgggaaaattttgctagcatgtctgctgtaaaatactcgacttcaaaatgttctaaattcaacaaataaaatggtttacgatgtctaaatctatctacaatggcagtaatacagatcaaaaccctaattacatcctaaaatagaacatgcaaaacttataagaccaaatccagaaaacacagttcagagatgaagaaacaacaaaccttgtatcgaaagtagagatgttagggtaattgttgctgcgtctggtttgggaagttgttcgcacctttcatgaagataagaggctaaagcgatcaacgaattgatttctatgttgaaatccaggttcatgatttctcttgctataaaagtcttgatcaatgggggttgatgatgtgggaattcttgtggccttaatcctaaaaaataaaaacgaaggcaaaagggtacaacttgttccaaattgaagaagatgacttggttttgaatttgggtttcaaactcagaggatgcagagaagattatgtgctttgaagggtaaaaatttgaaaataagagaaaagtggtaactagagttcacaaaaggtatttatacctagaaagagcaacccacatgaaagaagatagatggtccgtaatctaatctccaaaaaaataagtttcatccaacagctagggagtttcgcaatccacgtgcatctctacaattaatgctctcgaagatcgtggcacaaatcaatgatgtagatgctattttttgatttttgcgccaaaaagtgaacaactatcaaaatatagtcatttttggaaagcgaatcatcgattgtcgcacctttccactgccatacgattggcacgtggatgtactaaactcaaaaatggaagccaccttccacgattgagtaacacctaaaaattcatgattttattcctcaacctccacatgtccatattgaaggagtaaagcaaacatccaccttagacaatattctggaagcttatggggtaaatgttattcgcgtttctagcaatggactcttggaatcaaggtcagcatccaaggcccatcagtaggtccctcaatgaagataaagtgggaaaaggccattttaacgagtcctaccaggaacatatcccaattctgcgaccatttagccttccgccattggcaactcattcctgaagactgatccagttccccattttattcatacgcaaaaatatgtaaacaataactgccaaatccccacagaccatcatatcaagttaaatggggaaacttcttgaaatgagtatcatggaattaattcacagttaatttcccacaatcaaagcacacgatgttgaactaatcaagccaaataaaatctacctagttagcaaatcctctcctttttgggctagactgcacgagacagtccaagtgtgttattcactataaactcctcaatagagggaaaatggaaactaaatgttattctcaaactagtatagatacccatttatggattaaggattaaggattaaattcacttacaaaacttgctcaggcaaacttgagaacatatatgctctgcattcctaaaggcttttgaagctgagaactactgaataacactgactggtggactaaggctaattaacgccccaaccacgtaaaaaactgtttgtcactttttactctttcatttttaattatttgtttcttcagttcttatcatttataatcactttccaaaaatctcagtaaacacaaacatttacaaataatagtacaacaaatatgtcacccatcgactattagaattgggcccatgatgtcctaaaaatttaaccctccaggtctaatcatctcaatatgtacaatcatcatcgagctccacactaattgctcattcagtctttgcctttcctttacctgcacatgaagcagatatttgtgagtcaacagactcagtaggaaaatcataaaaacatgatatataatctagctctttcacttaggcgcccataaacccaattataaagtaattatcacacatcctacatctacgagtctcaaacattctctacaagattacaaatagttcgtaccccattgaagttgtaatatcctaataagcctaatggtaagtaattagggtttatatttatattatgggttaatcaggttttaattgacagaattgatgagaatattttgataagttgataagcaccctagaagtataaatttcttactggctaagaaatgataagataataataaataataaagtttttattaatattataatattaatattatattactattttaatataaacttaccagtcgataagtttaatatatatatatatatattatatgttataagttataaacagtaaaacaaaaacagaacgaaaccatccttcttcgacaaaaaccctctcctcctatattcattttctttgatttacaacccgaaacctagcgatctaagctcaggtagtagtgggatatcaaatccttgaagaggaacaacttaaggtatggtttaattttgttttaagctgaaaaacgattagttttatatagtggctttatgatttagagtagttatggagattctaactttgtagaattattctttggtagttatgagactagttttgatttttacatgttcaattagaggtgatattgagcaagatatcgagttgttaattttttaaagcttacgtccaagctttaatggcattttccgtttaagggcttgattttaatttttgttacgcaacgatttttgtatatatggtttatatgtgccctgtgaagtttggagtgatttggataggtttcgagggtgttttggtgagtgcaaaaattgagatttt

SEQ ID NO: 112024 - DNA, 5603 bp, Cannabis sativa
tctgcatttactccaacttacttcaaaatgccaagtaatattgatgtttcggccatacccaaagtcctcccagttcagcaatagatcaataccatgtgtattagtgttaggtttataacatatctgagctgattcaaaagccttgatttattttattatattatatctctcttttgggatttagctaaagataaaagttcttacaggtttgtgtgatgaaattactaatcaaattacaataaatattttgacttctaaaaactgtgttttattcgttcattttaattagtataacattagcaactcaaaaaaaaaaaaaaaagtaataaatcaaaaaatagtaattaagtcaatctacattagaattaacgaaacaacttgactatgatttattcataacacaacattaacaccatcataatttttgtcaattttacaagaactaacttgaccatgatttattcatagcacaacattaacactacaataatttttgtcaattttacgacttaagtcctattctttctccagcaccaaacgtaatcgtacgtttcagtactttcaagagataatattactgataccagtgttcatagcattgaacaaaattaaacaagtaattacttggcaaatttatttaattaagtaattaaacatttattatgtatatatacagaaatgatttattttcacatagttaagttgccccgagtcttcttgtctaacttaaatatacttaatgaattttcaagttttctaaatttgcacaacttttagcaagttcggttgctagtgaacaatcattagaataaatattcgtaatgaaaataaaaataagtttagaataagcgattcatgtagatttttcaagatgtaaaaaacagacctccaatatttctgacaaaaataaaaaacttttgggttgttgcttttcaactgtaattttcttgataatacgtgcaaatttatcaccatcaaaatttgaccactactaattgaaacatctgacaaccatccataagttactataacgcacaattagaacaaattaaaattgtctaatggtacagatgagctccatcaatataaatcctctgactctgactatatcataatcatagtacacagatagatgtatagaatagaatcaatggccgtctccatctccaatttaactgattttttaaatttaatgggaaggaaaaaatcacattggaacaacacgggccttgtacatacaaatgtaggccatatgccaatcacctgaaacagaaaacaaaagaaaaagatttcttatctgaaaatttggacagtaactagaatttcatgtagaatatttttgggtttttcttttaatttacctcctccggagagttttgtgatgtcttcctccctctgtgggatgggattatcatcatcatattcaatccatttccctaagccacaataagataacacctaatcagtttaaaatttgggaatgcagacgatatttcatgcatacaaccagctcatcattctaaacaactcaccactttcttgcttgacccaggccacgtaatgtcctgagtcagcactccgacccttgtgtgtcagcaccgcaaccaaatcataaactccggtcaactgtgtctccttctcagatggaccacctgcagaagaatgagcctaacagtgaagacgagcaccagaacgagggattcagtgacccgtgtaaaattacagaaactattaccttcagcggacttagaattagatggttctccactttcgttggatgagccctgattgaagatgaaaaagatgcttagagcacataatcacatatgggccttcaaaatattgtgtaaatggattgtgcatagttagtttacctctgcctcagccatcttgacatcattgtcttttgaagcagagcccttggctttcagaccaagttttttgccttcttcatcccgaagtttctttttcagaaattaaaaatagacatcacagaataagagcatctatcaatattgtgtatggatgatataaaaattcaagtttgtacaaattcacaaacaagcagatacctgacgaggagcttccaactttttgcgaagttcttctgagcagagatcataaacatccaactccaaaggataatccactttctgagatacgtaaatgaataatgaagataacattttccattaaaagaagagaaagcagatatcatagctagctagtgtaagaaaattactgtaacagatgagcaatttctagcctcattaaggaaatcaacatattgggagaatgatgttagcaaataaataacataattttattatgcatttgtatgtcacaaggaaaggtacgaaaataagcatcacccgcaaaatcttggccttctgatttgattccctcttccagaaaaagcgaacaaactgaatagttaagtacctttcaaaattttaaaagaagttagaagcaatgagagaaactgttcaaaattcagaagtcttgccaatgctactaattttgttttgaagtgaaataaatggtggaaatcttctcaagatatctttattgcttaaaatgttaaaagtgcaaacaaccatctttaaaatatttaaatacagaaacaataaaaaaaatgctatgtaaaaatcaagaactaagacttttttctacccctctagttaagaatgttgtcctaatatatctggccaatacaaccaacaaaaagtgataatagagaattctatggggtatttgacacaagtcagagaacaatgcagtcgtatctaaaaaggaaaaagtcatctttaccttggcaggccattgatacgagactccttcacatagattgcactacgccccaaagagggagaattcttttccagttctgattttaaaccctacataataaaacaaagaaagaatatttcacataaattactaggatgaaaagaaatatgaatatcttccagaatagggataaaatgcacatataatttagaaagaagtgtggacaagaacaaaataaaaggatcaagctgtaacggccattgtgaagaaataacacaataatattattttcggagatgttagtagacttacatgtttcagcccttcatgcaaatggttcacctcatgagatatgtggcatttaagggtgtgaactgactctgattctgaactttcttcaccactttcctggcagtgaaccctagcaacccagcacaccaatcgtaaagaaattttcaagagcaacacgccacattactaaatcatttaataaagtttacacaatcctatctctactgaaattttaatctgcagaatattctagtttctagttagaataaagaataatacattgcagacatctaacctgcttacaaagtcgatgccaaatagggacttaattgcatctgggttttcactgtcaagagaacatgataataattaatacaatttgaatgagtacacatgttagaacagactaaagcaacgcaaagcaaaaaaaaatgccaccacttcgaaagttgataaagctggtttgaattctatgacggaaaagtggtctcattcatatcatagataggtaatagcttaaaaacaacagcagcaatacagcttttagagggccctctcttctcatcaattacttgtttcagctccaggtgaaatattaaattaagtgagtaaactagaaatctagagtgccatgccatttgagacatgtcatcaattaaagtagttaagaaaatgctaaatccctagactgccaaagcaaacccattcctatattctatccaacagaaaaataataatttatgttacctggagcctgctgacctcagagactgagaaagagtgtatagaagttgggtccaacattcttcagcatcctattacagatttagatcgaattgatcaatatactatccaattaaaggaaggagtgtagtcaaaacacaaatcaaagagaacttaaaaacctgttgcatgaagaaattattatgcatctgaccaaactgagggtactttttacgtaagacctgcaagaatattgcaatcaacatcattcaatctttgcgcaaacaaatcctttatgaaattatgacaatagtttctatgagattgcaatgcagaaaattataatttgaccaatttctgaaacaacaaaatgaagtcgatgttaggcagcattataagtgtgaccggctggcaattagactagtttaattattgtaagggggattgttgaagaggacaagtgacaaatttataggttagtggttagcataagaaatgagaatgctggatgagacgtacaaatcaggttcagtcagctttcggggctgagtgtgggctgagtgtgaacatagaaaattagtgagttaaattgtggaaagtggtacgtagaatcaataaaacaaattggcaataaaaatgaaaaagacgaagtatgtggaatcaatacagaagcataaattgacgataaaaagaattaatgaggtcaagttttttgaagtcattaaaacaagaaagaacaaaattaaaaaaaaaaaaaaatcaccaaaagcaaaacgaacagctcgaatttgagccttactttaatacaattaaaatttctaaaaatttgtcttttctaagacaacaaaatgccaaccctgaagagtgtagctttctacctggaatagtttacttatgatacataaaaagtttaccattaacttataatgaatttcaatttgctttgggcgtcatacaaattaaatcttgatgatatgatagaagtaggagcttgagataaatgccagtacagtatcttaagtaacaaagtgagacaaaataacaaaccatccaaaattgcattggtgctacagccttgccacttttatccagttcattaaataaatcatgtgtcgctatggtcaacatgtgagaactctgatccacatcgttgcttttaccagactgtgaatagctgagcaaagataattttacatcttcgtcactgaaatgctctcaaaggtaaaacatcatttagtagggaaaagagaaaaaaaactcactttattaaagcagacttcaattctggaacagaatgcagacattgtacagtagaattcatgtagcaggtgtttcccaaattaaataagccagcaccatgaccctggaatcaaaaaaggcattggaagaaaataccaaaccgtgatgcagatgaagaaattaagaaggcaaaaaaaggatactcccaggagcttaataaaaaaatgagaatgataaactaagcttaaaaatcaattaagaaggtgaccttccaaagatatcctaagcagaaaagaaaaatactgtttgacaggatcttaaacactatcagagttctgattttactaccccacttaataaccaccagaagtgcagcaaaaatcataatgacgaaaaaagtaatgataaataactcttaagcctcataatacagaccttaaataaaagagtaatttgcggcaaaacccccccagctatcaatttgattgcaaaaaaccatccaacctcatattttggtgggaaaaccctccaaagtattattccgtttacatttttaaggt

SEQ ID NO: 112025 - DNA, 3662 bp, Cannabis sativa
ttcaagtcttggtgtaattacttttacaataataaagtaattacgtttttcacgtgttgtggtgtccaacatgtggtactgtttcactatcacggcgacacaaagcacaaattagagagtcagaaatatgtcttgtatgaagagttgcaactacaggtaggcaatcatgtatcgcacgccacaaaaaaattcgaaccttcgaaggtagtgatagttaccaaatttttttccaccaatattgggttcgcagtccacttacactgggttgttgttcctccaaatgggtagccaaaaaatagcctgattgaacaatgtaaaagccattagcttcatgatgccatatgagttggtcttgcgaagaagatatagtcaagagaatactttggatcttttctacatccgaatctaggaacaacgtctttaagagaggaaaatcccatttatgcgaatcggtaattaagctagagactcttaaatttcgatcaaatcccgtaaaaactaatggttgaacatttaagaattcgggcagccaaggatctgtgccacacaaaatattttgtccatcttcgactttccaacataaccctttagatagcaattctttaccccaaatgatcccttgccatgttagtgacatgtaagaaccatgaccagcgtctaacaaggatgaatgtttgaagtacctaggcttaagaagttgacttaggagcgatgtaggatttgagaaaatacgacatgcctttttggctaataaaaccttattgaaatgaacaaatttcttgaaacccataccaccttcaaccttggattggcaaagagatgaccacgttttccaatttatataccagacccagaagaattcaaacgctaccaaaatttattcatcattacttcaatttagttgacaagagactttgagagacgaaaacaactcattgcataagtcggaatggattgagcaacaattgtaagtagaatttctttgccaccaatcaagaataattgttcttgccatgttgaaagatgcttttaaagtttttctttaatctccccaaataatttttttttgtctcttcttaaataagatggaagacctaggtgacgctcatggcatggttgaattggcatgagaagaacttgttgcaaatcagcttgaatggatggtaaagtgcttggcgaaaaagacaaaatagacttcaccacattcaatttttggcccgaggcacgacaataaatatcaattcaattcttcatggctgtagcagaacgcatgtttgcacgacaaattagtaccaaactatattaataagcagcttttgaatatttcaagggcaattcaagcatcaaaatacaagggaaaagaaaaatctacaatacaaccaaaaaattataagaacaaaacaaatcccattgttaagaaaagtaggcttgcaaaatcactagtcttaaaaccaaccataaactaaatattacaacctcaagataatgtagccattattagcaaagaaattaattaagacagagtttacaagacttgtgctgaaaagttttgagatgactctcctttggctatagataatgtcttcaaataaggagaaatacacaacagagtatctctcaactctgattcccgttctggtttacattcagtaaaaactctaagatgttccaatttaaccaaaggtgtacgactcacactcttcatatgtccaattacattcttcaatttcttgggaaatatgagagccttcattcaaagaaaatatgaaaaataatcaaatatacattaaaataaactaataatataaaattgaaatgaaataagatataataagtaataaacatacctcaggtttgtcaacatggattgttaccacattccatgaacaattgagatttataagaaaattaatcatattgataaaccaatctatgtcataatgcttccgccgctcaacaattccaaacgttccattcaacaaattggatgacaccattgaaataccaaaatttatgttaccattgtaacaaaatgatgctaattttggagctgattcaatcacaacattcatttcatcatcataagggttattcacatttaaactttccaacttttgattcgagattttaattctcttcaacctcccttcactccagttgcttaacgtcaatttttcaagaagaggaagattcgaaacgaaacgttctaatgttggagactcttccatatcccaataacaagttaaggaaagatttttaatggtcttgcatgaagagaattttaacttgtcaaacgaaactcgttctagtttcaaagattcaaggttttttatttcgatttgctttatcattctctcagcaacactttgaatcttaacgagtttaatctccaacaacttgaggcttaaactacgtatgtgtagttgatgtgggtgaaaagtgttgtaataacaatttaacaacaatttttcaagtgaaggggttcctaacatgagtttatctattacaaatctattcgcaatatgaacattaatcattgtaagtgattttaatgatggaaaagtgaatacacaatatctatctaactccactccattcaattccaaactagtcaaaaattttgcatggagtactaatgagtttggtaagcgaaagtaattttcgccatactcatctggttctcctgcgtttaagcaaagacttacatgcttaactcttctcaaaactgcgaaagctaaccatttatctatgtaacgacctgtttttctcttataataacaatccatttgaagcttaaaactgtttaagaacgagtcgcgaatgaagtacatacctctcttgcggtgttccaaacaaaggtctatataattgagagccttttcttgttcttttacagttttgtaatttgtagttgtaatggagaaagagagatcggggattaaataccacatgagtttccaacgatgtgaaagaaaactagttgaaacgacatcaatagttggaagaaacgacagtatatgtagaatgattgcatcaggtagattcgaaattctgtcctgaaaatcatctaatgcttttgttgatgatgatgatgatgatggtgccattttaactctttttttatgattatggtaagtttagattcatattatggcttattattttatagtgtcacacagtcatgtaagagattatgataagagttattttcggaataagagtagtaatatttgcatcaaatttaatctattagttttgagtgaattaagtcaagagttggattagtcaatcagttacattagatttagacgtggctgtttttttttttttggctttatatggctatttgagtggattattgttatgtaaataaagacaaaaaagtcattttaaaaataaataataaataaagacaaaagacaaaagacttgtttggtagatatatgcagaacaaaggcataagctattcaataacaattggaaactattttggttctttaccaattttgcatattttcctcttgataataatttaaatatagcatgtgtgatgagataaaatacagtaattaattgtaacagagcagcctcttatttagcttaatttgattagtttgttgtgttagactatatatatagtgtatgtaatatagcatatacaa

SEQ ID NO: 112026 - DNA, 5039 bp, Cannabis sativa
  modified_base (26)..(43): a, c, t, g, unknown or other
tttcatggaattttaaatatttttannnnnnnnnnnnnnnnnnttacagaaaatacagtttttttatgttgcaatcttgttaatttgttgttgattttttgttacacagtagaaaataacatgtggataatgacttgacatttaagatcaggtatctatagagtttcaaaaatataacttagttataattactgctaaaaattaaacttagatatttatttacaaccgaaggttaaacttaaatatttatgcaacaaattacttttttttatataattaattttgatatttgattaactaaaatcatttctaataaaatgttaatgtattgtaatattttagtattaatattgtaaaatataattttgtgtcaaatattatatatactatttatttttattattattagctttttttttttttaaaaaaaaagaatggcttacttattgtttataagaaaaaaaaatattgacttccaaaaatttgaaccacataactccacaaaatgaaataatctctatgtcaatttacttttaattacttattaaatttttaatttttcaaaaatatttaaaggtgactttgatgaataaactcatcacctctaaggggaatcaatagctctttaccaattgagctgtgtaaattttgatgtacatagtgaaaaactattttacctatatttaaactatgtattgtatatttaaaaaaaaacaatgtactatatatgtatatatatcattttttttagtccccaaaatagtggtgcttggggcctaggccctaattgtcccacttttgggctgtccctgattgatgtcacctccctcaacacagatgatcataagaaaaggaagttgacgttggaatgggttatgggtttggagatcattgatcccaatccaatcataaaatctaagttttcgattagtttttaaaacgctgatcttaagagagagactcaagaggatgaagcttttaactcaaaaaataatttagctttcatctcaaataatataatcaagattcttttgtgaagtatccgtagactactataaagaagaagaaggtggagaggaggaaataaagagcaacttatgttttaggttttattcatttattttttttttcaatttgagggaaaagaaaggagaaaaaataattaagatgacaaattttaacaagacatatactagatttgaagtaaaattcacgatttacgttttttttcttttaagaaatgacaaatattcaaaagtatacattcactttaaaaaataaaaaaataataaaataacatcaaaaaaatattcaagtatttttcaagaatgtaaatttaattacgtgtcaaaataatattggctagaaaagaactccaaaaagagcctctacaataaatattatacaatataataaaataatgaagaaaaagaaatgtcaattttttttgtagacggtaaataacaaggggaggagagaaccaagttacagctacacaagcaaaaggagagagaactaaactctccaaattgagtccttattaagccgaagtgtatcacgagcattttgatgtgcttcacagttctcagtcctggggaggtggcgcaaggatgcattatggagaaaggatagggactcttggatcaactcaactaggcttgaaagagctgagtggtctttccacttgcttcgaactttagtgaccacttagaaacagtctgagacaatgagactggattggaggttgattgcagagcaccatctcaggccttccagaaaggcttgagcttctgcaaagaagggtgtggaagcaccccattttgaaaccgaaaggcttgcaattgtctgattatcccagttcttgattgttgctcccaaacctgtccgaaactttttgaagtcgagggctgcatcaacacttaacctttaattgccagggaggagaacaggatttaaagaagtgcagttggaaagactattctagtatgttttggtagcttctaacatgttggcgtttgtgttttaattttgagcctcttgataatcctgcaacaagctaataacatattcctccacatcaatcatgttgttagagtaatgattaaataaagcattattccttcggttctaaatttgctagagaatactaataaacaatgtgaagttctctttgctaagatggtcaaaacctctcagataatattccttgatgtcacacttgtggttattggtatagatatggtggagtgaaagtgcttctaaatggacttagccctgggataatctagaagtgcatgggtgactgtctcaaccttgctcttacagaaggaaaaaagaggttcgctaagtttttttttttttttgttaaacaggtttaaggcataggggatgatatggttaaaagctttttaggtgaagtgcttgatttttagggggttttgatgttccaaacaatttttcaccagtacttcaaacagtcaaggttggaggagttgaaaattaaaaataatagaattgtaaaatctcagctcaagaaaatggagactgagtaaaatctatttataaaccaggccaaattcctgcgtgtacaaggaggagcctaaatggctcattacaactgtattcatttctaacagaaaagggaatcttttgtacacctaatgattatctaatcattgaaaatgcaacggtaaaaatcttccttgggatcttcaatattggctgccaaacagaaagaagccacctgttaaggcaaaggaccacataaaccagcacatggaaaataaggggaataagtttcatttgttcacatcccctctcaaatgcaggggtgagttcatcactccaagtttgtctatcaagaaatgaaaccttgagcttgatagtccctttgttagacaatcagcaacttgatttgatgagtgtatgtatcttatgtcgagttgcttgcttaacactttgtcacgaatgaagtgaatgtcaactttgatgtgcttagttctggcatggaaaacagggttggaatccagggcattttctcccatattgtcacaccaagtgatagccgtgggtgttggaaaatttagttctttgagcatagattcaatccaagaaatctttgctgcaacatgagctaaagcacagtatttagactctgtgctagaccttgcaacgacaggttgctttttggatgatcatgacaccaaggtgttcccaaagtagacacaatagccagctattgatcttctatcgtctagcaagcccaatcggcatccgaatatccagtgatgtgaagtggctcatctcggcttatatggaagcctttatgtattgttcctttcaagtatctcaagacccgtttagcaccactccaatggacagttgtaggagccttcaagaactggctgagtttgttcacagcatatgagatatttggtctagtgtgggacaaatattgtaggccacctattatacttctatactcagtaagattaggcagcaactcaccatctgttagggacataggtttcccaactgtagacttcaaagaaggggttggacagggctttatgttagtgaattttgttcttcaaagaaggtcttcaatgtatttagtttgagtcaagtaaagccctgtttcatctctgtagacttctattccaaggaagtaatgtaaagagccaagatctttgagtgtaaatttcttgtttaattcaacaatgaaactctttaattttctgttgctgtttcctgtaactataatatcatcgacatatatcaatgcaatgataatatcagttccatgcttgtagaagaagagtgatgaatctgattttgaatttttgaattccaactaaccaaggttgatttcagcttgtcgaaccaagctctcggagcctgttttaagccatataatgacttattcaatttgcacacatagttctctttccctggttcctcaaagccttgaggttgcaacatataaacttcctcctcaagtgttccatttaggaacacattgctaatatctaattgtttgatttctcattctcgagtcacgacaatagttaaaattattcttactgtagaggccttgattactggactaaaggtctctccaaaatcaatgcctggcctttgatggaagccttttgcaacaagtcgagccttaagtctctgaagtgatccatctgagtttagtttttcacgaaacacccatttgttgccaatcaaattatgtccagcttttgaaggcacaagaatccaagtgtgatttgctttgagagcattattttcacactgcatagccttgttccatttaggatgtgcaagagcttctttgacatcacaaggaagtgttgttgctggtttccatgctgtctgtcccatgaaaactcgaggtttaaaaattcgtgcttttgctcgagttatcatgtggtgtccagcagcagctagtatatgaatgtctggtgtaacattagtttcttcagaatgagattgaccagaattcgactcattgatgtcaatggctattcccctctcaacacctgaaatcgaggaactagaaacaacagcaggtgacagatcagtaagagtagagttgtgagaatttacctgactgtgtgttggagaggaaggtggttcttcaggtgtgctcaaggatgaggggatgtggctggaatagtccctgtaggaagagtgaaagaaggtaggatagaccaggaagaactttggatgatcactggtttttcctgttgatagttatttagaaaaccaagtttaaaaggaaactcaagctcattaaaaacaacattcctagaaatgtagaattttccagtaggagtaaggcatctataacccttatgagactcactataacctaaattgacacacttcaaagaatggaattggaacttgtatgtttggtatggtcttattgtaacgccctaatctataggaacgccacgtgtgtgaatttataaaactagtttaatactaatatattaattaattattaaaaactgtgaggataataaaaa

SEQ ID NO: 112027 - DNA, 1756 bp, Cannabis sativa
  modified_base (82)..(87): a, c, t, g, unknown or other
ttttctatcgcttactatttgactcattgtccttggctaaaagtgaggtcaacattaatcaacatacttattagtaaatctnnnnnntggtaaaatattcccaacaaatagaccgtgaattttcttgatttgatgccaaagctaacattggaatcgtgatcaatcattgctttagctcttgaatcaaatttcacacctatttggccatattaaactctatttcttcttaattaaacctgataaggacatagagatttcgaaaacccttgcacaaggcaatggtagcaactaattaaatccaaaaagcttctaaccttggggactatcttcggccttggccaaaccctatcaaattaattctttcccagatgaatcataattccatctttactaataacgtgccctaagaaagacactcagaataaccaaaattcatacttcttaatttaatatatacagtctatgatgccatagtcgctacaaaaccatatgtagatgttcttcataatctgcttctaattgaaagtacaccataatatcatcgatgtttactatatcatatctattgaggaaatccttgagtaccttgaataccaaatctataagagttaccggagcattgattactccccaaaggcgtaaccataaattcataaggatcatacctagtatgatgggtagtccttaagatatccttcactctgattcgcaactaatgatagcctaagcaaagatcaatcttggacaagactatctttctttaaaaccaaccaatccaaccatcgatcctaagtagagggtacttattctttattatcaacttgtttagttcttgataacaaatgcatacatgaagcgagccatatttcttcctaactaataacaccagaattttccagagtgatacacagggccaggaaaaccataaattaagcattccttgaaattataactttaattccttaaattctattggaggtattatgtatggtgccctagaacccacctgtgctccacaaaccaaaataacaacgaagtctatctttgttgtagtgataattttgaaagttcttctagaaatatatctaagaactcttgtaccactccaatatccacaggctgagttgcctcggctaggtggaatctaataccactgctaagaattcttatgcatccatccagctataaatttctagcttttatcatcatgataattggagttcgagtaccccaaaccaataccataatacgaatgatccttcaccttcaagttaaaaagttaccatcttttgcgtgcaatcaatactagcagcgtactcatacaagaaataaattttgagtaatatctcaaactctgctattctcaaagctacgagatcaatgttcaacttctatccttaactaattctctgccatgtaataaggctgcaaaccctatttcatatctatctcaaggcctacctaatttataaatgatccagactaccacatattaatgtgtagctccaaaatcaattaacacagagtaaatagagtagttgactagaaattgacctaacaccactgaaggactatcttcagtattagtttgggtagtgacaaacatctaatcatggagtgggttttccctcttattttggttccgtcctctataactattggcagcctctcttgtagtgccctaccaaactgttggaaatatttttaccaggatcttagatctactcacaagcatgttgattaacaccctaaatat

SEQ ID NO: 112028 - DNA, 6255 bp, Cannabis sativa
  modified_base (45)..(52): a, c, t, g, unknown or other
aaaaacacagtatttttgaaaagattttcgtgtgacagtattttnnnnnnnnttaacccaaattccagtatttttataagtttcccttttgttttcacattgggcttgggaccgactgatcaaattcaatacgacaattacaaacctacacagtaaaacgacgactacaaactaaatacaaaatgtagttttctaggcgcacacaaacggcgtcgtttacacaattacagccttctgatttttcaactaataacctaacactgcaaaattttgaaggaaatgtaatgaagcgaagaatcagagttgagtaaagagagaagagttcggacacgaaaaagtgagagtgatcccaccaacttgttgggcaaagcttctcaacattaacttgcttttccactcattcccttccttacccagaattagagagcaaaaccccagcaacagacttactccttcattcataatcaatctctaatggcggagccctcatcatcaccaccttcacctccaacggaatcgcttatcaggcgatacaagctcgtttggcgagtacttttgatctctaatcttgctcttggaggtaagcttccaactttttattcttttacttacctcattgaaagctttgtgttataacttcaatttgtgaactttcaatgttttactttgattgcttgttaatgtttttattattattttcgttttttgaaatgtgtcttagctgtagcttcattcgaatgatttgttttatgggttttggttatggagtctacggtggtgtctgaagttataaactatcaaatgatatgtgttgttttataagagatgaagctgttgttataaaattagaaggggcttttttttacggtagtactgtgtaatcaaggtttgtttggtctgatacatagcagtaatcatcttatagagacctggttgttgtgaaacatgtagaggttcatttgcaattacaggaaaatctgattactaggtagtttgccactttgattatattgatgatgcttgagaagatatataatgaaggcaacaaacaacttttacgcattctgtcgtttttattattgttgttgtgaattgatactaatttgtgattagtccttagcattattagccatgtttgctagtttagtacagtgtgtgaacagtgagcatacttttttctgcatcatttaaaatgatagacctcttctgaccaagataggataattgggtccataagtctgccatttgaggtcaatcatcactgcacccttctcatattttgatgcattaaaaagctagctgagtttacttgtttggagtagaatttgatattgaaggtggtgaccattcagtttgttgtaatttgaaatcaagaataggactcatgttgtggacgctgagttgtgtttttatttcttgcagcttacatttttgcaagtcctagaaagagagatgccagcgtagtgaacaagaacaaagcttcggaaaaagctgctaaagaaaccaaagcagaagaggtagttacaactgaagaggaagttaaagcagaagaggaagatccctattctattaattggcccacttatgattatgacacagcaacattccctccaccagccatgaaacctttgatggttcgagaaccaattcccgaagatcagcaacgtgagcttttcatatggatgctggaagagaaaaggaaacttaaaccaaaagatcctgtagagaagaaacgaattgatgaagataaggctgtacttaaacagtttattcgtgcaaagactataccgaaactgtagttagtatttttttttttctttgttgagaaaattttcttgtagagaattactagagatggggggccgtatttctgtgccctgctgtttcaagatggtttttttagtgtccaatttgaaaatgagagagttctgattcttcttgaaaaccctggttatgaacatgccaaaataggcaagacatggctcaattaagttggcttggttgcagtgaccacgaccttcataatgagaaaatcatgaatgacatggtattaaaagataaattaaccatgaaaaaaaaaaaagaaatctagtttagcagaaagggtactcctatggtcaaatacaattatcatatatgttgactaagaatcaagaaagttagttaagttggtttactatatgacaattatttttttaacattttccggttcaagtgagaaatctcggtatattattacatcaaattgttcataatgtgaatatgtgatctctctccatttttagtgaaactgaatttacttaatttattaattcaaagttggtggaagagttttaagttacaaacatgtcaaatatgaagaaatttcagaccagtaagacaaaatttgagaaatgtcttcatagcttttgtgaggtgtaaaatatatttttggaaattttatggaccccaccatctctcttcccaaaccacatccacacttttcaaccaatatcctatttttcgcacctctttctttgatgatccattattttgcaaaagaagagacaacacacccataagccaaaatttcaagctaaaatcagagaagcaattcttttttacactacttagtacataaccctgctcttgttttctctttttaacatcttttggagcaccaattgtctttgctatgccaggaattatcttagtttcaggtactaatttacttccatgacttgaattttgtagttctaacatggcaaattacagctatactgactcctttcatgtgatgtaaattcatcaaagttttggaatttgtggaccttccagtttcatcaccttcttcatcaatatcaataaaaagtaagggaattgtctcttctttaaaccaattttcttttctttaaatttgttaatttaaactaagctgtcattgtaaatgcagtttcaatggggaagagagaataccaaacttgggacaaaggagaattttccttgtaataataagtgctcaaattcaatccaaaaggctacacttgattcttctttatttaaagttttaagctttggtaatgatacacagcttctgttcatttctacagcccattgacaactctccgtgacaatttgactgttgttcttcagaatgctgagggcaatgagatatcacaagcaggtttatcaaaatgtgctccatacaaacatatttatcaaagtttttgaactaatattgtaatctatttatgccttaagcaggtgttgaaaccaagtccatagttgaaaaaggtctttgggatgattttttccctctaaaaggaggtgggcatgttcacatgaggctgcagtttgtactcaatgaagacgagcggaacagaatccgaatgatggtatttctcaaataagtctgttccatttttcatttcttagtattaaaatgaagatattgtgtaaatgtgcagtctcagtctcagtaattagcatatgttttcatttttattgtagagagaatctgcattgaaaaagaaacgtggagaacctctcgattgcagaactagtagtagtgttgcagttgctactaatgactgtagtcaagttgcttcacctgtttggcatatgatctcatcaggttcgatattgttcaatgtagtaaaagaatcagaataacatgaattcggaacaaaaagttagtttttgcattacacattacactcttggattctttttaatggttatgaaactgttttagaatgatgcagataaaaacaaagagacttcatcagccattgattcaacccaaagagttgatgttcatctaagaagaatcgatcatagggagtcaaatgagaaagttgaggctcaatcattttcttccaagactcctacaagagctatgaaaagttcagaatcgaattcttctcgtgggagacgaggatctttggagaggattcctagtgtcaagaaaatgataagtgcctttgaaactaatgtagatcaggtatataatctattatgtgctaagttgagctgagctgattaacaccttatgatgattcacaattgttaaactacattaggatatgaagcctcaaatcaaatcacaacaggaaaaactacaagagaataagattggattggagctcaaggaaagaaagacagtggtgaacatgaaaactgttcagggtacttcagagaagttggagaagtggagtacagtgaaaggtacgaaagtcggtcctaatggtatattaaaactagtacataaagtagacttaaaggaagaggtacctcatgtagatttgataagaacatcgaattcagttaggcccaaaagtcaaaatgatggtgacaaccaaaattctagtggtgcttcagttggtgagaacagtgaagctgatgtttctttagaacattcacaaagctctactcatgatttgacatcagtagctgagtatgaagatatcatgggtgattcttttaagggctctgatttatggatattcccggatcaactaagacgattctgtgtaacaacaggtggtcagaagttgatggatttaaggggaggttatagtattaagccagaagttcacaaagagaagatgaacttctcaacacaagacaaggtaatattgttttcaaggcatttttttggctttaatgaaagcaaaactctgatcttttggcttttgtgtgtattctaattaatttttctcatcatttcagcctaaagaagatggtagtattgttaaggagatggacagaagcaagaaaactcacaaagtgagagaattaaaggctaatagtgaggaggttaaatcttctggtggaccagttggacaggttatatcttctcctaagtaccatatagttttatgttattaaatgtcttcatgaaggtttatcattgttatgacttgtcaaataaaacggtgctaataccagttttcctgttcaatgttttcttaacaggccataaaagttgcaatcatagtaggatttggagtacttgttctctttaccaggcagaaataacatgtgtatatatgtaagattgtccctgagttgttttctccaagaaaagtactgtgaagtgaaataggtactgaattttaatgaaagacatacattgttttaatatgctatttgatttcatgtatctatgccttctaatttagggtcttattttctatgtttcaaataaaaatcaggcaatggtattgactattgattgagcatcggccatgtggttttcttattcaccttttgatatgaattttttttttttttctaaatgtattatttatgtccatgtgattaatttttcttgtatttcgaatttggaatcttcggttgtaagattaatctcacaactttacctattagcttaaatgatagctaaatgatgatttatgtcaaattttgatcatattaaaattgctctattctattcttcaaaatattttatcaaaagttcattgtttttttttattttatctaacatttttatataataccagcttttctttataatttattttatatcattaaaatattatatctttaaatactttattgattaaaataataataaaatagtgattaaaaaaaaaaagaaaaaagaatattataatatttaatttggagaaagaaataaataaaattaattaaaatattttttagcttacatatgtcttccttccctacatttagttaagggttgagctaaaatagatgtggagctaaaatatctcaacctttagaccatcttccaaaaattgtgctatatttagcacaaaaaataattttgcggtaaatttacattaactttcaattttgtgctccaatacacaattgtaaaactttaaatttaaatttaatatctaatttaatatgtaatacaataaaaaaaaaataatataaatattttataatttaatgttatagttaaatatactaataaataatacaaatgatataaatacaaataaaaaaaaatagtgcatttattgtgatgtaaattttacatcatagcaaatgtggtgccaaatttggcacaagatttgctacgtgtcaaatttacatcacttttggcacaccattggaacacacttttttattaaatgagcaatattttagcttttcacaacttatttgcatctcaattaaaaatgctcttagaccatcattaatggttggtgtatgttgaccgagattttcggcaactaataaaatattataaaattattgagctgtaagaaagtgagagaa

SEQ ID NO: 112029 - DNA, 2468 bp, Cannabis sativa
gcataaaacccaacaaatccttctcaagtctcgataattcaagtgacccaacctataatgccacaaatcaggtttgtctagaaaaaccgtgtgatatttcacttggctggacataacataacaatgatctgaggttctgtcacctgtaagaactgaattcccatctaatgaaactaaacattaagacttagtgaattgaacatcataattaacatcaaataactgattgatactgatcaaatttcctttgaatcctttaacaaataggactccaattaactgaaatgtacttgagagatttttatctctttgtcccaaaattttccctttattaccatcaccaaaagtcaccaaaccttctttagaatcttgaaaattttgtaaggtttctctagagcctgtcaaatgccacgagtaaccactatcaaagttccagtgattctccttcatagtagatagagaagtgtgtgccaccaaagcaagatttgcaaccttggatttccatgtcttagatgaatcttgttaaaagtagagggaacttactagaagttgattgattatttatgatgttagttagatatgttctgagtttattgcacctaggttttgtatgacctcttttgttgcaaaaatgacaaatgggaatgaagcgttctggttgcctggtagtatgctctccttttaaaggtaattcctttttagcaatcttctcatattcaactaagttattgtcagattcaccttccttatttactacagtagacacaaacttcacctttccatctgaagaagatgaactaggtccatcaatctacaaatcttgaccttgtttgtaaagcatcttatatccaatttaagtctaaacaccaaagggcttctgattttgaagggtttaattcaaagcatctatcccaagagatatgtaggacaaaggctgcttggctctcacaagttcagcagtcaacttatatatttcactatctttagaacatagctttattgtcatgcacttcagtttctcctcaagttcaatcttactatcatcaagagccttgtttagatcttgtagttctttaactctcttggccatgtaactccactgagcaaacatctcttcataggccttattttttttacaacaacgaaatctgaattagaaaaagactcatcaccattagatgcctcagacatagtttctttagccataaatgctatgactgacttatcttgtgtagactcatcacccacatcatcttcttcacccacgacttctatttcttcttcagcgtgttagcacattcgacctgaatgtggccataatgttcacattcacaaaatttgatagcaggtctgctattcatctcattctgctaaggatgcttgtttgcattagagaagtttttattggaagagttctcttttctgcctggaatgtttttcttgaaattctttttgagaaatcgagcataatttttagccaagagagtaaagttggcatcagaaaagcctttagataagtttgaatctttatgaatttcttccttgtgaataaagccactcctgtctcaactttgtcgttttcaaaatttttgatcttcttacccttgtcccatctctgtaaggccagctcataattctatagggaaccaattaactcatctaaatcaagagcctcaatatctcaactttcctcaatcaaagttactttagacatgaatcttttaggtaggactccaagaaacttttctgaccaattttttattggaataaacctttccaatggcataagattcattcaatatatcacaaattttagcatgaaattcaaagactgattcattttcatccatggacagattttcaaaagacttggccaacactcttaacctagcctttttaactgcctcagtttcttcattctttttcttcaacttctcccaagcatacgtagcaatctcacaattcaaaaacaccttcaactgatttgtagagacaacattaaaaagagcatgtaaagctttagaattaaaatttgctcaacctacacaaatcacaacaaaaaactattttaaacttcgatatgaatcttagggaggattaaatttcaaaaaagtaactgatcaagaaggaagacaaaaacgttactcctaaacctaaccagataaccaaaaaaaaaacctaactagaattacttagctacatgatcacaatttctttatgtgtcaaaggctactaaatcacaattaggtattctgtcacaagtataaaaaatagtaaatcaattacacactgaaattacaagcttcccctgcattggaaactcatttgtagagcctggatccccaagaactgggtaagaagataacctcctctcagtgacgaagctagaaatttagttgagtgagggcttgaataaatattaagtcaaaactaataaaaataatgataaatgtatctttcaaattttc

SEQ ID NO: 112030 - DNA, 1919 bp, Cannabis sativa
ttaaaagagaggtaaaaattaaaaaaagtacaataaagtggttatagagtgtaattttctcaaaaatatatgccagttgcctttcttttgacaacaataccccgaaacccgcttgaccacctccctacactcttatcattcccattggccgaccacctccttcgcgtaatgcccttcgtttaagagtgtttatgaattggtttggttcaaatttttaattttgtcaaaaactaaacttgtattatggttttttataacttcaaaactaaaccagactaattaaatgatcaaaccaaactaaaccaatacattgaagaacaaaatagttagttctattttttttttatagtaattgttaatttttttggtaattcttttacttttaatgaatttataatatattttctaaaaagtatgttttttttttacgtaaaaagtataaatttataatacataaataacaataaaataaatttcattacaatattaagttaatatcaatattctacataaagttatttctagatatcaacattttgtctggaaaaaaaatatatcaagtatatataaaataattatacggattggtataacttgaaccactatcagaaattttaaaactataactgaactagagaattataaatgatctggattgaccaaactattcacaccgtattcgtttggttcggtctcaaatagttttgtccagattggttggaatttaaaactatgaattgcatattatatgaagttatgaacacccctacggtcattcaccattgaccatatcattcattttctttaatgctttcaatgattgaaaattcagttcaaaacttgaaccgcacataggaatggtaatttgggctattttctcgggtctggttgggcccccggctcggcggggcagctttgacccgattttatcgggctcttaagccaaatattatttcggtcgggcccgacccggcctggtttcagttttttttctgacataaatccttaaaaaaaccagtcccaaattcttcattttgaacttggactcttctgacttctctgttctctcccattttctctctcttcgacgacgaccgactccaatcttcagttaattagatttctttaatatcatatatatattagcgtaggttatggtgaaagcgtagtctttttcttacttagcagaagagattcaatggccctaaattgggatagactattgagcttatggtcagttatacaactaaataatattactgtattagtataacttggtcttgtcttacaatttgctcactagtcacttctgaccaattttgtatattttaaaatacctttttatgagaatagacttacataatcaatgcaatgcattttgatactatcaaaattatcattggaagcatatatataattaaatacatgatatatacttataattatattgtgcatgttaaagtctttatttttcttttaaaataaataaataaattgatttttttttactggtcgggcctgccccggcccgatcatctcgggtcgggcctgaccctttaggctaaaggaagtagtcaggccgggccaggtctatagcgggtcgggcccggcccagtcccgattgacattcctaaccgcatacctcatatacaagtttcaattagatttatgtaataaaaaataaggaattatttcataaataactaaaaacaacaaaattatatttatatttttatgaaattgagcttttttatatatatatttacgatatttttcttacagatttttgtttacatgttgtcttaagaaaaaaccattgtttacacattgcgaaaatatagtatcaacattgcgacaacataaaaataacgttgaaataacacaaaaacataaaaatgttttaaaaaaaaaaaaaaaaa

SEQ ID NO: 112031 - DNA, 6932 bp, Cannabis sativa
agccaatatattcacctccctcaattgcagactttgaggtttttccctttgactttcctctatatatctctcctttgactttcctctataaatatatctcttcggcctcaaaactcaaaaacacacattgaattcgaagcttaatttcctattctctctgtcataatttcattttcaggttctaatacatcttaaccacaatgttgctagagaactcaaaaactagctcatttcaatcaaaaagtgcatggtcaagcttttttagttcatcatcatcttccaaaacactttctccttcatattcattgccaacttttgtctctctttcccctcctaaacaaactttttctctatcaatgatggaggagaatattgataatgcacaaaccatcatcaacaaatggaatttaaactcttcttcctataccaaagtcacctcactcttccaaactaataggaaagagggcaaggagttcatcaagtctgtgaaggagttgcgccgtgccatgaactatcttctagctgaatatgccacctctactaagcttgtactagctcaacagctaatgcaaatagccatgaaaaggcttgagagagagctttataatatattgtctgaaaaccgtgatcaacttgaccatgaatccatttcaagtaattcttcattgggctctagtaattttggtgatgatgacgaggctcgagctgaggaggagttggagattgtggacgagtcaacaacagagatgggaagagtctcagttcaggtcatgtctgatttgaagtccatagctgattgtatgattggttgtggttatgggaaagagtgtgtaaagatatataaagttatcagaaagtcaatgatagatgaggcattatatcggcttggaattgaacgatttagatcttcttatattcataaaatgagttttgaagattgtaatgaaacgattaagaaatggttgaaagctatgaagattgctgtgaaaacacttttcaatggagaaagaattctttgtgatcatatgttttcagcatcagatacaatcagagagtcatccttctatggggtggtcaaagaaggagcaatcaatttgtttagattgcctgagttagttgcaaagagcaagaagtcaccagaaagaattttccaactcattgaattgtatgaagcattctctgatatgtggccggaaatagatttaatattcaactcacaatcaacctcatctattatgtcacaagcactttcatccacactcaaacttagagattcaatccactcaattctctccaatttcgaatcctcaatccagaaagattcatctaaaacagtcatccctgggggagggattcatcccatgaccatatcagtaatggattacatatcttccttagcagatcatagtggggctctttgtgatgtcctcactaactatccaagatcaccaagtttaacaaaactgcaagaatctttactcgaaagcctgagctcaagcgaacaagatgaagcctcaatccacctagcttggctaatcttagttctcttatgcaagcttgattgcaaagctgagcttcacaaagatgtatcattgtcatatctcttccttgccaataatcttcagttcattgtagacaaagttcatacaagcagcctaaaatttctcctcggtgaggattggatttcgaaacacatgaggatggttcatttgtacgcttcacacattgaatccatggcttggacaaatgtgttctcatctttacctgataatgaatcctcaccattgtcaagtgacatggccaaggagacttttaggaggttcaatgtagcttttgaagaagcatacaaaaagcaaatttcatggatagtacaagatacaaaaatgagagaggagttgaaaatctctatatcaaacaaactagtaccaaagtatcgagagttttatgaagcaaacttaactttattgagtgaggagagtaatttggagttgttggtaaagttttctcctgatgatttgggaaactacttgtcagatttgtttcatggcacgtcaacttctgagggttctcactcattttcatcatcaccgtcttcattattggctctacaaagatgtttgtcagtttaaaaaatacaaaacatgcatatgcatacaataagtacagtgtaatagtttttgcttagtgagattttcagaaaccaaattaaataaagattaagctaaagaaagtatggttaagaaataaataagatgatatttttgatgcggttagggtgttaaagagtcttagtcaacgagccaatgtcattatgctttttggctatggaaatttataatgtatttctaattttgaacttaaaaaatcgaaccatttgcataagggaataatgccacatttataggcaaagtattagtcaaatcagttgatccacactcgttatggttctttaaagtgtcgaaagcccactgatggggtaaacagaatataaaataggctattgggttgaataggtgaggtccaagttggggatacccgttattcgtacactattgtactgttgacaatgataggtgagcatgagccgtcgtttgtgagaggaaattgcaaagtagtggtcgttggcccaaaaaagtgattttattttactatgcgcctttacgaggcctaacagaggggacatgccgctagatttttctagatcatttcagaggagtgccacatagccttgcgtcccaaatagtgtatgttcccaaacgccttttcgtattccattcccagataagtgtaacatcatcctctgggtgctttgatacagattctatcgtgttaaatgagatttgatctgaatcgtggttcaggctttatttgctttatcaagtcgagctgagtgatcttcttgtcttgggcccattaacgggtcaagtgttactgttgtgactcgggagttacgaaggcttgtcaccttcatccaattttgagatttcgatctggaatcatgaatgggacttgtattttggtattcttttcataggtctctcagaaacatcttggatctttctacgttctaaagacaatttccatgtgctggtgaatgattggtgtgtgtcggacacccgtttatagaagcacgtgcatctttggcctttgcgttgacgactgatttatgtcagcgtccatttcgaggggaatatcatcatttataagggtttctttagtgagtgagttaaatggaataattttgtatttccaaaccattagattagtgagataagtattttcttaaatttaatatgagccatcgaatcatagacacacaaatcgtcactttccttataaataccccagaaagaaattgtttggcactttaagccatttcctcaactttcaaacttttagagagaggaaaaaacccttcaaacgtagaacattctttctggtgagtgtccaatatcgactctgagtttgtcaataaatttctgcaatttcaccaaaaaatattttcaaccaccgctctgttcattgcctctcaagaatcgcaatcgtccaattttcaaaaaaacttcaacaagttttcatagtacctctgagatatttaggaaaaaatttcattagctaactagaaaccaacaaccctagttttcagcgtcacaagtaagtacttagttctttcaaacttttgccactttttgtttactttaataggtttcagggtaatgggtttatgtcgatatgccatgattttaggggcttcactgggtatttaggatttgattagagttgtgtgctcttccgtttagggcagtttctgtgtttatttgaaagagaaagtagagactcataagattgttaccaatctgagaaccttgtcatgtgtaggaaatttcataattaggaattttcaaggtttctgtattttctatgagtgtccgctctgggggttccaaaaattttcctaaggatcttttcgcaacccatgtaatttgtttaggacactttcgatattggagaatagtgcctctattttttgttctttaattgtgttcccaatctttaatctggtgttatgttccatgaggaattttaatctggatgtagggtctggcgagaacctttcgaatcaaatatcagggatgaatctcttgtaccctatctatttttcttagtttcggtattaactacttggtatctatttttttccagatttcaccatgtcagaagagaaccaaaacaatgacatgatctgggaccttagtaatgagccgacgccagtggaggaggaccatgccgtgggcatgtcatgggagatggacaacatctcgataagttttgaaactacaaaatggcagacctagaagaagattatgggttccaaaatacccctacctattctagatcaggctttccacgaggggagcaactctgagcgtaactaggacgactttggtgtgtggagtgtgggccacattactgctgaagcccatttctcactcaaggattactttgcaaggttcttggcagtcgtggaaatttcccttttctaattcatctcgtaaggctacaaacctttgggtgtctatgctatcccaacctaagaccttacaataaaaataagctccaatatagatccacaccttgtgtctttcttggatatactatgtctcacaaatgttacaaatgcatgtccaaagacaagagaatttacatctcgagagatgtaacctttaatgagtacaattttctttatgttgagtctcacaaacaacccatcactaccacctttccagtcaccacttctggtttacctccattattctcactgttattcacacatcatccaccacctgatcctcctacgtgtaacacttcatcatttgccgagtctccaataccatcgcctattcacataccagaaatccaaccaacttagtccaccacaacttctccaagtgagcttatcacagttgcattgcccaacttaagccagtcagttgatgttgaagtacagtccacttccaatttgcctcctcttaatactgttactaatgttcatgtgactgttatactagtgcctactaacatgtctaatgcagatgtcagtactcacagaaacactactacaacaattgctactcatcccatgattacaaggctcaaagcaaaatttcaaaaaccaagggcttttcttgcttcctgtgagccaagaacagtgaaatcaacccttcaaatacctaaatggaatggttctatgacttaagagttcagggctctcaccaaaaataacacatatgctctagtcaaactactagtacccaacagaaaatctattggctgcaaatgggtgctcagaatcaaacacaacaaagaggactctgttgaaaggtttaaagccagattggtagcaaaagggttccatcaacaagctggctttgattttgatgagacattcagtcctgtagtcaagcctataactatgagttgtgttaaccattactgtcacaagaggctggtccattcaacaactagatgtaaacaatactttcttgaatggagagttacaagaagaagtatacatgcaacaacctcctagctttgtgagtgaacaacatccaaactatgtttgtaaacttaacaaggatatctatggtcttaaacaatccccaagggctttgtttgagaagctgtccacagttctactcaccatgggctttcacttatctcaagctgatcgctcactcttcattaacgtgacaaacacttattgcatctacatattagtatatgtagatgatatcttggtaatggacattaatgacaatgatgtgaacaccacaattgttggcttaaacaacacttttactctcaaatatctaggtctggtggactattcttaggtatttaagctatcaaaacagagcagggtgtccttctcacaaaaacaaaatatctacaagatttgctcaccaagtttgaaatgcagaatgtgaagactcaaaacacacctatgaacaatggtctaaagttgtccaattatggaagtcaacccatggaaaatgtcactctctacagatccataggtgggggattacaatatgctacatttactagacctgatcttgcatattgtgtcaataaggtgtgccaattcatgcaaacacctctgcaacaacactagatggcagtaaagaggatcctgagatacatagcatgcactcttaattatggcctggaccttcaacctgcccctgattttcccattgaggcattttgtgatgtagattgggctgcagaccctgatgatcgcaggtctacaacaggttattacatttacttaggaggaagccttattgcttgaaaatctcaaaagcaagtcactatctctcgatcctcaactgaagttgaatttagaagtcttcctagcactgttagtgagatcagtttgattcaaagtcttctaaaagagcttcacataaagcaaaacagtgttccaactatgtggtgtgacaaccaaagcacagttcttcaggctgccaactctgtcctgcatgctcgcacaaagcacatcaaagttgatctctactttattagggacaaagtgatgcagcattagcttcaagtgaaacatgttccagctgctgcacaaattgttgattgcctaactaagcatgtttctagctctaaattccctgatctcatagccaaactcaatgttgtttctcaacatagcttgagtttgaaggggccagttaaggagaatggtagttagttgttagagctagttattttagttagtttgttatgttttgtgtctaactgtcaattgttgctcttgacagttaggattagtgtatgttcttgtatgtatattgtactcacttacaaactcagcaatcaatgcaatctttttgttcaatctctctctctctctctct

SEQ ID NO: 112032 - DNA, 2184 bp, Cannabis sativa
ttttttttttttccctttaaaaatgttttttttttttttttttttttcatttttatggaattctgcataaaaactaccacaacattccaaaccgtaaatttaaataattaaaaaaaaaaatagtatatagagtaattttttattttttctaatatctaaatatagttgttacactgaccatttaataaaattctctctagtgtttctaacttaaacttttatttttttaagaaaagaaaaacaattacaaaattagaaagaagagaaataaaagaaaaaatatatattttaaagagaagattagagggtatatatggggtgagtttatcttttcaatcaaatttgggtggctgatttgagttggaatggatggaggttgaggcttgaggttaacaccttgccggcctaatagcctaagttataagtgtatagctaattagctataatattggatatttccaatattgatgtataatttatattatagtttattaatattatggaccccacttattttctcaatggcccaactaactaaatgggctccacttctaaaccaagcattttggatatggtgatttggatcctcccaaacaagtggtgtttcctttgtttggctagcgtggcaatctcatccataaacaagaatagcctaggttttgtttgctgaccttatcatcaaactcaaacatagatacattgcatgcatgcatggcctatattatatataataatcattgttaaataatatttcatattttattacattgaaaaataattgttaaactcattttgcttaagaaagaaagaatcgttaataatgcttttgttaatgtgaaaaccgtggttgcttctccttaatacttgaaaatcaatcgagtaatttttttctatttttttttctttttgggtttgaaaatattatgggcccagaaaagtagaaagaatattctgaaagaaaatggaactaaggcccacttttctgtctgtacacacgtaagcttttatcaaaagtaatagctctttgtttgcatttcatttggtcacttcccatgcaagaattagtctttttattttctttcataaaattaaaaaattacactcaacgaccaatagttttgtttctttcaatttatttgttatgaataaaattggttggttgtacgtagtatatacatgtttagatattcgatcataaatatttttgtaattggtaaaatgcatatttgattatgtgattttcagttgattttatgtgatttaacatataaatattaatacgcgcggtcaccactcactaaatttatttgtttgcaagtcaaataaagactactactaaaaaaataaatttggtaagtggatcagaaagctttcgcatcaattataaccaataaatatttatttaattaacttattagctttttaaaaataaaaggtttagttaaataaaaaaaaaacaacttacacacacctataaagggtttgatctattttcaatgaattattaattaattgctgaaaaaaattatctaaaaattgtgtcccaccaggcacccacacatcaggaaatctatttacgtgtacggtttaattatttatttattgaaaaaaaaaaatctttcatgtaaaaattcacataagacaatgacaaaaaacaagagaagaagaagcctttgggaccctctaatcctatgatgtggagcattttttttttctttcatttgggggctacaaacgtaattggagatcataacaatactgttgtggtgctttttggaacttggtttttattataatcatcatattatgtttatgatttagttagtgtatttccgataaaaattaggtgtaaccataagatcattatgaactaaccctttttacaacatatattatataccatttttgttttcaaactttaatatttaatatgtattaaattgcgtctttgaatttttcagactattaaataatattcttctaaactattaaaattattgtattcaatgactattttgtccaatttagtttaatatttattttattaacgtgccgattatcattgtccatgaattatataagaggagtgctaatcacaccctattttacactctcttttgcactctctctatattctaatgacaagtgtcattttttaagcaatgtttatttatagctaatatt

SEQ ID NO: 112033 - DNA, 7609 bp, Cannabis sativa
aaatatttaaaattccgtaaaaccgtatttttgttgtttttatgcatttgtgaaattaaccctatataaaaaataatattttctttttaccagacttgactctgataaaatttcaaaccacgcacatgacatgatgtggtatgaaaaaatatataattggcaatcgcactgccaaaacacataataatttgggtatggtgtaagctgttgataaacacccataacaatcttatatttccaaattgtctctcttctccatcccaccaaaatttaatatttttatattccctaaaatctaccaaaattaagctctcacaccattatacatgcatccaaaccataaacaagaaagattaaaaatgaccaataaatcatctagggaggctgaatctttacaagatcaaacactattaaagcatatttacaaatgattgtcatttatgaattatgattcttccttaacgaagaaactttgaggcaagctaaaatcttcttcgcgattcaagacttcaatatcctcatcatctggtttctgacatatataataccaaaaaaagaaagggtcagacaaacacacctctcattagtcattgctaccacaaaaggaaaaaattgaattattacaactccattttgattccattatattttggttacaaactaaatatgcttaggataaaagatagactaaaaaacttgcaaattgatattttgtttactttatcgaagttgctttaacagcacccaaaataaaaaccttcttatattactagatgagaggtgagcatattgaatggacaaacatattattcaataatgaatttaaggatttcagtgttggcattcactaacacatcttctttaagaaacaagttggagataaggaaaatgagttatatattttcataccaacacttccaagttatagaaacgatccagcaactgtagaacctcatcagaagaaaactgtctgttaaagctattacaagaacacatcaaaaataagaaaaaagaaaagtaaaagttagagtttaggttcttattgtacatagggtcaaagttatggaacagaagcatgaagcagaattaaccttctccgcagaaactccattaaaccaaaaagaacaaagtggcggtgtatgcctgtatagatagagataatttgttcagttacagtaatatgttttaataataaaaggacttgactatgcaatatatgacatgaacataattaaacttaaactaaccaataggtcaactgcactaactaacaactgttcactatatcacaatcatttatcttattgaaccgcaaaactatcactattcttacttagaaattagatgtttccataagaataaataggatttttgcctcttaaatcatgacatttgtagagtttttccccctaaacttttctcagttgcaaaaatctcccgaactatgcagattgttgcaaatattcccctctagtaacattaatctcattttttataacaatttgcttatttagctataagttacaggtataattagtacaagggcttattcaatataactttaagctacccaaaatccagtttatttacattaaacatacaaatagtagctctaaaaatgcatatacatactctcattatttatcattagacccttaattatatatttactttttgtctaaactcttgaaatgggctaaattaacattatgttaatattatattaacaaattatttaaataaatcaccagaatgcaactacaagtaggacatttgcaacaattttatactttggggagaatttttgtaatagaaaaaaattcaggggcaaaactctacaaaatcatagtttgggagaataaatcctatttattcttttaataaaaagttagatactgacctagttgggaagtttctctaatcttatttctaacataatcctccaaaataccaagttgagctaagcagtttaggatactaaatagtctaatttacaatttggtaaagctgaaaccagatactgattataactatataccgaaactcatcaacatattagctcaatgcagttttcctattaataaattagttaatcaaagccaaagatctcattccccaggttcatgactcttgaaattctccaaaagatatacaaggactttgtgagcttagtgttcaagaatttaatgccataataagctcatttaacccaccgaatcatttgtgtttactaaatttctgtcccaaacctcatcaatttaatcctaaccaaactgcaccatgaattttatttacattataacacccgcataactagtttggccaaagaacaataaaaattgaagcagcaatttcgtaacaaaaataagaaggggcatgccttgcagcttaataggaggataaatttcgagagcttctaacagtctaagctccaattcaacctgcgattgctcctagaagaaaacacataattaataagaaatatatgcatacataaacataaatatatatgatatgatgatcacgagagagagagaaagacctttgggagagaagaagcagaggaagggggagccttgcaaggagagtgtacggacattccgtcttgttcctcttcccttgctttgccaccactctccatttctttatttcatagatacatatatattgtgtctatatatataaatatgaattcccccgctaagaaaatcacgctctcttctttctgctgctgtcaaatattaatttcagacaactctgcagaaattataacggaaattattacttttttacttttttttttcttttctctttgatttttctttgctagggttttgagtatcttttttttttttctctctcttcatcaaatgggctgtcgagtttgcatttgggctggccattttgtctgaagcccatgaagattaggctagtgagagtgaggcccagtatcataggtcagtcagtagttgggtttcagtttctacaacttcaggatggtctgagttctttcttccctgcttttcttcttcttcttctctctcaagtcagtcattttgggggcagagtggctaagctggtaaaatcactgtgcccctagaaaatgccgagtctcaccaagctcttttccatggaagaaatctcccagcataacaccaaggatgactgctgggtcgttatcgatgacaaggtacctactatttcattcatggcttctcaaaccaagtgggctttgtaatggtgttttgtctttatagttattatcatgaatgggtatgtgggttttatttttgtttctttagatctatttgcttatttgatgtttaatggttatcttttaacatacgtatttttttttgatattcacattttctgactagatttttggactctgagtgaatacataaaataaaaaaagaacttgcaattactctagttataggcagtttgatctgggtttggtgttattagttttcacccagtaatgttagctcaaatgatcacagcgtgatacaattactctagttatatactttcatatggcaattgttttagtttttttgggttatgcagggaaactgttttataagaaatagttttcgttatgttttcttgagaatttcaatttgttgcaagcaagtttgacgccataatatgtgaaccaaaactcagttatattacttgttggaatagttgatttttaatcaagtttaagcttaacttttttttatcagtgtttgttatgttttcttgagagttttagtttgttgcaagcaagtttaaggccataatatgtggaatggttgatttttaatcatgtttaagctttaacttataaaaattacatttaaattaagtagacaaaaaaacatttttaatatggttcaacattgccattgcaatgtctacggccttaataatgtattgtaagtttttccctgagcttgaaattaagtctagtccaccacccccaactgtttataatgaactttctgaaatcatttaaaatgtcttagttttatgccttactgtctttaactttaacagatatgatcaaagatatttcttgatccagtgtgtactttggattcccctcgtatgttggtgtttcacctactagtggattctgagatccattttaacttgcgaagaacttgaatttcttcaaactttgttggttattttgtgaagaactttaatttcttcaacctttgttggttatttccaactaaatgttttcaaagagttagttcaagaactttgtgaacgtactgcagttgtagcatgtcagaaacagaggaatttttgttagaaagttcacttgtattcatgaaaacccatgaagcgataaccattacaatttaaagggtttaaggagaaataaccatcagattctttttatatgatcttgtaccacaataacagatcttttagcaatttttgaaatacagatagtagtaaaaaaatcaaattgtctatactctagtttgaggatatgaagtcatgaatggaagagtactctcacagcctgtcaaggaaaacatataaagtcaatacaaccatacagaaaatcaaacgacattgccttagtgcagccactttgaactctaaacgtcaattttgacataatatctcggtcgggcctacgctaacacatgtcaataaacttcaaagtgatacactataatggtcgtagatccttagaatgtgatgatattgaatggcatcttagctctcaaacatggctgggatgaataaaaaatacagttaatgtgacttcgtatgttggcagtaagctaggttggaaactttgatataattagtggtttgatataaactttgatctttgatttaaagactattttacttttctgggaaagccatctttttgttttggttccatgctattccattctaattgttttattttccccttcctatgactacaattaggtgtatgatttgtcatcttatttggatgaacaccctggtggagatgacgtagttcttgctgcaactggtatatttctcattacttaaatgattgtgctaacatctttacttttgtatagacgtgttcataatttgtcaaactatcaacaaaaacgttatgaatacaaatcattcgactgaaagatattggtttccactgaaggaaaggatgcaactgaagattttgaagatgctgggcacagcaaaactgcaaaggagctcatgcagagctttttcattggtgagctcgacacctctgatatcccagaacctgatattgtctccacgaagccaacaagaagagattatgctcagaagctcatagacttggcaaagcaatattgggttgtccccacagcggttgttggcctctctgtagtagtaggattcttattcttccgcaagaaatgatgctattgaaaagtttattagttgagctgattttgtcacaattttgaataaatttttacgggggtaggaatttttactagcaattgatttaatataatgatgaaaaatattttgcatatttgaggttgtgcccctaaacctgggatttgttttaccttttaagttaaattctgctattttcgctgtttgttgctaatattttacagtgattaacacgaccaatatctgactagattatgtccaactccattacgtctttcgtgcccaataattctgttcggtacataacttgatggaattgaactacgtgaagaaggggaagaaaaaaaaccttgcatttttaaccaatgaacaaaagtgtgcactaatatatgtatgtatatattataaatgaatgttacgagcaagtaggttgttttattttaagttattgtttttttatgtatatatataatttatatatatttaagtggtatattgtatgtaatttgaaggaataataattaaactaaaaatgttagctaatatattagaagcaatgatagtatagtataaaattgtatataaagttactattaaaatatattgttatgtaattgtaaataaagaactgtgtaaaataatatgattgtaagaataattgatcacataaaggcaaatggtgaataagtttgaattgtttaataagcaaatgatacatatattgttattaataatagattatacattaattttaatatatacacactgacattggtctaacattcattattaatgtagtatttgtaaagaaaacacatagcatagtattatggcaaagggtggaacaattgtttagaaaaatttattgtttaagtcctgataattcaaaaaataatatatgtattttacaaaatttaaaagaaacaatgtataaaagaattattaaataaaatacttcattgtttggtgaaatacatgctgaaacacattttgcatatgaataagagaagaaaagaatacatttaggatgataaagaattggtgttactcaaacgacagtgaaaccgttgtgtagagcatatattgttaaagcctacctctagaagtgaccttcccatacagagatcagttaaaggtgtttgctcaacagtctttaggaaaatagtgttcccacaagctagagcaggtccaaccgaacatgagaagagtaaagttcctcggaataatctaccctactacaccaattggctcgtgcaacatttgaacatgataatttacatacagttggtccatagatttattctacccaacctagaaaaaaatgccaagaaaagcataaccagaaaatggcaagttagagacctttattatatactgtttaatacagagtacaagcatagtataacagaaataacaaccaagacactacacttaactaacaccaacaaactaaagaaacaactaacagatttattgactaacatccttcctcaaacgaaatggagatttagccatttaaagtttgccttttgagtaattaaatctatctatacttaatgatttagttaagatgttcgcaacttgatcaaaggaagaaacatagcaaattgagagatgtctcgctattctttggtctcatacgaaatgaagatctatttcgatgtgtttacatcttgcatgaaacactggattagctgcaagtgcagtagcactttgattatcaacccacagtggttgagatagaggaacttgaagttcaaataaaagagatgtgatccattgaacttctacagcagcattggcaacaagggccatgaactcactctcagtgcttgatctaacaacaacatgttgcttctttgctgaccaagacactaagttatctcctacaaacatgaggtagccacctgtggatcttctatcgtcggtgcaattggcccagtctgcatcagtgtatccttaaagatgtagggtgtcacttggtttgagccacaagccttttgtgagagtgcctaattagttgttaaaaatatacttttatttattttaaatgataaaataagttgagttttaatttatattttcataatatattttataaataaaaatatttagttttgattcaatttatgtttttcttgtaggaattaaagtgtatttttgttgaaagaaagagaaaggagcaaagttgaaaagaaatgaagaaaaaaatggcatttttgtt

SEQ ID NO: 112034 - DNA, 1830 bp, Cannabis sativa
gccggtttgctcaggaatgctggggcgtgtctcgtgtgcctacggttgctgggactgctatgacattcacggcatggttcgaagagggtttggacaactggacgatggctgagagacttgaagcgtcgatggtctgctggtccgtttggaagcacagaaacgagatggtttggaactccacaaggccgactgttagtgatgttgtcacattagctaaactaaactttattgaatggtataatgcccaaaaaaataaccaacctactcctgaagataatggttcggttgatggtaacttggagcattggacccctcccaactttccctcaataaaagttaatgttgatggtgcaattttcactaatgaaagacgctttggaattggtttggtggcaaggtcttctactggtttagctcttcaagccaaaagattaagcaaagtaggagtattgaagccacacgtggttgaggccattggaattaaggaagctttgagttggatcaaaaccactggatggacaaatgtggtgattgagtcggattgcttgagagtcatcaaagacctgcgaagatttaaacatatggcttctccttatggccatatcatttcagactgtatgactctgagttcagatattgttaatgtttcttttacttttgtaaaacgatctgctaataaggttgcgcatttcttggcgcgatcttctctttcagaggctgattgtactttttctggggacgctttaccttcgagtattgcttccttggtctcagatgatttgatttaataaaacttatcatttttcaaaaaaaaattaataaagcgactttgataacaagagaatagattagagagttgatagaaaagtttctacctaccaatttgagcgtgccacgtctacgcattcaacgctgagggaattcaggtagtctccttccaaaatttattctaacatcaaaacaaaaaagagaccagatatgtttattacaagatatgctaattttacgatgttcaacaccaaaatatttactattaaatttacttattattatttgttgatcacatcaataaattaatatctacatattggatttaccttattatatatggatggagtatggtgacaaaataatattcagataatacatgattgaattttataattttaaatggatatgattaattttcgggttaatacgacttaaaaatgacacgattagcttatttatacaaatatatatatatatatatacacttatatatattttatatatatttttttgatagcaaattcattcattccaaagtgaaagatatacacttatatttattaaacggtataaactatattaagttagttaaatataagtcactaaaaaattaaataactcataaatatgtcctaattaaaaaattataactatgtaaaacttgtcaggtcaatctatttaattataaacaaattgggtttgaattgtatgtttaacataattaataaatagattggtttgagtttggtatttgttgaattgttaacctaaatggaaatgtttatatttaaaaatatttcattattaatatatatataatatattggtttcattttttattatttattttatttaaaattgatgttgttattaacccatctttgtcatgtgatacgaccgaacgagtaacgaccaaacttgattttttttggggaagggggaattaatactaatactatccaaattatacattaggtggcgtttggctggaggtaatgaaatagaatagaatgaaaagaaaataatttttattctaattctttgtttggttgcatttaa

SEQ ID NO: 112035 - DNA, 1553 bp, Cannabis sativa
gttttcttgttattttcgtgttgtatttatggaaaaccgtaaaaatataaaaaaaaaaaaattctataaacgtaaaaatgtatttttttttacaaaaaaaaaatggtgccttatataattattccattataaaaacatttataactgaccgacttatgaaaaatgggccgatctaagtaaaacatgacataagtggagaacgacacaaaaatgtgggtgtcaggcttatcatttaaaatattaatacaacatgacaaatttatatatttttattggccaggacgacataatctatattattatgaacttttgaaattataaatcagactgacacgacacacctatttacaactacccacaataattggagaaaactatacgaaaaaattaaggttatttactcaagggctaattaagatttttacctcctaaactttaacatgtatcaaatcatgcacctgaacttttttggccgttaaaaattcccactgaactagtcaaattgttagatttaaggacttttgtctaatttcattcaaatttactatttcagtgattgtttatgtgcgctctacaaattttgatatctaccaaatcatgcccctcgaactttcacatatactaaatcatgttccctgaactttcatccatgttagactttttttttactaaaattggataaaagtcgttaaattcaacaatctcaatagttcagggggcatttttaacgacattaaaaattcaggaaacataatttaatacatgtcaaaattaaaaagtaaaatccttaattagacttacccaagtagcaagagatttggtaattaggtaggttataatgccacaaaatataatatatgttataatacaaacaattgtactaattacagagagttgtcactcaaaatttatataagtacaagtaaaaacagagagctgtcaacttgtcatgtcccgtgaaaaagaaaaaccccaatttaggcaccataaatgtaaagtttgttttttaaattatttatttattttaaattctctcaaattataaaaatacttacaagtctattaggttgcattttgttcatttttttgtacataatttattaatgtaattatgagccacacatattaattatattacaagaacttatttaataaacttaagctagtttgaactaatttaggataataatctttaacatttaattaactctaaatacataagcttatcactttgcatctatataatttttttcatttaacatgccttatgattattatttcgaaaattacgctatacaagtacatccagtctcaatttataataaatctaagtaaaactaaatgtcatcccacaaattatcaattacaaaataattaatttttcgtttcttattgataaaataaaaatattggagacaagtgaataaaacaaaagaacaattaaaatgggataagttggaaactaccctttttattacacattaattaaatataactccaaaataattttaattgataaataccctcttttataatcaaagtaccaaatataa

SEQ ID NO: 112036 - DNA, 7506 bp, Cannabis sativa
tttaatatataaagatatgatattaaaatatttttggttaataaatataaaaatgaattacttttcaacttttctgaataattgcagtgttgcagtgtccatttctccacaacacaatgccacctctctctcggtgctggttggttttgctcaatccaaataccgagattgcagcttgacccatcgtcaaaatttcttacctcctcaggtccttctctctctcccgctctctctcttatctctcttcattaccaatctcttttctttttttggtttgcttcaatacatgttagttctcgctcacttgaacgactctcttcctattttctttttcttttttctttttcccatttatgttaataatcttcattggggtctgcttgttgttgtcggtgtttaaagtttttcttttaatcaattcaattgccctctctgtctttatttaaatatgtttgtcataacattctctcgtttataacatggttgagtttcaactgggctttgttctttcatatataattctatttaccaatttgttcatttcctcccattccctatgtgtataaatgaacaaatgattagtttttttctttttatgggcaatatttgtaggctatgtatggtcatgatgtgttatggttatgttggtggtgcctttgagtattgaacatgctggtaaagtaagatttattattcttaagtgagcttagaaaatgtggattcagtcgaaatgaaggaaattttaaaaaattatattggttaaattaaactgtagttgagatttttaagcagtttgttgatgcattagcaggatgggaaggcttaaactaaaaattcagagattagagagcattagcaaccgtcaagtgacttattctaaacgcagaaatgggattttgaagaaagctaaggaactatctatcttatgtgatatagatatagcccttctcatgttctccccatctggaaagcctacattataccaaggggagcgcaggtactataatagtagcaacttaacaacaatattatatatatatatatcatatttaagatacaattcttatttggttaagctcttgtttggtgagtatgataggatagtattgaatttaattaaggaaaagaaaaaaaaaggatacgttagttaatcatttgctaacaataacttgtaagaaaataagttgataaaagtacaaatttgatcttaccaatgatctatatgaatagggagaatgatataatgaagatgaaaattatgtatgatatctttatttctcaaatgggagtaaattattcagtgctaggtagttgtattttattggaaccttatcatgaaatggaaacacttcaaagaagacttttgaacaaaagtttacaattattgatgtcaagaatatagaacatagaaagcaatggttaattctttgcattatttaacggtccttcaacaacaagggtactctattatcaaagcagagtgttacatttgttcttgcagttttatttgtggagacgaaaatcctacctttaatttttaatctgtgtaactgaccatcatgtgatttctagtttagctataggtcaatgtctgacaaattattctatgattaatataattttcatttcgcctttttcagtaattttgaagaggttatcacaaagttttctcaattaacttgtcaagaacgagcgaaaaggtattgaagaaacccactgttgattcatgacttctttattttaattggtacttttgatgttgaagtccgattctaactgattcttctgaatgcaacaggaaactggagagtcttgaagtaagattgttgtaaattttccactttgaatatattgatgttcttagacctctacattcagtttatgtgcatatattgctgttttataggcactgaagaaaactttcaagaaattggaccatgacgtgaatataccggatttcatgggttcaaggtttgttgctaccctatttagattctaagcctctgtttgttgtaacatttggaaacatctgagtcatcacgcttttgtttctgcagctctcagacaattgaggtactgcacttatataatgttcatggactatgcttgatggtgtaattgcatcaataaacctcacacataccccactccttaatggttatgtggggttgagtaataaacatgcctcagggctttattttctctatactgactagtgtagttacagtggtgcagctggatacttttaatttatttagtttatttgtattggtaaaacattgttgtatactttttttgtcaggattcaatgagtcaagttagggtattgcaagcccagttgacaggactacagaggagactgaggtgcacctttggagcttttggttgttaaagtattgctttttcttattggtcttgttgatgataataataatataggtggcattatacaaaagaaaaaaaaaatagcaacggcattaaatttttggtagaaatttttcacaaaatatttctagtatgtcgcatttcttaacattttatcctttggaactggggttcaaacagaacagtgcaactatggagtttacaactttgttctacaattgacctacgaatagtaacttactgcgcaaaatatagtgtgtttcggcgtccattttggcccattcctttttcatgtttgtgttttcatatgcatgcatacatggcatacggccatagcagctccattcatacttactgctattagcatatttcagatttagtatatttcagatatatttgtcatgctctatgtttcaaacaaatttgaaatgcattcttgtattgatacagaattgcaatttgttagagttctctatcatcagaactagcttttagatgtgatatgttgtaaatttattgagatgtgattatgctatttgttataatctgttttctttacgctgatgtgattccaactattattgagtaaaaaatttactttgctgttcacggtttgtggagatcttgacctgttttgcaatttttattttctttcttttccagcttttggagtaatccagatcagatcaatgatgtagagaatatcatccaaatggaagacatactcagggagtccatcaacaaaatccaaatttacagagtactatctctctctctgtctcttcttatttcaagttaagagggttaaaatgaaaattatacagctattatattttcttatatattatgcgagtagatagtccatcaatggcatataaaatattatgtctataacaaaccagctgaccatattatattctatctaattttgacattaattgcttacactagtgcttctctccttaggaaagtttcagaaaacaccaattattgccgctaaattgcacaggccaggtgcaacattctttcctttctcattcgcggcgggatagggtgggtgaatataaatctcttctaagttattatctcactctcacttaccttgcagttgcagaatgagatgtattcacctttaatggtaggtaatgcacaagaagcacaatctttgtcatggattccaaataatgaaaaccaacccttgatggtaccgggtaactttctgccacatgggtgagtgacttactgaaccaactatctattactttatcttgatgtttgaaatgatccacttttccctttacacttaataatggtaaatttttcagtgtatgtttttatcttacatctgtacatgaaaggtttatgttatatcttactcgagtattctctcaaattatcaatatcccttttcttatgttctcttgctttcttcttaatagcgggattcaatgcaccaccgatttttcacttccaggatgctctagttacaacagcaatgggagtggcaaacaaatggaggttggtaatcgaggacaactcaataatatggaacaaggtggttgttcattgaatgacctaagtggaactgctggcttaaatcttgattttggtgagcattatgcatatccttctttcgaagctagtttactggacaataagaaattgaaaatcaatatggagatgaacctacaaacgacttctgtggattatcaagtaaataacaattgtgtactgcctacatctatatatgacaatgctcagcatgactggatatctgcttttgggccttgcggtcttgcactgtgcaacgaaaattcctgccagcagaggtttttaatgtttctcattaaattgagtcatatgttcattgcgttgcataatttagatgaaaataaaccaggggttatggtttttagtatttagctgtgattattttaacttcaaatttcttttcttgtcatttcgtgcaggaattaaaatgatcttttgtgattgtactgaaagaaaccatggatgtgaattgagtttgaagttttttggtgaggcctaattcacgctgtggagttactcacagaatacccaaaatatgttagtcgtcacaggttgtatactatttcggcagctctctgctaccatatcccttaactgtatataacaatatatagcataaaaaatatagtatcatagattttgctgtataatattaacattcgtgtttcctcaaagcaaatatgaagagcttatgctgaattcagggcaagagttgctgtctagacatattttagtgtcatgattgaggttcattcagctcttgtggtagagtagatatatataagcaaacacaagaatttgattaggatttaggaagtgttacagaataatttgttggtttgtaaaacaaatattttaattgtagatagtgatgtaattgaagtgataataataataataattacgatgccatttaagtgccccctgtacaatggtaaaaatccttgtctacattaaggttcaagtctcaccacaaaaacattcattcactcttataaaacaaatgaaacaggttttgatcaaatctatcttagatatgatcttagttgccacttagtgtttggacaatggtgttgtgccatgggtcagacaggtgctgcaagaggttgtcgaatggcccttttccagtcacgttgtgctgaacaatgaatcccaagaatgccaacatagccaatctacctgtatacacaaatccatacatgaaaactcaaattagattaaagcttcataccctgcaatgcctaaaacaaactcagaaacattattggccaaattgacccaaaaaaattatagtttaggattcataccattggcaagctctttctccttggcttcttcagttggagcaaagttgagggggttgaagatgccaccagggtatccaacctcatttgggggtaagctgtattgcttaaagatgggatcttggttgacacttcctgggttcttgatgtcttgccaccttctaatctcaacatagtggaacaaaatgaactcgatcacgaaaagggtcgaagaagaagcgaagtactcttcttttccagcatcataccatttaggaacattaagaattccaatactggtgaacacttctggcaagagcattcctgccactcccaacattgcccaacgaccattaaccaactctgcttggacaaaccatttaaggttctctgggtcctcagctagtcctaatggatcaaatccattgtcaccaggaagactacacaaacatgtcttagtaatcagtcattatctctcatcaatgttttcttattattttttttaatgtgacaaaagttggtgaattttaataaattaaaagccaattttgaagtcacataccttccattgaggtaagctggagatgtcaagcctggtaaccactcaccctttttggcctcaaccttaagggaagtagaagatgaattagtcatcacttctggcctaatggacacttgtctgtttaatttactagaagagccagataggaatcttgatcttgaagcacatggccggaaaacagcagccgaggcttgcgtggtgacggtcgccatcctttttcccggccggaatacgatattgaaatggatttttgagctagaatgatggtggtggtggtagcagcagtaggagtggtaaatgagaaagtctatgttcgtgcatggcttttgtaaatttcataacatgacatatctgtggtggttgttgtctattgaaattggacggttggattgtgtgatttttgagatccaacggtggagatgcgtttgtgggttttggattagccaatgagtgtcattggaccttatccttttatctttgatggtgtatccacaaatctgttactttgttgctgttggttgagtaatgataccgtggggtatacttaacaaggccacgtgtgaagatttttttaggtggatatgatagggtcccgcatatgacttcaacatcctatgagagcatgacatgtcacaatatggtttcagcaactgataattttaatcttctcttctttacatgggctggtaaaccatacacaccattgtttgttgggctttgtaaccattgtccataatagtaaatatatataggggatggaggtttttatggcacgtttattatttagaatagaataaattaatgagcaaatataataaaataaatgaagaacaattaaaattaaatttgtaatatgttatttattaaaactgcttgaaaatagaatgatagagatttattttgtttactttattagaaaacataatcgaaatgcttaaattgactaaattacccttttgagttaaactgtagtatatggtagttattttgtaagaaatatattttaaggataaaattatcattataaatttaatattaaaaataaaataaaaaataaataaaagatgttatcataatttttgctcacctgacgtagcagtgcttacatagacaaaattagcgctatgtggcaatacaactcgcccacaagaaggccaagtcagtacctcagcaatcgggacatcaagtgacagaccaacttcctcacaaaagctggtgggccccatggccgatctacctctagacaataccatggtcggccagattgctctctgcaggtgtctggttggccaagagaaggcctgtaggattttttgtgtaattcgacacgtggaccgaaagattgggctacaaattgggccctaaaagcccaataaaacaactggataatatctatgttcaagggtattttggtattttgtaataaactaatttaatatacaaatatctagggtttcaagttgtaaattaggattttaggcttcctatataaatgtcttaactccaacctaaaaaacctaagtcattaagcctcatactagcctacaagtgataaagctctaagcctaagtatgataactctcttcctcactctctcatacgaccacacaagtgttgcgatattttgcacacgcaagtgtacgtatcgttacaagtagtaaactcaccaagagtgaggacgatcccacaggaattgtagttaagtacgttgaaattaaactttta

SEQ ID NO: 112037 - DNA, 5716 bp, Cannabis sativa
ttccctgtaaaattttaagaaattcaagaaagtttaacacgctgaaaattgcgttctagaattatgttgcacgcgtgactattttattttatacgcttgtaaaatagactgtttgaatattattttttatattgtaaattatttcgaatttttccaaattttgtagcatatcttaaataactacaacgtacatataaaaaagaattagactaatttttttttaaatgccaaaacaagtagagagtgcaacaataaataggaggtgtagaatttttttttaggttagagagtttgagaggggtctcatctaagaaatgactagtcggagacgggctaacccaaacaacgaacgaggggaggtaggtagggaagaaacacgtttcgttgctctgactctgattcagtccgccattggtgtccatcgaagaagttcaaactagaatcctcactctcactcctctcagcgtttactctttaatcttcctacactacgctactactagtaacaaggttctcatgacccaacctcctcctccgttttctcatccacctttcacttctttaccctctaacccaaaccctagctctcaattccaacacccacacccccaaaacctcactcctcatactccggacctctccgccactctctcaactctcaattctcttattcaccaatctgagcagactcttctatccctttctactcttctgccactccaacaccctagtcagaccaacctcaatggctttgtatcttgctcattcaacccccatcacctcttgccacccgactccctctttgctcattttctcagctgcccctcctctccttcccctattcaacttgaccttcttccacctcttaattacacccaaactctgaaacccaccgcttcttcgcagcctgaaaatggttttcctcagtcggttcaaggctctgattctgagctctgcttctctttggatgatttctttgcggagtttgggtgcaattcattctaccatgattgccctggtgtggttagtttgtctgctataaatggtgtcagtagaacatttactcttccgtcaattttgtccgctcaatgcgataattttgtgagcaaaggggatatagagacgaagagctttaggagagattgtagaaagattcttccttcagagttgtgggctactagagctgaggttgaaatgtggaatgagtatcctactgtatactcgtacagagttctttgtgccattttggggttggattcaactggagttaatggcttggcgagatgggtcattgctagttcgcccagatatggagttgtgattgatacggctatgagggatcacatatttgtgctctgcaggctttgttttaaggcaattctcaaagaagctttaactttggtggaaaatggtgactctgagatgattccaggcaatacgagctttaattgtccagttcttgttcaagttttaacgtggctggcatctcagctttccattctttatggtcaaataaatgggaagctttttgccataaatatagtcaagcaatgcatattagaagctgcgtcatctgtattaattttctcaattgagcataaggtgaaagagtctcctactgaggagtttcatcatagtttggatatgaattcaaatgatagtgctgagaatgtcatagtggaagaaccacttgaaagaggtactgaagaaaaacataatagcatagtagatgaaagtgttacggctggggtgatttttgtttctcaggtagtggcagcagttgcagcactgcatgaaaggtccttgtttgaagataaagttaaggcactacggtcttaccaaccacttactaactatcaacggtatccttctatacatgcacttttcattcattagctattatttcaatttctgttggctaactatgttagtttctccctctgaaaattttgctaattattttgttgtgaacaattgccatgtctattgactattgagatctcaccaagtaattgaagtgcttggcgttgtatacttctttagactgtgtgataaggtgttctggtaatctgacatagcatttttattgtaggatggcagagcataattatgtgtcacaaagggctgatgaagagcgaaaaaaacgtcctatgtacagacccataattgagcatgatggcctacctcgggtgaaaatatctaatgaggtactaattgatagacatttttggttcttaatgaagtactatgacttgaatagttaaccagcttaatcttaatttacacataccaaatctttagttggaatagataatgtaatgtccaatatgaataaagggctttcacttgaaatattattaggtaaactattgcccgggccggctccttccgattgaaacttggtaagaagtgagaatcgtatattcatgcaaataaaaaatgatagaacaaagttcagccaactttctgtctagaaatttcaaccatatcaagtattatgaacttgctcctagtaattttgtatttgggacagtagcacaacatatttgttataaatatgaggcaagttgttctattctataatctcaagagcacctgtattttttattgggcattatacaaggatacaaacaagaacaggactagagaggaattattagccgaagaaagagattacaaaaggcgaagaatgtcataccgtggcaagaaggtgaagcgatcgcacttggaggtaaacaaaagtttatactaaatatgtgttatcctctttctattagcttgttgtgctcttatatactatgttacaagcccataaacatatatgtttctgacacgaaggtgaagcaatcacactaggaggtgaacataagtttttatactgaatatgggttatcctctttctattagctttttgtgggcctatttgttgatgtcacaaacccatttacgttcaaatgaataatataataagtagttttggttctggcgtaggtagttaatctgtagttttgtggtgactgaaattagttttgaaaatctgttaatctaagagttaaaagtcatgtttcagagttttatatagttttgacatttgtgagaaatgatgtcgatctgcttccgttccttctctgtataaatatgtttttttttaatccttaaacttaaggttatgagagatattatagaagactacatggatgaaatcaaacaagctggaggcattgggtgctttgagaaggaatctttagtaaaggatacaattccatttaaaccgccttatgcatccgactcaaccacgtatgctgacatgcctaagaaaagttaccatgactcatcaaccgctggagatagttcaaaatatcaccagtatcaattacactctgattatacgactcatgctacaacttctaagggtcctttggtgaaagaatatcagcaaccaagaagaggccatcatgataaccatgaactctctgaggagggtgtcaatagggataaacacgatagagagtactattccaaaagtagtccaagacatgtccggtcaagtgagtggcctcgtagaccaagggaacaagatgaaatcaatgttaccagaatcaagcatcatgacagtaaacactcatcttctagactatctaaacatcatgataacagatcatccggctcctcgaaacattctgattacagatcaaaatctaaagatcggcggcacagggaaagatatgagaatacttttgaggatagatacaatcctgcagagtgtcatggcacacatgaaggtggtaactcttctaccagcaaatattacagagcagataacattcataatgatgagaattgaaccaggggccacaaactacaatgggacggttcctactttgccgttcttggtaagttaacatagtcacccctctttcttttttctccagtgtgttttcttctgttgaacttgacagtggccttttgtttgtaactttgtttattggcatcactttgcagtacgaagtcttcatcctccaacagttttgtttacatccgtatcctccttttgtatccttgatagtttttttttcttgtttaattttctatcaagcaatatctttccttttttattcacataattattggttatgatcatatttcactaaacacgaaggctaagtgtacagtttattgcattttatttagactaaatcagcatcatcatttatagtgttatgactcgtatggttagctcactgctgttttctcaggcaaattaacttttctagtgtcaaccctcatttgatggactcaatttcatgagcgcctactataaatgttgaagtagttacaatatgggggcaggtttttctatctcgtaaaaacaatagtttttgtaccgtttatatctttcagctgctagataatagatttactttttgagagatctaattgataaagttgtgtaatatttaaaaataaacgtgctagttgttataagttcaaaatatatcttagatgcactgggcttttggtgtaagagcattgctattgggaactagtactattatgatattatgatatgattagcaattatttataaattttatcgaagtaaaataagtgaaaaattggaaactgatatttaattttacccatagtaatattttacctaatcatgggtgttttttagtaattctctacatttattacacggtagttaaaatctagaataaattaatagagaaatgtagtagaataaatgttgaataatcaatttttttttttttgaaaattagcgtggtacttcattaaataaaaccaaaagctagacctcacggtcattacaaagtaggttttccggcagagcggagaccggaatacatccatacatctggtgggtaaacgcccacttagccacattatgggtagcaaagttacaatgtctactaatattcaaaaagttacaactaataaaaggagttgatctcaaacaaaaggagatatagttctcaagagcccaatgaaactccttcccattgaggacattgatcactagtctcgagtcactctcaataataataaactttaaacttaaatcaattgctagagaaatggttgaacaacaagccgctgtttctctggacaaagcatccgaaaagcccaactgagctgtatggatccgaatcacctcacccaggtggttcctagtaacaacagttgtgcacatgctcgccagtcccacttgaacatctcaattcagtttggtccaatcctcagggggtggattccatttttctgtcaaagtcgaagtcggtgacgacactagagaagcatgtaaatctgcaaaagaagtgtaaataaggtcaatacattttgatacatctggggataggttattatgaactttttcatttcgcgccctccagatggtatcaactactatggatgcatagagaaaaacctcctcttcgcggatacccctgtttttaagactccagagaaatttcacccagtcctaaacacgaatcacgttgccattgaataatcaaaattaatatttgtaatatgttatttactaaaattgtttgaaaatagaatagggatgatatattttgtttataagaaatataattataatatttaaatggagaattactttatatattattttttaaattttttttagggtaaattgcagcataaatacttaatgtttcagattttatac

SEQ ID NO: 112038 - DNA, 4770 bp, Cannabis sativa
ataattcctcaattaactcataattatctagttagggttttgctaatccttttcttaatcccgggtattacacataccctgtcaagagtagaacttgcaggaggcatggttgtactcccctcgcatgcacgccccacctctgtgatcatactatagctatattcgtcccccttacacttaggaaaatttcactaagtattagtggcatgcatgctaggccgagtgacatgtatgcttgcttggtcgagtgacatgtatgcatgcttggccaagtgacttgtatgcttgcatggccgagtgacatgcatgcttgcttggtcgagtgacatgcacgcatgcttggccgagtgacttgcatgcttgcttagctgagtgacttgcatgcttgcttggcgcgcatggctgagtgacttacatgattacttggcgagtaaattacatgcttgcttggtcgagtgacatgtatgcatgcttggccgagtgaattttagagtgatctttcaggtgtacatccattaatattctagttaagcgttatctaatctcgagagttagtcttgctaatttttggaattaacacctggccaatcagtcgagtttttactcttgctaaatattaaaatgataaattacataaagcaaaaacaacacatacataatccaataaaatctctataattgagaaattatatcatattttcttattttctaataatagggcttatttctaatattgtacatacaattcataatctactagtgaattattaattagttactaatttctatgtctaattatattgtcaatacaattatctccccttgttaaaaagattttgtcctcaatatttaacttagaaaactttggatattttgtcctcttgtcaaactctaactcctaggtggattcctccactttaatatttctctagagtaccttaactaaagatatggttttgttcctcagaactctattcatcctgtcgaggatctgaactagttattgttagaaattattttaccaggatcttatttactaatcatgcatgttgattacaacaatataatctaacattcaaaatatgacgaattaaagacaaaattttaggcttctcacattggattgcagcggaatataatgtctcgttccattctaatactctaacattcctttttgtcgcaaggtttcaaacaagtgtagaacctgtatctctttgtatagctttgagagttatgtgcttatatacttgtaaaaattactacttttcttatcaggtctttgtattcattaaaattaccttataattaccttagtcaaaagtacctcattttatttatttaaacttttcatttttgttttcttatttaattatttttcttaaaaataaattatttaattggtggatgagcaatcaaataatgtattttaaggatgagtatatgctcatatgctcaacttattgtttaaggataagtatattctcacaatattctaactatacaactaatatactctcaacttatttctcacaagttaataaacggtccctatttgtagaatttttgctctcatataaacataattgagaaccataaaatccttaaatgttaccactactaattaaacatttatgtacttaaaaaggtgatttggtagttgtgggagctattgaaagaatccctaacgtttaaaacgcacaacacgacatgttaagaaatatagtagctagttactagttatcacttttttgagtttttatcatttcttctccaaaacattacaaatcacttctacttattttttattcatttataccttacaaataatgatgaaatcaagtctccaaacatctttttatttttttaatagctatcatttatttatattcaaaacatttagtaacatattttattaagatatacatctttatatgattattgaattaaagaatttgtaaaccctattttatgatcattatctatacattttgtaactttatataatgtatgttacaattaacaaaactaataatttgtcacacttattatttattaaatactatatactaatataatctaacattatattatgtaaaaataatctacattttttatctatatgatatatacttatatactttttctttttgaacaaatatacatacttacctctttgctagatcaaaatttataccgaaattaacgagcttgcatgattgaacagacgataaaataaattatctatatataaaaattaatttgaatagaaataataataatgatgaagacacattttctccactctccccaaaggacttcgatccagctttgtgtatagctagctagaaacccttgagggagagtggacaaattaaagtggcttccatttacataacttatatatgttgttattataattaagtattacttcgacaaggcaaaacttcctgccactcccctcgcaggctccttaaactaattactcattacataataatggagtcattaattaagaagcctttgagggagagtcagtaatcaatgccttgaaatataaaatattattatgtatatgtatatgattttctctagtaatatttttgtcatcttggttggttgaagaattagggaggggagaccctctctttttataggccccttacaattaaatgaatgaaatatagagagaatattatatattaccatgtgtgtgaaacatggtgatgagtcattgagattatatatgcctttatcaatgtttgaccttttgatgggtcaccttatgtctagttgcttaaccaacatgcatgtgttctcaatagtcaaccccatgcatatcttgattcttggatacctcaaatcttgttttatgttgaaatctcaaatttaagcatagaaaaaaaattagaaaaataatagaggaaaaattagagaaactcattttattaaaaattaataacaagtttttttaatgattttttttgtttgaatatatttacaattgttctaaatcttataaactttatcaaatttaacattaaatttttgtaaaaatatattctctcatttttcttttataatattccaaacataaaaaaaaatcccttgaaattcacttttttttttttaaatttgacttccaaacaaagggttagggtgcattatttgaattttttaatttcttatatcacacaaataaaaaatataacttttgattttgaaaagtaaaaaaagtgttttataattatttttaattttttgattttataaaaaagaaaattacaaaaatgggttttgtatgtatttttaatttttatttttgtttctatattttttcagctaagtgagaagaaataaagtaaaataaaagaaaatgataaaagagaattaagctgaatattgatgaaagatactacaaaatagattattttaaagaaatatgcttaaataagcttgaaagtaatttatttttgtttttaattttttttaattcttatttaaaaaattaaaaaatgaaaacaaaattttcaaaatatgtttttagggaaatattttcaattttctaatcaaaaaataaaatattattcaaataatgattataacagacaatcttaataagtaatattttcacatgcaacaatcactatcaaataaggtggacacaaattataattgaattatattaattaatattagtatttataataaaaaaaaatgatatgatatacagatatctttctcgttaatacacatatttttctgtggaaattaaggaaaataaaataataagacattatagtgtactcagtaaagatttctcttgtgtccctcgaaattaaagctcataatagaaaaaggtgatgagactaatacaaatttacatatataagatgcatgtttagacactaaaaagttttaaatggccatgaataaaaaagtaattaatttaggtaataatactgccaataataatatttatcaggattaaaatttcttgagtgtgaaagaaaaatcatatttgaatttctaatctatctgatagtaacagccattaattattatagaaaaaagctttgcaaaaaatagaaaagtctagttggcctttacgaaattcataagttattataaattgtataataattagtattttctttttaaccaagaataaagcaagtgtaacataataattagaaaggtattttatttttagcatctaaatcttatcttttctaatctgaaaagaaaaaaaaaatcttatctttttctctcatattgcattaaggtcaactcaactggattagaaaattccttcctgtttgacattatctgataataattgccaagtaaaatttcaagggattagggcattattttggtcattttttttatatcaccatctatatattatagttaaacaacaaattttattagttttcaaaaatattaaaatagtttagggtgcccaaaaattacacatatattaaaataaattaaaatctgcatgtgtatgattaatgtttcaacattgtaaattatttgaaatttttcaaaaattaaaaaatacacactagatttataatgtatattgtcatatacaaaaattaaattataaattctttatatatcgaaattgaaaataattataagggaaattatagtaaatggccccaaatcataggagtatgttagtttatgtactcttttggaaaaaaaatatagcaaatgaccctaaatcataagactatgttagtaaatgtccttatttcaatt

SEQ ID NO: 112039 - DNA, 6012 bp, Cannabis sativa
  modified_base (63)..(66): a, c, t, g, unknown or other
  modified_base (3812)..(3816): a, c, t, g, unknown or other
  modified_base (5577)..(5583): a, c, t, g, unknown or other
  modified_base (5671)..(5674): a, c, t, g, unknown or other
  modified_base (5969)..(5979): a, c, t, g, unknown or other
tttttttattttttacttttttaattttaaaaaattattaaattaattttttttttctttttnnnnttctttcttctttcttcttctttcttcttcttcttcttctttcttaagtctacttcatggaaccacgatggttcccttctcttccttccttccttccttcttcttctattatcaccatcacatccaacccccgaccgacaccctagaccgagatcccataaccccaaaaccctagatcttcagatcaacatatgctggtacaaaggcagaagttggaatctccattccaggttgttgcaatcccaaatgatgcagaactactgatacaggaacagacctttctagatcgacttctagtggaccagacttagccaaaggcatgcgtaatattagttttaaataaattattatttttgtgataaatttaaacttgagtacactatttttttaaaataaaataaaatgaggaataaaatataaaaaaaaaagtttttacaccaaattggtatagatttaaaatctaataccactaatgatgtacaatttggtatacactaatttagcgtactattagtatagaatagtgtgaagatttcacaccaatttaataaaataatactacattgaaaatgctcttagtaaaatactaaagtcaattagatctttttttgggaatgggcccattggtattttggtgtctatttttttttactaatttggcataaaatttattattttttctacaataaatcttatttaataattagtaatagttaatttatgaaaaaattatatatatttaacatatattttattattttttttaaataaattaaaaaaatgttaaaataaaaaaaatatataaaaagatatgtattactttggtataaattaaaaatttaacaatattaactgtattaaatttagtgcatactaatttagtatatctttaatatttaatggtgtaccatcctactaaattggtgtataatctttataccattttacttcaaagatatataagtttttacatcaaatttgtctgcatcaaattttatattaatggtgttggatattgaatctataccaaattagtgcatacttttttcttttcattttaactctttttttttttttttttttcttttttcctttttctttttctttttcttaaggagaaaaactcaaccaccaaacaccaagagctacaagcactcaaaaaaggtgggggtgaggttttatttaaagatatcatccgctatcaataaattctgaatacaattaagattcccaagccaccaaataacatcactacttgccaacaaagcaagtttggccaaaaatatgagcaacaccattacaaagtctaggacaatagacaaacctaacatcatgaatcatgctacaaagtttagcaatatcatcagaacaagactcaaagaagtaatgatctaaccattgcttttaattttaagcacaacattcaaacaatcagattcaacaatgatattgtcatataaccaacagagaggcattgagtcaaagcatttcaaatagccaaaacttcatcaacttctggatcaaaacaaccttccatgtgccaaataaccgaagctttagctactcccaaatcatcacgaatcaccatactcaagccactgtaataatttattgatcttattttttattatttttaaaaaataaaataaaatagtcccacctattttaaaacaaaatacaattatattcaatccaattcaatctaatccttcttctttcaaatctaatttaatttttcgtgccaaaaaggcaaaatagtgtaaaaattacataccaattgcaatttgttaagatataggaatgctcataatactaggtaacaactaaccactatagtatatccaaaagtacacttggacataaagaaagtaaacattagacccaacaaatatgactccccaataccctcaagagttacatccaccactcccacattttctgtactatatatatatccagagcatttccaagaaaatccattccaaacgcatttcataatattttattgctcaaaatccatttccaagcctttcaacaaaaaccatgagcagcatcatagaaggtaacaaagttattttcactgaagagcaggaagctctggtagtgaaatcatgggctgtaatgaagaagaactcttccgaactgggtcttaaattcttcctcaagtaagtaaataataatatttccccttggtctacttttatatataaaaagaataatttttttttttcaataaaaagagcatttatgaaaatggaaagataaaagttatacgatttcaattcaaactcatttatttgcaggatatttgagattgcaccgtctgccaagaaattgttctcgtttttgaaggactctgctattcctttagaacagaacccaaagctcaagccccatgctatgactgtctttgtaatggtaaacccctttttctccaagatttgtttttaataaaataaaatagggacatgatttttctattgtactttcaaacaatgtatttcgtgatgtacggtagctgtttgatgaagaatttatttaatctgaggctgagattgatctagcagtaattagggttaaaaaatagtaacttaacttgacattcatctaatataccctcagacttatctaatttactacggaatacattctgtaaaattacgggacaaaatcatatcccaaataaaataatattcgaacttattaatatgtagagttctctattttatctaatttcttttaaaaaaatattatatatggtactccatctcactcgactttgggtgtgtagacatgtgaatcagcggctcaacttaggaaagccgggaaagttacattgaaagaagcgaacttgaaaagacttggtgctacccattttaaatatggggtagttgatgaacactttgaggtatgcatttattttgaatttatattaaaccaaattttcataataactcttttattttattgaattgtggttgatgaagaagtgaatttaatttatgtacattaggtgaccaagtttgcattgttggagactattaaggaagcagtacctgaaatgtggtcgccagagatgaagagtgcttggggagaagcttatgaccaattagttgctgccattaagactgaaatgaaacgctcttcttaggcttattggtgggtgaatgaagaataatgtaataaaaaaataacatgagtgagaagagaacttataaattgtcaaaacattctaaattatttatggggctttttttttttattatttatacgtacctaaaaaagtttctattcacttatacggtcttggtagattttttttttcgtttatgtataacctaaagtgttttattcaataatatagtttgcactatgtataaactattaatttacttttttttccttatgtttgtgaagacttttttcctttattgttatttgtactatggattacctattacagcttttcaagttttgaggataggatataccttttttcatagtaatatgagaaatttttaacaaattataaactcttgcattcaaataataataaggattacctctttttttattcttcaaaattaattaacttatcacacatttcattataaactcttgcacatttcataatgtatacattaaaacaattgaatagaattgatgaaatatttagtttttctttaagctagagtaatagagcgaataacaacataaatataaaacacatttttttttaaaaaaannnnnaaagaaaagaaaaagaaaaaagagtacagaacacttgattagatcaacacacggtatttatatttaacatttttttactaaaaataaagagatataaaatataactatggatgatcatattacaatatctcaatatcatataacaaccatattatagaatccttatttataaggaatgtctccactatatccccactttcacactctcattaatatacgaactcttctatacatatattataaattttcttatttataaaatttcatggagtctaatacaaaatccaccaagtccattgtagtagtagtgcaaaattacaaataatgattaagattctaagatgcaataataataaaataaataaataaataaaattataaactctagtaattagtaatatgcatcttatacaacaaccatgttagaacaattcttacaataactccatctcatataaaaccatgttaacaacactcacaccaacccaatatcatataagacaacaaccatgttagcaatctttacaagaacttcttagcaacttaatctcatacaacaacattaattgttagtaacccttacaagtgttggttttatggtacaaaacaagtgcgcagcaaaaaagttgtgactaattatcattataccatatgttcaagattactatatgtatatatattaaactgaaagtaaagagatgaaaagaacatttacctctctataagcctatcaaggtatcctcgatactttttgtatgttgtatcctcaaaatggtgatgacaaaaactcacaccttgatcttcctgaccaccacacacaaggactagtgtggactagtaggataatagtgtataggaaattcttaataaatatcaacccatgagcaaaaactatttctttaatgatagagaaaaaaaagttttctggttaatcttttttttactctttcaaaaaaattacgtacaaattattctgttttgaaaattatctagaatttagtttatacagtatattaaacaaactcaataaagttttatgtaattaactatttaaattcaaatcctttattaaattaatttactgagattttttaaaaaataatttaatattagagccaaataaaatataattaagagaataaaacatgaagaatgtgttagaattttatgccctaaataatctatttcaatatataatcacatttgctaattaataaaatattagaaatcattttatgttgtatggttcacataatttttttcatgattatatgtttaatgtataaattctattaaatccagaatatatagttattcacgattatagtattgtcaacacagtgaaatataattataattatatgtttcaaaagtttatgtcccatgatttgttagtacactggatttacactgacatgataattagcgataaagtatacttacactttggatacgtgttatgtccattccagggcattgacaaagtatgctattatcagatgtatggagtatacatcagaccagaccgatattgatattagataagatatcataaacttgccattatatttatctaagtctatatcacctagttgatcttaaatcaatagatcttaatcctgatatggttaggttcgatctcatctgtgttatttatgttctttgagttattcgttaaagcttgatcgatccaatacttacatcttgcgaacatggtaatgcaattgagtgggagttctaatcatagatatagaatctatnnnnnnnataagtatttagaagtgaaacaataatttccttcgagcttagcttaatagagataaatgattgagatctcatttcaataattatattnnnntactaaaatatcatttatagatagttaattattttaaggataaaatatattgaaggatataacggtaaatttattcctacttgatgtagatcatctatagaggatctttgactatttgggttataacaatggataattaatagcatatctatatcttggaacatatagaacattctatataattaagagtgcaatttcaaatctatagtggagtcaggagtgtttaataagttaaaaaaatttacttcgtaaattttagaactacttattggaagcttgattatataggctcatnnnnnnnnnnntagttgagataatactacttgtagactcaatta

SEQ ID NO: 112040 - DNA, 3489 bp, Cannabis sativa
tattttatattttacagatttgaaaatgaactcgttgttgctgtggggaaaggcgaacctgctacagtgatgtctgaatatggatacaagtaagtttttggctgcttatcctggcttacttgatttgtgcttcatgtcaatatttttcatcagtgtttttggtcttgtgagatgtcactcctgaatcctgattttcttgtattctgtaacagaaatgttctttcgattgatgactacgcatcattctttgagaacattgacccattgttaccatacaaaaaatggaacaccaagcagactgactatcaaaatagcaatttcaaggatactgccctaaaaaatgatgtgtgctcacagagagtccaggcagtttttatagttagtgactctgttgactggagtagagacattcaggttggtgttgaatgtattattttctcgatcattcatacttttcgaccataaagaatctttatttgaaatcgtccactacatacaccatgatgtaataacaataattattgagattaacagcaaaaactgaaagaagcctagacattccttatgatacatgcacatttgttttacacgattttaactttcaatctaatctttgatataataatgcaatactatactgggcatgacttgtttcccctataccgtccctgtgcatataaatgtattgcagaattgtatcgactagctactacaaatttttgagtacacctagccattcttcttctgttagaatttatcaaatcaatctgttttggtgctgaaaaatcagtctaaattgactaactggatgttcatatcaggttctctgtgacattttaagaactggaggtcttcctggtcgtgaaattggacaccaaccagaattgttttttgcaagtgatgacctgacttaccaggtctgtttcttttgttcatattcattatcactttatgatgcttacactaataatttttaaaaattattcggttaaaaattgagaatgtactgatgaggtcttgacaaaagataggctgcttttcctgctgaacgtcttggtatgggagctttcagaatcgcactggaatctgtcttcaataagtaaggatatagaaaatacacaaatgaatgcagtattatgacacaattctatacaatcaatttagtgaataatcattttttaagtggccaaatatgcactcttaaattcacttgtattaggctttttattattatgaattaatttcactcctttttttttggtgcagaattcacccaaaggctctaaagtatacagcttatgggaaaccaaatccctttgtattcaacactgcagaagctttacttaggcaattagcaaaatctcttcatcataatgttcacaacgccaccaatcatgcaaatgttggaaatcaccatctcaaaacgttgtacatgatcggggataatccttcagtcgacatccatggtgcacgacaggtatgtctattcaataaagacttcttataactcaattttgtttacaaatttaatgatgaaatgactaaatggatatctaatagcatctaaactccaggcaggacatccttggttttctattttaacaaggactggagtttttagaggacgggaaaatcacccgaagtttcaagctgatctggtaatatttttagcaaacaaactatacttaaaataatgccttgcaacattcagcagccgatatctcctccgccctttctggctaaacatatttgtttatatgaagcaaaatctaaaaatgtttgtgcaggttgtggacactgtggaagaagccgttgactatattttgcgaaaggagtcttgagattctataagtatatttttctctccctcaaattttaaataatgtgggatgaaatctttgtcataattaatgaaaggggaatgaaaacccagtggcttaatttatttggttctcaatcatattttcatcgaaatttaattggtcgaagttcacgtattataacaatttatttatttattttgggactaaagatctactctaggggttcaaagcatatggaacaaaattgaccttttactcgtgttaataagaagagtttatttgtataccttatattcaagattgtgatttttttaaacaaatttctcattctctcatactaattttagtgatttttaaattgctatttaatagtctttaatttgattatgattattattgaatagtacagtaatgtcaaattggaggttcaatatatatctcagactttatcctatcttgattaaaaaaaagttgtattgtaagtgattcgtgatgttgagccaatttattttgctatgatacttaatcaaacacaataagatatgggtaaaagtagttatttaaggatatctctaatgcttaaaaaataatagtgccaaaataggtgttaggacatctccgattaataaaaatagttatcttattttaaaaactttttatcatttctcttatatactttaacaaaaatagttatcttattttaaaaactttttatcatttctcttatatactacatcatacaatgtagttcacatacttttgttcaactatttgagcaatccccattagagttagtcttagagtatctccagggttggtcaacattgcccacctgcacacttttaaattttaaccaattagaattttttttttttaattttttatttcagtgagtatcagtatctaaataagaccatattttagggaaagttcaatgatgtagtttgaggtgctgctcgtcagaaagtaagtaaggccaattagagaaaaatatatattttaaattaaagggacaagaaataatgcaatagctggcttgttttttaagaatttctttattttaattggttgttgtgattaataaattgtttaaaagaaataatgtggggtcaaatagggtaacgattaatgttatctgcattaaaagtacttatatatatatatatatatatattcttacctagctgttcaaactcttcttgaactaatgtgatactagaagtttgtctccattgttgccaacattgtcaacccactttaattggttgatttgtgatggcggagctactttgactctttttttagttgtcagtgatgacctaagccaagcaaaaaaaaagaatatataattgcatgcattttttttattaggaagaagaaaacttcattaatcaacaaactaaatgcaccctaattaattacatagactttcttttttttaataaaaatgcaacttttttttttttttgctctgataccaattctaagtatttttttcactaagaaaatatcacattattttaaaatccaaaattaatctatacatttataaaagtgttgattgtgtgtttataaatttcatcaagttattttaactaggctaattagcaattttcccccttgaactttgacatataccaaatcatgccccctgaacttttttagc

SEQ ID NO: 112041 - DNA, 3378 bp, Cannabis sativa
  modified_base (3335)..(3340): a, c, t, g, unknown or other
ttgatctgtttctaatattagctgaaaatattgacagaatcccaaagttatcgagaactctgaaggagctcgaaccactccatcagttgttgcttttaaccaaaaaggagaacttcttgttggtactccagcaaaacgtcaggctgtgaccaatccgactaacactgtctttggcaccaagcgtttgatcggaagacgatttgatgatcctcaaacacaaaaggagatgaagatggttccttacaagattgttaaggctccaaatggtgatgcatgggtagaagctaatggacagcagtattcccccagtcaaattggagctttcattcttaccaaaatgaaggagactgctgaggcttacctaggaaagagtgtaacaaaagctgttgttactgttccagcttatttcaatgatgcccagagacaagcaacaaaagatgctggaagaattgcaggcctcgacgtgcagaggattattaacgagcccactgctgctgcactttcttatggaatgaacaacaaagaaggtcttatagcagtttttgatcttggaggtggaacatttgatgtttccattttagagatttcgaatggtgttttcgaggtattcaattttgggcatcttcaaatgttttgagttaatgctttttgttctgttttattaagtttccataactttgctttcttgtctaggtgaaagcaacaaatggtgacacgttcttgggaggagaggacttcgataaccatttgttggacttcctagtgagtgaattcaagagaacagatagtattgatctctcgaaagataggcttgcattgcaaagacttcgagaggcagctgagaaggccaagattgaactctcatcaacatctcaaaccgagataaatttaccatttatcacagctgatgcttcaggtgccaaacatcttaacattacgctaaccagatccaaatttgaaagcctggtaaatgacttgatagagaggacaaaggccccatgcaaaaattgtttgaaggatgccaatatatctgttaaggaagtggatgaggtcctccttgtcggaggaatgactcgtgttcccaaagtgcaagaggttgtttcagcaattttcggaaagagtcctagtaaaggagtaaatcctgacgaggctgtagctatgggagctgctattcagggtggtattcttcgtggtgatgttaaggagttgcttctcttagatgtaacccctctttcgctgggaattgagacattgggtggtattttcaccaggcttatcaaccgaaacacaacaatccctacaaagaagagtcaggtatatcttaaaatcaattaacattttacatggttacgttttgtagagttaattcacctgtttacagtcactgcctttcaggctgagagtaattttttaagcagaatttctgtgcatcgataaagttatgtcaattattttccttactattgtggaatttacatcctctgattatcctttcctatatttttttcaggtattttcaactgcagctgataaccagacccaggttggtatcaaggtcctgcaaggtgagcgtgaaatggcttccgataacaagtctctcggtgaatttgagcttgtaggtattcctccagcaccaagaggcatgcctcagattgaagtaacttttgacattgatgccaatggtatcgtgactgtctcggccaaagacaagtccaccggcaaggaacaacaaataactatccgctcatctggagggttatcagaagacgagattgagaagatggtcagagaagccgaattgcacgcccaaaaggaccaggagaggaaagctcttatcgatatcagaaacagtgcagacaccactatctacagcatcgagaagagcttggaagagtacagagagaaaattcctgcagaagttgctaaagaaatcgaagatgctgttgctgatttaaggaaggcaatgggagaggacaatgctgatgaaattaaggcaaagctcgatgctgcaaacaaagctgtatcgaagatcggacagcacatgtccggtggtgctggtggtgcttcttcatcgggtggttcacagggtggcgaacagacccccgaggcagacttcgaagaggtcaaaaagtgagcgttttccaaactaaaaattttaaacattgaaattgcttctaggacgttttgttgtatctaaaaaactggggagtacactattaagcttccttcttttgatcaagtttagctataattaggtgaataacaaaattagattccggctccttgttgagagaaacacatggaagattaccttttttttgtgtttataattttaaaattttgggcatgaattgcatcaaattttctcataataactagcaatatttttttattgctatttacaatgtttctgttttgggtattgattggctaaatttcaatataacaaaactttatagggttattagtgacaaaatcttttttattttgattttatacacttaatcgttcttttttggcaaaatttttttattttatgtttattttttttttacaaatttgtggtgttttactaggtgtacacaataatcatctaattaatatttaacagttatatttatttaacactttaaatttgcataaaaaaaaagtaaacttgaggttttgctaccaaaaagaaaaagattagaaaattaaataaaaattaaaacataaaaaaattttgccgctaagtaaactttattgtgatgtgtattataacttaattagaaaacaagaatcacgcgcaatgtaatatgcagacttgttagcagatcactaacaaagtttaaagaaacataactcaaatgattaagcatgttttgtaataaaaaataattaaaccaaactgagaaaacattgaaataacacttgatatggcttggacaggaacttagctatccgtttccaaaaccacgttatcccgctcataatgatcaatctaactcagagcctcttttattctaatgatttttgcaattttcggcagtacccaaccctctcttcctctttggaacgtaaaaacttctcatcgcttctccgagcaatgcagcccataccaaattgtccaaattgctcaaaaattgcaccattgacgttaactttgacctgattagaagttggagtaatccaatgctcaaacactttatcattactactatataacaataaagagtcttctttctttgattaagcataaaaatacaagtcaagagaagttcttgccgataatacaaaaacaacaacaataataatagacttagggctcgtttggtacgccgtataagggtcgtatnnnnnnaaataataaataatactatgtttggataaagcaatgta

SEQ ID NO: 112042 - DNA, 6968 bp, Cannabis sativa
  modified_base (908)..(920): a, c, t, g, unknown or other
  modified_base (6912)..(6918): a, c, t, g, unknown or other
aatgatatttttttttttgaataaatcaggagatttattaaataataaattcgttcaaaataatagaatgcacttcagaagaacaatcctccaactgaagtgcaactgaagcacacaacctgtagagaaataagagtctcttgccaagcaatgagctaacttgtttgcagatcgtttaacaaaatataactcaacaaaagataaagccaaaagtaaattcctaacctcttgaacaataaggccaaattgtgaagatataaaaacattactttagattgcgactccaaaatagtatttaaccttataaaaatggtagtattttgttttaaaataattattattaaattaaaatatataaataagattgtgagggcctccgtgtaggtcacgtcatcttccaatcaggcaataagcgttggcatttcgttctatgtattgatactttcttcttccactaaaaaagttgggttgatgtgttacttgatcaccaagacaaaaagcaaaccccttcacaagattcccattatgccctctcttttatgcttttattgacttaatacttttttcttttttagatataataataaagagccatcacacttgtactacttaatatttttggctaaataagatttttaatctataaattttaatatgtactaaattatgttatctgaattttttagtcgttaaaaattctttatgaactattgagatggttaaatttaacttttaaagacttttatttaattttattcaattttactattttcagtgattgtttatgaactaaatcatgctcgccagactttgatatctaccaaatcatacccctcgaactttgacatatactaaatcatacccctgaatttttatcaaagttagacttttttttactaaaattagannnnnnnnnnnnnatttaacaatttcaatagtttaggggacatttttaacgaccttaaaagtttaaaggcataatttgttacatgtcgaaatttaggggcaaaaatcttaattagtcaatattttttatgggtatcgttttattgattgataatatttttaaaaaattagtttgttaagttatataagatctgatacttaattatactaataggaatatcacaccgaaaaagatgttaatcatcaataatacattttaaaatttctcaataataaatcaaccgtgttgttttacctttaaaaaaaatcaacacaaaaacctttctttataagtggattattcaaatatacattatttaattcataagtttggtcaagccgtatgttattatgtgttataccttccaaccaataatattaattaaattaactattgaagaaaaaaatttctacacagttgggtgaaccaacttgttttgttaagttttggtttggggacatgtgatgatgatagaccaaatatagattggcaattaattaataatttgagaaagagactttggatgatatattagttataattaataatataacatcatccaattcacatgattccatccatattatcattattatttctttttagttttttatttaagttgtttaaaagacagatagagggaaatctcgttatcttactaggtgttatttaattcttaattaaaaattattcatggttataggatatctttatttagttatagtttattattttctttttttgaaataagttatattttattattggtttgcttggttaacaaatataggttatcgtaagattcgttacatcagaaggttttcagattcggtattttgtatatgtggttatctgacattttgtaaacaaaaaaaaattaaaatcaattataataattcatatgattgatttttgttattccaaattaatcataaataaaaataaaagtaaacaaatccaacgctttcaaaatttaaattaccatttatggcctttactattacaattttcagttaatacttttatctttatttcacaaaaaaaattgttgtggataaaaatcctatctaatctttaaaaacaaatctaatttagttcgatttcattttcttttctaatccatttttacacaataaaaaaaatcaaaaaataaaaataaacgaatattcctctaattcccgtccaagttcaatttcattccttatccaaattcaattttttgaagtaaagcttactctgcaagaaaattctggagggtattaccgtcattgcagactccaccataactttattatattcatttcaagtcctttttcccggtgccttcctattctctctctctctctctctttcgatctcatccctcgtcttcttcttcttcttcatcctcaataaaaatccaaacccaaaaataatttcctggaaactcacgaatcgtcgtaccgttacgtttttttttttttttgatatattggactctgtaaattataaccttttggttttttgaatttgaattcttcagaaacggtgggtgttttgggtttcaatagttcttagggattgaagaatttgatcgagtggaggagaagcaacggttgtggtgatcagagagggttgaggcgaggggaaagagaattaaaagaagacgggggtagagaggtggttggtggggttgtgaaatttgattattatggattgcagggttttgataccgagtggggacccgtgggttcggggtcagatcggaggagcatttagccatgaaagcgaacacgacctggctttaatggttaccgatttttgggagaacgggagttgtggtaccgagtcttggtgtagtagcgatagcgaatccggtctctctgatctcgcccatctcgctgagaaaattcctgtgagtattcatcgaccccttgtttttttttttccttaattgttgcctgaattggatttaaaattctttcgaaattggaaatgggcaggcggaaattttgtttaacgagactaaaattgattgtaaatttggtttatgtattcgtttgtgatacagcggtgtaagcatccattggcgcagtttgaaattgaaacgctttcagtggttcattcgcttatattatcaatcaataagacggagcttcacgcggtcaagtcaggaccatgtaacgctagctgcataagattcactcttgtaaaacttttgaggctttctgggtatgatgcagcggtttgccaatcgaaatggcaaggcactggaaaggttccaggaggtaattatatttatattattgcttgtatacttaaagcttttaatttttgtttgaattttatttctttattatgaacttatgaaaattttgtactttttatattcaggggaccatgaatacattgatgtgatcaaccacaaccatggtggtagctctgagcggttgatcattgatatcgattttcgcagccattttgagatagccagagctgttgattcatatgacagaatattgaattccctgccggttgtttatgtggggtcattaactaggttgaaacaatttctacaagttatggctgaggctgctagattctcccttaagcagaattcaatgcctcttccaccatggagatcacttgaatacttgaaatcgaaatgggaatcccattacaaaagacaagcataccctgatatgcaaaacttgagtgccaacccttttgaccacaagcaatgccgtggccatttaaaaaggttgcagtctctgcttcaagccgaaatcgaaaccgagcggcttttaaagccaatgaacaacaatgacaataattggagaattaagcctgagagaaggaggcgttatctttactagaagttctttcagatgtataggttttagcccggccttttgagactaaagactagtgaagactgaagagttcgtgttatgagatttttattgcggtttattaaatttttttcccctccctacagcggatactaaaataagtgaaccaaaatgaagagcaggttcgcatgcccagttccaataggcaacgatggtgagagaaatatatatatatatacacacacatacataatatatatattcttttgatatagttttctgtttctatgttgcactggcatcaagccccaatatttggcttttggaacattagcggattttcttcttgcaattccaacagccgaatgagttgctatcattgtttggtgcatccatcttatagaatctttacatatttcttaattggaaaaatcctcccttatgtattaatattccttgtccctgaatttttgtgggcaagggaaattttgtccctgcatcttatgttatttttcgcattgtaattcatttatttcatttaatttaataataatggttctcttccattttcctatcgaggtgaaatatgaatttgctttaaatctatatcaattagtatttgtggatctactttagatatcagatgttttgtgttctttgagtatgtacagtgtcagttcccctatcaaggatttgcatatgggtgtttaatacttgggaattatgtctgacctgttaaaataaagtgcatatctattacaatatatgcctttatatattatgccataatgtggtgacaccttgcaaattataaattatttatatatatatatatattcagtatcatccgtaaggaataaggaggagccagcgtgtgttcgatttctttatggcttttctgccaggcttgggacttttaatatagtttaatttgaagtaataaatggggtttcgaaccctatgcagcggtggaaattttgtaattatatgatgaaaatgaaaactatctgaataggcatcatgcactataaaaacaattgttttgtggggtctgacagatgcatacagaaaggaattttaatatgatgctttatgagtttaacaagttcaaattatttaatatgtaaaacggaaaggcctggtgcttataaaagataaatctaataacaaggatggtctttattctggttactgaccaagttgctcactcatgtcatcccatctttcatgactgcaaattttcctgaaattaacacaaaatatcatttttatatcatcagtacatgatattacataggatatgtaaaagtgctcctaaacaattgaagcaaaacttttctattttttttcttattattattcaaaatacattattaaatttatattttttctatattacagtgcactatatataaatttgatttgtttagtcgtatcaagataaatattaaatattacaatatcacattaaaaaacttaggaaaagaaaattaatagtatatttatggagtaatcaatcattttctatatatactaacaacaaataatctctatatgaatattcttcattggttaaaaaaaaagggcaaaatagctcaattttagctcgattaatgaaagttcactttgaccacattttctttctttattttagttagggaaagaattattttagagagcagtttctggggttgttatgaatgttatgcatcataatattaacactacgccactacctttaaccatttaaaaagtttaaagttggacccatgtatatgaggtactattagtctattacaacattcaagaaatgttgtattaatctcaaatacatgtgtactgtgtataacccacgccacttttcaaccaagaacaaataaaacagcaacaatgccttagtgttctatataattttcattaagaaggatcaattcaaaactaataacacttttaaagaaaacttatttttttgaaatgacaatatggtagtcggaggtgatgaaatagaaaagaactagtttttattttattttatttttaaattgtattttaaagtattagaatgtcattttaattaaatgattttttattattttagtagaatgtttatttcattttgaaaaagaaagaaagactattttaataatcaattttttataggttttaaattcaatccccttcttattgtcattcatatgtttttattcctttccaaccaaacacaatttaaaatatgaataattttaggaatgacaatagggtggataaatgatggtttttgtaacaatagagtggaataaattaaaaaaactatagttcctcataacatgctagtactagtagtatatcatttattgtaagaaaatcataagttcaactccctctatttcaacattaatatacatataaattattaacaataatggtcattctgttattagcagtttgagaaatggtcgaggaagaaaagtaaaataaaattctcaatcaagttccaaaattaagaaaacaacacaacattacttacagtaaaatattaatttgtactaaaatttaactgtatggctttacttctaattggtgaaacgcaaatgtgtataatttgatgttataaaaatcgtaatgtgtatgtaattaaccaaaatattccaataaagaatgatctataatcatttacgttcataacaacaattaaattcatctcaaatgaacattttgttattataactgatgcaatcaggctgtcccaactcccaagccaattgagggcttgggccgaaaactttagttaaacttttttttgaagaataatggtaaaattctaaagtatgatatgttaaaaagcaaattgagccatttttaaaataaaatatcaattatagtgattttaaaaataaattagaacttctttaagaaattaattttattttttttggtgaatatttgtaaaaagttaaaatttagtattttaaaaaataaagaatattttttttttcctaaagaaagttttgggccaggatggaggcttcggcaagggcccagcccgcctaatctttgggctggccatggacgcaattggttttgtttatagaggaaattacacttagtatgagattttaaaagttcttatgatannnnnnncacatttaagtttggtcaatttatatggtatttttttgtttttaggtttt

SEQ ID NO: 112043 - DNA, 5480 bp, Cannabis sativa
  modified_base (5405)..(5415): a, c, t, g, unknown or other
  modified_base (5446)..(5446): a, c, t, g, unknown or other
attgataatgaattcaatctctgtgtaatcaaaggacactttctttgtatataaaggagtgatccaacgtgaaatagaataagacagaaaatcattgtaacagtggactaagcagaccgtgatctgaatgaacaactatattcccttgtgttctttatatttctagtacgtctgtgtgttcatagcttgaatactcgccattctaggttgagtactcacacattttctgcgtatatctttattatattatttaatttggtgttgtctaaatttctccaacaacaattagtatcattggagccatgggggaaaatgctagtatcaaatctttaacaaattgaatgatgtccttaccaacaatatcccaatgggtttgatagaaacaccatcagggcctgacgctttgtcaggatgcgtttggaataaagcctacttgacttcctcatcttgaataggctttaaaaggtcatcattttgagcaggatcaaccgaacacattacaccattggcaaccatttgaaactgtgaaacaccagcattaaacaaggttgaaaaataatcattaataacgatttcaaggcccaaatcccaatctttgacaaccccattactgtcttgcagagtatggattttgttattacgcttccgtgtgctagcatacacatgaaagtacttgctatttttgtctccttcatgaagccaatgttgcttagacctttgtttccaataaagctcttgttgggcaagaatttcaaaataattagtctttttagtaacaaaatcttgcatacccatagcatctgtgctatatatcaatctagacaatttttgtttgctatgagacagacattttttgaaattacatgcgcacgaccccaggtatccagtttagtgccggaagctttaatcttgtcaatgagaggaagatgagtgctattctgcttcagcaattctcataacagaagtgatacattttaccagacaaccatggaggtttaggttaggaaaatagaagtatgatcagaggaagagaagtcgccattagtaaaagttgcttggggaaaggactcaagccaaaggtgagaaacaagagctttatccaaacgaattttgacactattaggcgtacctttgcttcgcttccaagtataaggatagccctgaagctccaaatcgactaacccgcaactgtacaaaacctcttggaaaccatcagtgagggacgtagggtagggtcgaccccccttcttctctaattggctgctgatgttattaagatcctcgataatacaccaatgtagctgagactcgggggcaaggtcatgtatgagcttccaagtcttgaattgcatgcttctatttggcttctcatagatgcatgttaaacgccacgcagaagtatttggcagcaagatttctacatcaatataattttgtgagtaacttaacagttgaacctcttcttggactttctaaaacaaagcaattcctcctttgtgaccttgggcctcaacacaaaaaccaccatcaaaacttaattggtctctaagcctatccaccacatctttcttgcataaagtttcacataaaaagataaaattgggtttcttttgagcaacaatgtccttaaggaattggcaggcccgtgggttcccaagcctacaacaatttcaattgatacaactcataatgtttggtgggcctgagcaccacgacccaccacattcatattttttgacccggtattcatttggcccatgattttagtggaagccacattttcatgctctataacaaatattttcctttttaattcagcatttgccagctcttcaacctcttcatgactatcataaaccacaatccctttatttttggaatgatattatgctagatcacgggaagttgcatccgtaaaatcagtgggtgatttattgacaaagttgactccatgattagtgggatgagcatgaggtggtgagctattgaaagatctgtcagagcggaggaacggtgaaacatagacttgttggtgtcgacgaggtgtggccttcatccccataccatacggcttaaacagagagcttgacggtgtgtcgaataaacgtggacaaaatctcttttaatgtcccattattccacaaataaagaaaaacactaggacatcttcatacctaaacgtagcgtaaaaactgtccccatcacgtttacgaaatttcatcttccttttcaatgcttctcaagagatagagttgcacgtacccgaaggtactcacaccaaaccccaacaaagttatttggatcaaattcaagaaaagtgcctacataattactgccatcccgaacaaccttcatagttaagaacacgaattgcaaatcatgaatttgcacccacaaataaattgaatttaggcttagagtcctggcattatcaccatctttctgttcgtactgtagggttcgagcatatctctctctagctttgtttgagtctctagcaatatgagggcctccaataaccacttgcagatgtccatccatgggtgggggcataaatgggttctgattattatctggctggccaaccctttgatcctagttggccttaatgtactttcgtaagtgcgggttatttttcctgatgaggaattcaatttcttgtttcagattatttcactcgttgctatcatgaccgcaatctccatgaaagcgacagtacttggtggtatccttcttgctcatatctttttttcatcgaaggaggtcttttgtatgataccatagaccgacttgtcgtgaagatggtttctatctcttcagtaaggatagtaaaggcagtgaactttggtgctttctcttgaggatgatgttattcagagttattatcgaacataccttttttttttccattgccttgttaattgccattatttgaccttttaccaccttattctgttgtgagttttgagtctggacggatgtattggcagtagtggtgtgactttggttggttttctaatcaattgtctctacacaccaaactgcttcttcaagctttataaatccgtctgctcagtctagaaactctcccatagatcctacattaagtcttttgatgtctttcaataattctcccaggagtttaattccttataggatagcgacaagttttccctctttagttaaccctttcacttttatggcttatgtgataaatctaccgatgtagtcttgtaatatcccaataagcctaatggtaagtaattaggatttataattatattatggattaatcaggtaataagtgggattatgatcctactaatctagttcaacataaattttaaattcgctataagtgagtaaataagcgtaatttataaattacggagatttatatagtatgtctaaatgtaatataagataaatgtggaataaaaatattttcaggtttggtgaccttggacactcgatcgggggctaaaaatatcataacatgtttaattattagttttgatgggattattttgattagttgatagtgtatgtattggggtaattaggagtatgtataatttaacttaacaccctagaagtatagatttcttaatggctaagaaataataagataattattattaataaagttttattattattattattattattattatctttttataaaaaaaaatcagattatatatatttataaatttaatgagttgataaacataaaatgaaaagaagtaaccctcgcctcttcacccttttctctcgagcaaaaccaaaccagaacacaccattcctttttaatttttcttcttcccaaactcagcttctcaagctcttgatagccaaggtgtgatcatagtgggaaaggagtaagctcaagggcccgggatgatcgatcgttctcgaagcaagtcagccaacatacctaaacaagaacttgaggtaagaaaagtattaagtattgtttatgattaatgatataattgttatagtctcgattatgatgaagattccgaaatgcgtttattgtgactcgattataatcgagaataatgatatatatttgttatgactcgaccgtgatcaaggtaacgaggagaagcaattattaccgtttgtgactcgatagtaatcgaaggagaggcacggttattaccgttattgtgaataaataatgattggaaacagtcattatcgttacgagtatttacgcttgaaactccagttaggtttcttacttatcgttcgctttatcgggcaacgatagtgacatacatagctcgtggataacgagtggtgaagattaaaacgatcattaccgttacgagtatttactcttgaaaccgcggttaggtttcttacatagcgttcgctgtattgggcaacgatagtgacatacgcagctcgtggataatgagtggtgaggattgaaaaacagtcattaccgttatgagtaattactcctgaaactgtggataggtttcttacttatcgttcgctgtatcgggcaacgatagtgacatacttagcttgtagttaacgagtggtaagggtactttatgaagtatcgggattgtgtgattacaatgttgtaaaattgattaagcatattattatatgatagattgtaatcaaatacgttttgttacagtgtgactagacaatccttatactacttatgaagttagtcacttttcttgtagagtctcagtcactcatggaatgtacgaatgcgtgtttatagagatgtaagattatagtgctttatgaagtactgagattatgtggttatggtaatgtgtgaattagagtgctttatgaagcactgaaggtgagtatttataatgatgtatgtttagggtgctgtatgaaacacagagattgttgataattgagtagctatacatattcttgattatgtaataagtgtgctcacatagacgttaagttatttatgcaccttgaatgtatatgacctattggtatgtatattacattgtaatgaaatttgctagcattttctatgattttatttagtagcttttcttgttgagtcattgtgactcacgggtgctttgtggtccaggtaaggaagttagaagttgtgttcggccatgagtcagaggtcttctagcgatgtacatatcagtcgtggtgtcttggcctctgggaagcaggatcgacttcttatctatgtttggaaatgtaacctattgtaaaagaatttttataaataggggatccccgtattatggtgtatttagtataaaagttttatttcaacttaatcaaaaaagtttttaattaaaccacactttttttaaactaatagatttgtaagaaataagtttgtgaaagcacacacgtggctgttggaaatattttaccannnnnnnnnnntactaccatgtatgttttattaacatcctantatgaattctaaaacaatgaagatcggaagagcg

SEQ ID NO: 112044 - DNA, 2457 bp, Cannabis sativa
acatatattattattctataattaaaatttttaaaaatataaactaagattatatattaatttatttgttgagtgtgatttacaaatttaactatttattagtaaatatttaaattaataattctaatgattttttttcttttatatcattgtcaataaaatatttttaaaaaattatacaaatataattgaagctataaaaaaaatacatctggtaattaactcattaattatttaaaaaaaattctggaaaagtaacacgaattttaacttgtataaaaaaatgtgctcacttgtttaagaaaaacgaactagctccattaaagcacgacataaattcaagaatgatacgaaaataccaagtccatcagtcaaaaatattagcacaatataccacgactcatattttaaaaaataccaaaaatatgaaccggccagtccagcatgcacctatctaaaggactttaaatctacgttttgatgtagtttgcttagaatttggatactttcactgcattttttttttgttaatccggtactttcatatacatgttgcaaatggaaatagtggaaatagatgataagtatcaaattgcaccaaaacatttttagatgtttttttatttttgcgcctaaattagtatcatatttagaagttatttttcctacttaaaagacagttaagtaattatataaatgctataaatataataggagaaacatttttttttttgtgatctagacttgagagaagatttgaaaaagaaaagttgtcaaatcaaaattttatattgtaattcatattttctataatgaaatatctttttaaaaattgtcatgtatatatatttaaatttctttttgaaaaaactctctttctctctcttctgtagtcaaaataaaacagaagattaccacacttgattttctcattttgttttactttttgttaggtgatttctccaaccattaggcaaatgaaggagaggagagaacacatggctcatgattgcaaagagaagaaagcatgcatgactgacttcacttatcaataacctcttgtcttcataataatgcatatcattgctaagagacaagagaagatacaaactaaattgatgaaaaataactatgaatgatgattataaatttgattcataaataaataaattaaaattgaagcaaaggaatcatataagaacagcaaatgtcagtgtgtaactttttcatcatcaaaactagcttctcttctctctctccattaaaattttcatttaaccaagcaagaatcagacaaaagcattcccatataaaactcccacaaaacagaaagaaaaagaaaataaaaatgattttgaaaaaaaaaggaaaaatataaaaaaggtgaacaagaatccttctaagagttctatttgcccactttttccatcattgtttcacaaacgaaatgattagtcatttactatctcaactccaaagaatctatataaaagaaaattatttaaatgggaagagatatgatttttttttcttcccaagattacaaaggcacaaaatcttgttaatgacagatggaagaacatggaaaaagatatggattttgatttgaaattctcatgttttttttccctattctctctcaagagctaatagaatattattgttataatatatattatgtaactatccatgaagctcaattcttgtttaatatctttaccaagccttgtgtgcatttatatagcttgaaaatgacattattggttatagtggtgtgtgctatgctatgtatcaagtttggattctgcatattaagaattttagtggtagacaatatatatgagcctaaaagtcaataactattttttttttttttaattttaaaaagtaaataatttaaatggaaaaaaaaaacttcagtttttattttagaacaaaaaactcatttttatgttaaaaataattaattatgaatatactatagtttatttttttgtacatttaatttgaaaacatgtaatggatgtttacaaactcgtaatattacttataaatttgaaaatatttgctacaaaaagaaaaattgtatttttgtaaaattatgtatttttcgtaggaaatattacacaaagtatctaaaatttttttttttacatttttatggattatatttttttttcaggaaaacaatattattctcatgtttctacaaagtgatataatatctctgcaacataaaaataacgtgtaaacaataattttttttaagaaaaattttcacatatgcacaaaaggagtaaatacttaacaaatatacatacacacgacaaaaaaaaaaaaaaaacatatatgcggtaactatatattaaatggatattagcggctaaactacctgaactttacggtttgtaacagttaaccacaaaaatcgaaattttggtggcataactatctaaa

SEQ ID NO: 112045 - DNA, 3570 bp, Cannabis sativa
gaactaatgaagaaggtaagactaagtgtatatatgtgtatggtctattgatttgattctggtatcaacattatatctatttgctgaaataactgagtaaagagtaaactaatatctacagtttgaagttttaacattactttctatttcattgtttgacttcttacgagtccaagaatgtgtcactttaattagataccctaactctttttaaacaaaagacacagtgtgttcacaagaggcatttactccgctttcggtagagtcgagacaacatgcaaggtatgcattacattctcgaaactacgattatataagtatatatagctggatttaatgtacattcgttcaaaattcttaaaattaaaatgttatttaattacttcgatcaacagttgataattattaaaattttgattcatctctcctttaatttttttcgttcataattaattaaacatatttacccttttactaacttttcctaataattgttcgtttgtgttatagctaggatagtcatgtaaaagcttcatctaaaaaggtgagatatgtattttaaaattgcttcaaataccttcatctattttattatataatatgtgcagtctttgacaaagtcagagtatcttttttttttttttttttaaagatttataattttatgattgagattatatattgggtatatgttgtatatatattgataaatatacaaatttatatatttagagtcattcaattttgttattcaaatatatatgttgtttcgtacatatgattatgtatgtttttctttaattatttaaaaaaataagtaaactgaatatttgatgtttgtctaactgttagtacttgacattaattaaatatataaaactaattaatacgtgcattgcacgtaatttttacctagtaatttgtaaaagagtgcaaaagtgttaaaaaaaaagagatataaaaatgtacacttcttatatgtatatataaaggcaaaataatagtttgagaaaaaaattaaaagagaaatggaaaaaaatacaaaagtgaaatagagatagaggagaaagaaagaaagaatattaaaaaaaaaagtaagccaataacaaaaaaaaaatatatatatatatatatatataaagaagagaattttttttttgaagcattaataagtaaaaaagaaaaaaaaaatagctagggaaattataaatttaaaatttttaaaaaaattaatatttagtgtaaatataattactaaaaaaataataaattatgttaaaataattgatacctagttcatcaattcaactcattctagtgaaatttcttaaaatccaatgcattgtctacaaaatatttgactcttctaatttttgtgtaataaatgataattgtttttggttaaataatttatatttttttttataggaatatgtatatgttcatactacttgttctctttgtttttgtaagaaggtgtttacaataagagttgctctgatgacatggatatcaatgtttgacacgtggtaagaaagatgaaatctcggagttgagtagtcctgagtcatagcaagtcggtctggaaggggtccctagtcctacacccaggttgacttcgagaactctgggatggaagtttgtgctttagttgttgaggttcaaataactaatatgatagtggcaaaattaatgatcaatgataaagcatcatcaaacatttcgttcaagaaagccctaatcagaatgggtttgactttagaagacctagaaccatgtgaacaactcatgtatggtttcaacagagctgacattcctccatgtggcacgatcaaattgccacttactaggagaccaccatcatggccacgtttatagttgtggacgtgaagtctccatacaacgtgatgctccgaaagcctattctgtacgaccttcgagccatctccatagtataccatttatccattaagttcccaacggttgctggtattagttgtctccttggaaatcaaggaattacccgctagtgctaaaacgtgtcgttatcacttgccaaaaagatctcttctattgattccaaggggaagaacaagacctcccttgctactatggcaccagagcggacgtgcaaggcctttcctgcaaaagccagagagacaataaagacctttaaagtccaaactatagagaagatggagacgacatctaaagccacttgaaggtgctcccaagacgaggatgacattgactcctgttttggggaaattgactcaggagttggtctgatcgaggaactcaaagaactttacctcaacccatcagacccaaccaaagttgtcaagattggaacaaacctgacgaaggtcttgagtgagatgctcattgctttcctaaggagaaataaagacatctttgcttggtcgcatgaggacatgattgggattgacccttaggtcatctttcatgccctcaacatagacaaagttaacttcacccccgtacaatagaaatagaggctccttgacaaagaccattccaaagctctcaagaaagaaattgaaagattatgggagaaaaacttcattagggaagccatctacccaatttgggtatccatccctatttgggtgcttaagctaaatggaaagtgaaggacatgcgttgacttcatcaacctcaacaaagcatgccctaaagattttttcccactgccacaaattgatcaactagggaataccacagccggccatgaaatcctcacattcatggatgcatattttggctacaaaaagatcagcatgcatgcacaagacaaagagcatactagtatctgaacaaacaccaggctttattgctacaatgtaatgcccttcgaactcaagaatgtaggtgcaacttatcaaagactaatcaactgtatgttctataaccaaattagaaataatatggaagtctacgtcaatgatatgctggttaagtcaaaaagatctaaagaccacatcaaagatctataagagtgcttcaacatcctacaagaatatagaatgaagctcaaccttctaaaatgatccttcgacatccagtaaggaaagtttctgggattcattgtcaactcaagaggtattgaaacgaatcttgagaagatcaagaccttacacgacatgaagtcatcgtcccagataaaagacgtgcaaagcctaacaagacgaattgctgcacttagcaggttcgtctgcaagtcaactaacaagtgtgttccttatttttttttaaaaaaaaactcaaaggaagcaacacggggtttgaatggactaatgaatgcgagcaagccttttaagctctcaaatattatcttgccaagcctcccatcctattcaaacctgttatctctcaaaaaatccaaaataagtgtgcatgaatttatattatagatatggaggtccaacaaggaggagctcattagccaaagaggagctcattagccaaaggggagcccattagccaaagaggagcccactagccaaagaggagaggagcacattggccaaggaggagctcactagccaa

SEQ ID NO: 112046 - DNA, 1417 bp, Cannabis sativa
  modified_base (45)..(65): a, c, t, g, unknown or other
  modified_base (1152)..(1152): a, c, t, g, unknown or other
tcgttttagaagttcatatttaaggtgttaatcaacatacttgtnnnnnnnnnnnnnnnnnnnnnaaaataatttccaacagagactgcctactcgacttaaataaggcacatcatccatctttcttcttttgtctcaatcttaggagattgcacttcgaacaatttaaagtgttaagctagaggagttgcagttggtttagcatcagtcatcataaatttctcatttactttcttgaggtagctgccttgacttaacatgattgtatggggtctgttcctctttatttcaatccccaaaatcttcttggcctcacctagatccttcatcttaactcactcttgagttgagacttaagcttatcaatgctggtcctatattcaccaataatgagtatgtcatctacatacaataagaggtaaatataattgttaaaatacacataagtgtcattgttgcttcaggtatagccgaatttcatcatgaattcatcaaactttaggttccatatagagatttggttaaaaggaaaaccttgtctggattatcattctcatagccttctagaatctccatgtagatcatttcttctaaatttccatgtaagaatgtagttcttacatccatttgatccacctcaagatcaaattctgcaaataaggaagaaataactctaattgatgtttacttgaccactagtgagaaaattattgggattttatgccctaaataaaatcaattttaatataatcatatttactaattaataaaagattagatatcattttatgttgcatggttcacatgattactttcatgattatatttttaatatataaattctattaaattcaaaacatatagttgttcacaattatagtgatgtcatcacagtggaaagtaattgtgtttatatatttcaaagtacttagtcacatgatttatcaatacactagatttatactgacatgatattcaccgataaagtttacttggacagtgttatgtggaatgtcttttctagggcattagtaaagtatactagtatcagatgtattgggcatacatcagactggaccaatattaacattggaaaatttatcataaacttaccattatgtcattttgaagtcaatatcacttagttgatcntaggtcaatagatcttaatcctgagatggttaggttctgacttaaatgtattatttgtattctttgacttgtttgttaaagtagaccaaactagatcggtgtaatacttacatcttagaaacatggcagtgcaattaagtgggagcgctaatcatagatatgcaatctatagcttctacaactataagaagtgaaatgatgatttcctttaagcttggcttaacgtgataaatgatagagcacttatttcagtaattatattagt

SEQ ID NO: 112047 - DNA, 4463 bp, Cannabis sativa
  modified_base (4404)..(4419): a, c, t, g, unknown or other
ttttttttgaaaaaatactgtataagttttatactgtctactgtattaagttttcacagctgtttcacgattatttcttagttgttccactgttgttttaattgtttcattttgttattttatgcctgttttataaaagagagtatttttgtaaaaaattcgtgtggcaataaaattgtaaatttttacccaaaatatagtatttttgtataaatttttaaaaaaaaaaaatcgatcagatgtataaaccaccaaaacataaaataaaataaaataaaaaaagaaaaagaaaaagaaaattcacgaggaaaatatatagaaaaataaaaagaaattattaaattaatgaaaaaggagtaacaaagcaaaaagaccgtcaagtgtggagaacgtgaagtagtttatactctagtccaattaacaaatgcaactgcaatgaaggccctataaattctcacattacatatctaatttacaaataagcaacaccaacaatggcttcttctcattctctatttatttttgttattggggttcttcttttccaattttcgtatgcaaccttaaacgacaataataataatgaagatcggcatcttagcttttcgtccagcacttattttccaaaacgacaagccgaaaagctgataatggacctgaatttgttcccagacgacgatataaacgtggcatcacatgagttcctattcgaaaccgataagatgatcgtggaaaggagtttccagttccctcatattgccaactctgctactccttctcttcaagaacttggccaccatgctggttattaccgtctccctcattctcaatcagcaaggtaatatattacatacataaatattaattgctctctactgagttgagttaaccatcacaattgtcgtcattttctttcactttgtgatccattttactgctgattgcgtctagggattttgaatttgtacccaacactatattatttatatattgtacaactatttagtttacttttgggaagaagaataaacaagtatatagggataaatgccttaaggtaataaatgtggacacgtttaaatgccatttcatatttgtatgtactttcagaacagaagttgcctttataacaattatgaattttcaattatggtgactgcttagctgtctagtttttatattttaataatttctggggaaagatactcttgtcagaattagtgtattttattgagaaatgaacaaatgaagaagaaacctgagttttctttcttttggtaataataatacaatagaattgaagataaggtgacatgatttaattaacttatgtttctattaaaattacaggatgttttacttgttctttgaatcaaggcaaaacaaaaaagatccaattgtaatttggttgactggagggccagggtgcagtagtgaactggctgtgttttatgaaaatggtcctttccatattgcaaacaacttgtctcttgtatggaatgaacatggctgggacaaggtactgcatcattcccatctcctcctatcaattatatgttctttttccctttttctttttgaaatttggttgtcgcaaaacttttgtcgtttctccattgcgcttaaatcattgctcaacttcgaatattttgagaaaataatccaccctctatattattcaacactgtcggtgtgaaaagtacaaaaattatgctttttatatttaaccaggattattcaatctaagctaatctttaatctttattaaacaaaaagaaaaaaaaaaccaatatttaatctaaagttgcctgcataatgtactaatattattgaccagttttgcttaattcttcccttctatgctcaccaatttttttttttttacctggctataatgcaatggagaacttggggagaaggttaagcgctaagctaataatgccacttttaacgatgtttttcaggcatcaaacctcctttttgttgaccaacccaccggaactggtttcagctatacttctgatgacacggatattcgtcacgatgaagatggtgtgagcaacgatttgtatgactttttgcaggtaataaattttaatattgctaaaagaatttaataaaaatcttagctgaacagcagaccatcttatagccttgctctaagttgaagtctagtatccaagtgtatcaagtagtattgctctttgcatcttccttccttaggcatttttcgctgagcatcctcaatatgttgaaaatgaattctacataactggagaatcatacgctggacactacattcctgcatttgcctcacgggttcacaaaggaaacaaagcgaaggaaggaattcatatcaatttcaaggtactctaatacacctcatgttactgtacttgctaccacagtaaacttatgaaatgatccattaaaacataacgtctgtggctgaacagggatttgctattggaaacggcctaacaaatcctgaaatccaatacaaggcgtacacggactacgcacttgacatgaagttgattacaaaagcaagctataataagattaataaaatgcttccagcatgtgaacaggcaatcaaaacttgcggtacttatttttgctcaactatctttctgtttattttacctggtcatttacttggccttacaacttatatattggaagcataacaggcacccacggaggagatgcttgcatgtcttcttatgttacttgcaacaacatattcaatagcatcatggacgtagtggatggcataaatgtaagtacacaaacacacagacaacgggataacaatctctgtttttgagatggcattagctcttgttgaaacataatgaatctccaaatctgattgaaggttctcacttctatgcagtactatgatgtcagaaagaaatgtgagggagacttgtgctatgatttctcaaacatggagagatttctgaaccagaaatcagtaagagatgcccttggagttgggaacatagacttcgtttcttgcagttctacagtgtatgaggccatggtaatggactggatgagaaatcttgaagttggtattcctgctcttcttgaggatggaattaaggttcttgtgtatgctggggagtatgatctgatatgcaattggcttggtaactttttctctttttatcttcactcaaaagtctacctcatagaataaagctggcttttctcaactaatattcttccactaattggcaggtaattcaagatgggttcatgcaatggactggtctggccagaaacaatttgattcttcatcaactgttccattcgtagttgatggtgcagaagcgggattgctaaaaggccatggacctctgactttcctaagggtctctctctatctatctacatatatatcctacatatatatgtttaaaatttatttatttggagtcaatatgtattgggtcatcatatatatatttgtgtgtaatttgcaaatttaacttttggtgcttatatgaaaacaggtacatgaagctggtcacatggttccgatggatcaacctaaagcggcattagcaatgctgacgaggtggatgcaaggaaaactaaccacggccgagacagatgaaaaaatagcgcccctatgatttccccaactcagttattattttccattcacagattgaacaattattgtgtttctacataagtactctaatcttatagcactaatctatgttcatatcgtatgcaccatggacttcgtttcacgctatttatgtctattgttgtaatttgacaaagttttaatagaaaatttcatattgtgtactaccactaaggaattaagccaccctctgcccggcctcgatcctacttttacaattttgttatatatctgccattaaaaaaaactacgagactatgggcctgtttggcactgcttttgaaaaaactaaacgtaattttttaaaaaagctgtaataaaaatgtgtctggtaagctgataaaaaacagttttttgaagaattttttgagaagctacagctgctctaacctaacttttagaaaaaattattttgattaaaagactataataatttttttttttgctaaaactatatttacttatttattatatattaaaaaaataaataattataataaaataaataattattaaatctattattttgactgtgatatatatatatagggttattctacaatgcacctctttaaaagggatgtaatgatacacccttaacttgtttcggcctcgagaaaacttttttagtctatttttttttttcatattcatgtacattataactatttaagataacctacaaaattttgagcatttccgaataatttacagtatagaaaacaatgttcaaacannnnnnnnnnnnnnnntataaaataaaatagtcacgcatacactgtttgaacgtagtttt

SEQ ID NO: 112048 - DNA, 2220 bp, Cannabis sativa
agtgacccatgaatttctcataaaatattttatttttaataataaaccatcttatttttaatataaataaaaagtcactcatgaatttttcaaaaaccaaaagttctgttatataagcacactttatatagaatagatatgtataaaaaataaatacataaatatggcaaagattttattagggtcacgcttaattactagtataattatattattgtaataagataaaatgaaaataataaatagggggtcattttctacttccttagctgacaagaaagtaacttaggttcagtctaataatattactgatcatgatcatattattggaatttcttttcttaacgttatatataagcaaaacatgtaaccattattctcatgattcatttgtacaagtttacatataatatataatatacaatatatatctgcatgtatgtatgcatacgtatagtgataaggcacattgtctgttttttctttgaagtgcaagtaaataaagaattatattgtctgataagaaaatttgtggtcataattattaatgatagaacttaattattatcaaacttattattattatattagagaatactacaacgacttttgtatacgtacgactttgtgactatactactgtacatgcctttatattagaaatattatatatatatataaatatatatatataatttctttatccaatactacttgtaattaatcaaatacctcctaaaataaatttgaaagtgaaaaattcttcatatatatagaaaatacatacataaattaagttcatttaattcttcaaatttaaaacatgtaaattacacccatatatatacctcattaaaacatgtatgttaatgactattttgagatcaaaattgtattctagattaatgattattggagtacggagtacgtacgtataatctcatgattatttgataaagaatgctaatgctgtgagaactgagaaaagtgctactattaagagatatatatatttatatatattgtatgttctttattaattatatctctagacactctttaaatctctttaatttttctcttgagttttccttttgagagaggtgaatgttaaaaaatatattaattggtgaattatgtgttaaaaaatatatttggatgaggcttaataattctcatattcaccaaattcaaatcatatcataatatgtcacattatatttatacattatttcattaaatattttacattttataacccctctaggaaaattttctgattctatatgattgcataaatatagtgtggaagcaatattactcaaaatactaaataacactttcaaggaatataaaaaaatattccgaattattttaaaaatatacaaaaataataaaaaattataaaaatacggttgtacggattttaaatatttttatgatttttataattttatttacagaaaatatagtcttttgatatatttttatgttgtattcttgttagtttttaattgtttgtatgttaatttttgttgttgtttggatattatttgaatgttattcaaatattatttcctattacttttatgtagttttcgtgttgttattataaaataatacaataaaaatgtaaaaaaattattttgaatgtaaaaatataaaaaattaaaaaaaaaatagtgcatcatctcaaatattaatcccaatcatgtttatgatcagtttatggaatttttcttcttctttgaaaggctatattttgtagatttttacaaggaaaaatatcaattcaaactaccaactcctaagattgcactaaaaagaaaatgagatcttataacaacacacacaatgaagttgataattttataataattatatttgagtaataatttgtgctattaaaatatgacatcttgtgatgccaatgctttttaaagagtaagtcccaatttagataaatagaatatctgtcactatgtaaatttatgatgagtgtactcaattatatatttcgtgatcagctctttataaattcatgcatgtacttctatatttaccgtagttattattttttttgtattctttttatttctttcaatgctatatttgtaaatgttaattccatttttgacatatttaattgagaaaaatattttattatttattgtatatttcggctagtatgtgttaatatggtttccttattttgtgtat

SEQ ID NO: 112049 - DNA, 4201 bp, Cannabis sativa
ttaaagttgattatatttaaaaatcaaattgttgaaaattgagctcagtgtcttatttttattattttggaaaatataagatccattttatcatttaacaaaacagagagtttaattaatatcatttgcaaaataccaggaccaaaatagtatttactctattcttttttgagaaaacaattttctagtcacaaacttatcagcccctaatattctcgtcagtttttagggagaatgcaagttcaaagactgccactttccattgcccctctctctccaccactttcctcaaactatccccttcttcctatgactaaacttttcttgtccaaatcaaattttccttatggtcctctcatattgaaaacaatctctaccaaccaccttgcctaagttaatgagtggagtatctgctaaacaaggatatgttgatggcgatggtgattttgattatgatgatgggttttacatgaggaagtgtgtgaagattgcaagaaaggctatcgtgtgtaccaagtcccaacctcttggtgggttgtgttattgtcaatgatggaaagattgttggccaagggtttcttcctaaagctggccagccttatgctgaggtaaatctcatttttatttcattacttttattattattattattttattaggttttttagtactaaaacttcgtgaagtcaaagaggttaaacaaacaactttttgaagtcaattagttataataaagtcatattaatgttgtattgttacaaaagtaataaaaggcatcagaagatctgactagagttagttgacatcaagggtttgtttgttaaattctttgatttctaggtgtttttagtactgaaaaactttatttctgatggtagaggtatgactttctgggtatatttattaagtgggcatgaaaaactaaagcttatttgatcttcaattattaacctagtgtttgctatattgtggaagagataatgaatggtcagaacatggttccaactgctgtcttctggaaaagaggttctaacaaaataatgttatgattcttttctgaacacttgatagtgtttttgttgaagcttatgcttaaagaactagtattttgctcaagtaacttttctcatgttgagtaagggggcatgttctataggtatttgctcttagagatgctggagattcagctgagaatgaaatagcgtatgtaaccactttggaagaactccaccatgtactgaggatctcattaaagccaaagtgaaaagggtggtgattggaatagatccaaatccacttgtagcatcaaaaggggtcaagaaactcagatatgctggaattgaagttactatagggatagaagaagaactatgcaagagcttgaatgagccttttgtccacctaatgctcacagggaagtctttcatcacacttaggtaaataaaattaattggtacttttgattcttttagttaactctacaaatgagtaccgtattaaactgtcaagtttgtgtggcattctggatttcatagagttttcatatgagcattttaggtgtgaaaatatgtctcttcttgactaacagatactctctctcagtcagtggccagattttagaccagctttgagaaggatctacaaagtccatcggttattactcgaagttgctgcaggaatatgatgttgttatagtttcatctgcctcaataaccgacaagttattgattcctcaatcccaagaccctggagccaatgacccttctggatcattgcagcaagtaataataatggttctttgaataaaatctttgatttttcgatagaagtagctactaaggtgatagttttcagtaaccaagagatagtagaaccaaaactcattgagagagaaacagtagttttggatcaaatcaacttgaatgcccgttcttgaatacagtaagtgccaaggattttgtagcattttgttggatttgagaggaagtgtacatgatatgagagagctactgaaagagggttttgagcaaaatttgatgcgaaaggttgtgatagaagtgttgccccagtgggttgaaaaggatggtaagaactcttgtgttgcattaagcagcttggataaaagtttggacaacaagaaattgaagcctaaaatctcctgtaagagtgttttacttgagagatatttttgagtgaaaaatctcaaataagggtattttactttgaggagttatagttatgtggctcttctcttgttacaaagaaaagaaaaattgcaaataatagtaacaactgattttggaatttatattaagagaaaattgtggtaaaagtttcaaaaacatcaatttgatgcagataaattcttaatctcaaaaatttgtggtaataatcaccaagctcccaattcttgttagtctgttagtcctcattttaattgatccattaacttattcaaaattaccacgtgtcgaagtattattagttcaaataataattttaattaaaaaataaaataaataaattatttaaaaatcatacaaaatgagtttttttttttcttttttcatttatttttcttttattttttttttattatcttatcttttttcttggttttcttcatcttcttcatccaacttaatccttacccctatgaccttgatctaccacaacctcatgacatgcacggccacactctcgctcttgtcaactaggtagtaaaaacccaccacccaccacccatcctctcaatctctccttgtcactgagatctcaccctctcaatctctcccgtcgttctcctttagatctgacaaatcgtaccaatgttttcaccatgacaacaaggtctttgctcgtctccggctccaacgaccacgacagcaaggtattcattcatctctggcttcagcgagtttctgactactaattcctccagtcgaaggccaaggcagtaccaccgactttctcagtcgaacccacatttgcatctaaatccctagtaatgggtttgggtcttgggttatttgttgttgtgattatcaatgattgagtgaggaattttgaccactgaatgtatttaaggatttttgattatgagatatttgttattgtttttttgttctcggggtggtggtcttgccggaattggggtctcattggggtttgggttttttcggtggggtggtgctgggttttggggtgggagttagtaggtggtgggttttttagggggtggcttctggaaagcatgaagaagaagaataagaaagaaaataaaaaaaaattaaaacaatttatttagtttttttaattttaaattattttaaattaaaattatgatttggaccaattatttattaacacgtgtcattttaaattagtaaatatatccattataaaaaagtactaacgaaattaaaaatatagtgaccttgagactattactatcaatttttgaagttgatgacttatgtaaagactcggttttggatgtcaaaagaaacaaaaaaaatatatgtgtatgtatatagtaataagtaagaaaagactctctctctctctctcttcagaccacaaaagaagaacccataaattcaattaccgacgtaactctagcgaccactctccgaccccatgcactggaccattcaaatccctaggccccgacaatctcaatccccaagcggtgctgcccctttcgccacggttagcccgggatcgcaagtcaaagtttggaggtttaaactttgaacggattttcaagccacctctagtgtctgtttgacatgttgtcttcaccactagactcagctcctcgaggagaacaatctacactaagctatttttcccaacccgatactttttcagcaacatttttgtatctccgcccctttccagcaacttttttggcgatgtcatgtaccgtttggacaaatggttgtcatgggtgtggtctactcgttgaggtagtcattttgatatatactacccctatttttgatttcattttaagtacaccgcttcctacccctaccgatagttaatgtgcaccacttaggtgaggttttaaactccaaactttaaatataggcatattatatgtcgttggactcagttttgaatgtagaatgcaatgatgatagttatttagccatttgatggtataagtgagagtgatatctaagattggactaaa

SEQ ID NO: 112050 - DNA, 2034 bp, Cannabis sativa
caactagcgctgcaaccattttagaaacccaaactataaatttgaaagaaaaagttaaaaaaatagtaaatatggtaattctccattttattatatcattaaagtttattcatattctatttctaggatacgtgtcagcttctgaagtattgtagctgaattttgagtataataattatatattagaataattatatttttgtttaagttactaattttttttattataatttcaaaatgcgctaaaataattgcgcgaaaaacgactatattacctaattataatatgtttgaaattatataatcgagcctgaatttcagtatatttataattaaatcaagacgtaattttattttatgaattaaagaaaaataatagacatgtagagagaagaaagggcacaaaaagtatatgcagtcagccaatcgaggctaattcttttacattaattaagtctttgtatttgatttaaaaacacacacaggcctaaattcacacgatatatatattattaagccaaacaaattaatgaatgaataaatgtataatgatgatcacgatcactagaagagggtagtacttcatcaaacttgctgcagcttgccgctttgacccttttattaaaatatatatatattccctcttcagctgttctctccaaaattaacatcaccacccaataaaaaaataacaacaataaacattaatacatatagcaatgcccatatatttcatatgcacgctgtgctttagtagtttccctcatatattaaaaatacatacactcattacccccccagaaaaaataaaagttaaaacaaaccttttctttttattctttttcaaaaaacttggatcgggaaagctattcctagaaagaaaatataatataagtatatatgtatataacttataaagatgaagggaaagaagacatcgtattcgtatgagtagctcccaagttcaaaccattagtattattgttaatatcatgagcaccgttattattaagcgatccttcaacgacgacgttttcccaaaatagaaaattgggacattgtacttgttgagactcaacccattcattcaaagccatttctccttcttcatcaaccatgttttccatattctcaatcaatggtggcaagtagcaacttacgttcatggcactagaaaatgacgtgggcagtagtaaattattagcattgttattaatattattataaggaggaagagcttggacttggtgctggttcaagttccacgacgtcgtttcggttgatgatgatgatgatgagtttaaattgtttcccaccgttaggttaatgtcttgaaagatcaactctggccgtgtagtagtagcagtagtggtagtggtagtgtcttccattcctgatgacgtggtgtcaaacatgaagagtgggccacatgaggaggtggagaagatttgggcctggtcttgggccgctgtattgggctttgttgtactactcgtcaattctgttgtttgagttaggaaattgtctaggagtacttgatttgatgagttgaaacacatttgaggatagtgatgatgatgatgatcagtgatgttggatggtgtagtagtagaagtgatataatttgtggtgtttgaattaatagaattagtagatgatgactttctgatcttctttttgatccatgaattccagtaattctttatctcattgtctgttcttcccggtaggtgacttgctatgtgagcccatctatataaatacgtacatatatacagattgatcaatacattattagtgcaacattacatgaatgcatgcaacaaaaaaaattgtccaaaagggattagaacaagaaaatgtatagactgtataattccttgagtgtgtatgtacgtataaactaagtcgatgtacatatatatagtggatacaatcattattattattattattattattattatgctacaaattagcttaacattgaagtattaattatattagtctagtagttagctagaggtccatttt

SEQ ID NO: 112051 - DNA, 4299 bp, Cannabis sativa
taaatttcccaaaaattattgtttttacgaataagacatagacacgtggtatcctagcatggtgggttctaaaattttattttatgagtcataagaaaaaaaaatatatatatttttaggctatatttagaaaaattataatatttttcaaaatcactaaaaaataaaaatatttttttgggctctaacttaagtaggctttaagcacagtcctaacccactaacttaagtaccaatcaaaccattcattttgatgatttaagtattttatgctgctattctttgaatttatatatttattaacaaggataaaaatatatttatatgcctcctatttataaacgtttcttgtaactattatttttgtaaccaaactaattctttgttatttttgcaaatctttctaacttctctctctttttggtttcaaaatgaggtttgtgattaggaagtttataactctcctagagacctgagcataaactatgagagaatggattataccttttaccacagaagaatagaaacattattagactgaaataaaaagagagtgaatccaactaaaatattaataaagaaacattaaactttttcagaatccacttagacataaaaatctcaaaacacagtgcataattgtactatttatttagttgcaaattagtctaatttcagtgacacaaattcctcttataccattatgaattacattagccatctattatattcttttaactcgtggagaagatacagttccaaagtatacatgtaactattagaatctagctaccataataattagaatttatgtcattttatacatctttctcataaagatattaaatcaaaaataagtgagtcaaaggacatggtaaatgtcaaactcaaagccatgtaattttgacctatgttgagattttaagtttgccttgatattttttttttttttttttgtaacacctcatactgtaataaacaacattaataacactattattgtatttaaagataacaaacaatcatgtacaatccaattctatagtgacacctcaattgataaggaaaaggaatgattagtaatagtatccctggctcaaatataacttagagaaagaaagtagaaaaaaagaacatctacaattaatgaaaagaatttcctactattgtagccatttacttttggctaaattgtctggttttctatttacaatatctcaccttacaaaaattataacctaatatttttagggataattacataatatattattttttaattttttttttatatttttatgtttaatatttttttttacatttttacagtgttctataaaaattacaccaaaactacataaaagtaatataaaaataacatcaaaacaacaataaaatatagcataaaaataacaaaaaatcaataataaattaacaagagtacataaaattacattaaaaaatcgtattttctttaaatcataaaattatttaaaattccgtacaaccgaatttttgtttttttttttattattttatgtatttgtaaaataatctcatatttttatataatatataggtttcatttttgaaaaaattgaaataattaatttataatttcaaaaacaaggttgaaactattttttgagtgtagcataatattaatcttgttacctatttattagaaacttagaaattttgggttggaactcatattccacacttctcttactattgaactagtcttagtaacttaattaataacgttcaaactatttattgcacgtaagtctatctttttttttatttgcatccaataaactatttcaaccaactgttaatattatttagaatatcttaaacactaacaaaatttaactagtgtcatataaacaaactaatgtgaacccccacctgataatttctccttaaattttatagataggttaaaaagcaaacaaattaaaacacaagcatgttgtaagtgtactactaatttatcttataaatatgatgcatatatatgctgacaagtcttaaaaactaacatgataacagtaaaatataataaagaaaaagagtatgggaagactactactcaatagtactgaatagaagaagagcatattgtattgaatgaatatgcatctattatagaggccatatatatatatagtacacaccacaccaaaccactcataaatatgatccatcattttctatcacaagtgccaactcgaagcttccctttgccgacactctcttccaatttaccatatattttttttcttaatttttattattttttttttaatttattgaaatgctaaacattgtcaactaaactataggcatgtcctaaaatcttgctctctgttttcactataatactttactgactgaccctgttattaatgttatagtggcaaagtcaatatatatgaccctgttttgaaaagttagttgttaataaaaaattgtcaataagttttccatacttagttatggagtgtcatatggttaaagatgatggtccacttctggctcattaaatttgcattggaccgtctactcttcaacttcaattgatattaaattaaatatgattgattattaatattgtagtggctattaatatttgtatttttaacactattatttatctttattgactatttataagatgatttatttaaggtacttgcttaaaatatgggcgtgggccgtgaagttattgaccaattatagggtttggagttggagattagagtgacgtttctcactatatatccatatatatgttactcgtggaataaatattttttatactttgtgttctttaatgaatgaataataatatttatgagaagtaaattgctttagatgttgcaaaaggatttttgggtaagtactttaatcttatatattggattaaataattaataattaaaatttatattgaaagttgattagaaaatagaactagggattaaattgaatttgttatcattataaaaaattttacttttagttacaataaaatttatgactaaaaataaaaaggttatggctaattataaattaataaaaattacaatttgttatgactaaatgtgtttttagtcataatatttgttgtaactaaaactaaattagtaacaacttgtaactaaatactatgttttagtcttttcaaaaaaaaatactatgttttagtcacaagtaatttatattgtgactaaaatgttgtcactaaaagtattaattttttatagtgtataaaactattatgaatataggtaataagaaaataataagaatacataaatataaaaagaaaaattaaaacagttttcttagtagtttatattaatgaagtgaatttttatttaaataaaaatatagttaaaataataaaaagttgaatcaatgaaataaaagaaaagaaaatacaatagtatttgtggaaataattgatttgagtgatttagacattcatacattattttataacactccctttccctttgatttctataataattcactcattgaaaatcttgtaaaacttagtaggacaaaaactagactaagaaaaaaaaaagtgcagtgtgaattaattcttcttcattttggtgtttttggagatcttattaatcgacatattcttatcttttggactatcttctcaaaatgctgatgttggtgatgattttatgaataaatttgtaaaattgtcacttgatcaaacttattgaccatcaatattaccacttccttaaaaattgcgattaaagaagaattttgatgaaatatgcttcgtttcatcttagtgtactctccttttcgttgagtgaataaaaatcttcatagagagtcgcttatacttttttattggacgttaatacacattttcttgaatatgttgtgttcttaatctcagctacacacattctctacttgttttatgaattgcaagtatcttaacataatttaaaattatatcgttaaaaaatttgtcaaaaaaattcaatgagacaaaacctgaactaatagaaaagaatatatgttcaagtatacatatatatttaatctttacttgattgatttatgattttattgtataatatattgaaatattttaaacaacccatttcttataattttatgaaataaaaaacattgtatgtgttgggtgtacaactaaagttccacattggctagaaatgtaaaggatcttgggtatataaggatgatcactatttgcattgaaatgaggccttttgggaaggtgcccaa

SEQ ID NO: 112052 - DNA, 4662 bp, Cannabis sativa
  modified_base (245)..(246): a, c, t, g, unknown or other
acagaaaaatatatgtttctcacgattattttattatatatgtataaaattctgaaataaaatttttaatgaaaaagtaactaattaatattttattcacagaaaaagtaactaaatggttacttttttaaaaactctcaaaaagtgaaaatttctggaaacgcgatttttctagttttttttccattttcggtaattattttaaatttcggtatgtatgttgacgtggcacaacggtatttgtnnaaataattttcttaaaggcatttttataaataaaatcaattttaagtatattattgaaaaacccccattaaaatatgtgatacgagtggtacgtaaaaatatatgacatttttaattaatcattgatcaaatgccactcatatgggtattttctgatgggagtttttctttaaaaaatatattactattattaataatatataatataatattcattacatcaaatgagaaaagtaacatcctccaattaagtacaataatcttcatctaacccaaaagctataggtaacactcttatcatctatcaatcagagaatgagttacaaacacactagatgatacacataacacaagtacacaattgatagaattcacaagaatattcgtttcaaaattaaatagtgtgaacttgaattaaaccttgttgagtgcccatcgcaaactgagatagacaatcattgcttgcaattcatttgaagagtaacatcctttcatagattttgagtagcatccttcacatcccttttaagcttaactttatattttagttgtgtgaaattattttaaggaagaactacagacagcactgcaattttttttaaaaaaataataataaaaaaaatgaaaaatatgaatatttaatacgaataatagtttgtaattattttgtaactattttttttataaaattataacatatgtatggttataaatttataaaatccaatattcgaaaaacaaaatgatatttaatttacagaggaaaatcaataaagttattataagtagactcaaagttaaaaaaaataatttaaattaatttttaaaaattactttttaatatttttttcaaaatttctttttcacatcattttctcttaatatcaatacttattttaattttattttcacatttttttttaaaaaaattcatgtataattgtttttaatttttttctaataaaattttatataatattatattttaatgttttgccttaatatttaaaaaaaatgaatatttttttattttataaatatatatttttaagaatatgagaaggaagaaaagaaattaaaaaattaatataaattaaagatatatattttatgtgaaataaaaattattaaaataaaattaattttatgtggtacaaataatttttttttttagaaattatattttagtagcatttcttttttaatttatgacattttaaaaaaataatggtagtgcactcaaaatatgcattaattaatcacgtttatctagagtaatgagtgcaatattattagggtgcattttcttttcagaatattgtggtgcatgagtgaacatattattaggaagagtgctaacgagactttctatcacactttcttttacattttctctttaatgtaatgacaaatgttaaattttgtagtgtaaggtttgtttttatttaatatttaactataatattctaatgttattacaattatgccactctaactaaattattttataataactaattatttattataatttaattatttcattaattttttatttttacttaatcactagaaaatatatatatatatatatatttggaaggaaaaataaccacgttaaaaaaaattaaaaatgtacaatacatatatttaaattatacatagattaatggcaaatttttatttttcttaaaagtaaaaactataataaatttaatgtatacaaaagttaatacaattaaaaaataaaaaaaaatcaatgacttaaaactattattattaattttttgtactattttatattttattagttcttttattatacagtattagtttttttttctgattgatcactctttaagttgttttttattcttcttatacaagtgaaaatttactccacttttaatacattattttttaattatttgtttatttaatatatcataaaagttcaataaattaatatactattgttttaaaaaaattaatatactaggtcaatgtatttttttagaagaaaaaaaaagtcaatgatagaaaaaaaaaaattattatagtagctcaattttttttaattaatttgttatgctttttacagtagaatatatatagataaatgcttgaactattatttatcttatatatatacctactttcactatatattaaattataataagaaaatgttaatattaagatgagtacatcagatagtatgtgtctattctactaatatatatatttatatatatgcaatactctatatgaaaaagaaaaaaaaagtacatgtaaatacaacaaagattataaataaaagtatttaattacatatatatattagatgatttattggtgtatttatatttataaataatataattataataatcataaataaattattacttttttagaaagaaaaaaagatttaagctgtattaatttttatatggcataatttcttaaaaagaaaaaaaacttaaaatttgtatataaatattaattgttacttttttgttattttaaaatatatgtatatgtttattgtattcttaatatggttaattcttttataaacaaaaattagtagaataattatattaaaagtagtaatagcataattaatcgtaataacatgagaatatatatcataactaattattaaaaaaaaaaataactcttactaaaaatataacttttgttatcacattaaagagatagtgcaaaaagaataggatagagagttcccttagcactcctctattattattatttttaatttttttaggcatgtttgaaagatgtattgcacttcaaaactattacaacccactccaagctgtgaaaccaatctatgtctcactgctgcttaatcccccatcaaccctattttgtatgcatgacagtccacagtttttgttctaaaaaaaccaaaatttttaagtttgtcgcacaaagaataacgaggtatgcatacaccttttggaaatttgtttgtacctcaatctttttatccacttcaattacccaatgatactataggatatgattcctatagcatattccactttaatttttcttttaaattttcgacaaaagaaacaccacaaaccatcaaaatcatattgtggtttgagtactgtacaaaatctgaagtgatatatatatatatatataaattaatatttttaaatagactgagtgatttttgaaaaatgactcaaaaataagtaagaacttttaaccacaataataatataattcctgtatagaaaatataagcttagatatttatatacatacatggtagatccaaatatctataagctaagatatttctgatttactacgtacaatctggatggaccaactgtaatttgataattaatttgctaaaaacagacgccgccggttgtcagtcagcatactgacatattgatttttcaattaataataataataatatattttaatttccttaaacaaaatatgatatggacatatgtttagatcaagttgtaacctttcccaattcaaaaataattgtaataacctttcttgttccagctgtttgataagaaaaatatcctagaaagggtaagaaaaccaaactaagggcaacattactaaaagtattaaaacaaaattgataactcaaaataatatctgtttttgttgatgtatatctcttccattgaacagctagcttgatcattaatataataaattaagtcaatcaagttgaataatctccactatgaatgtgtgcgtataccagtatagtacgtgtgtgtttatacctctttaaacatttccgccttaatttatattttgcatgtatatattgtaatatgtatattatttgactatgattaaaattgtagaatttgctataatatgttgtatgaccagctgatactaaattactatttaaaaaaatatccacaattcaaacacgagtactttcactctatatacagcagttaatggagcttattttttttacataatatataacaagttaaaatttgatgtaaagttatgttttttataatgttaaatatagtttacagtaaaaaaaaaaataacaataaaaaaattgatttcaatactaaagatcctcaatgcaagtcttattatttaaccaatggaaaattaaatgttatttcttaggttttctctctcacgttcccatttcttctttcttcgtccagattagactccgccgaccctataattgggtttggttggggttttcatcgggagggttcgttgctagtttcgagggaaaactttgtctgtcatgctctacaggtttgatggtcttctcaacggtttcttcgttttagtttcgatgagatcctagccacaactacaaaaaaatactaattttagtgacaactttttagtaac

SEQ ID NO: 112053 - DNA, 6226 bp, Cannabis sativa
  modified_base (1546)..(1554): a, c, t, g, unknown or other
  modified_base (3657)..(3659): a, c, t, g, unknown or other
  modified_base (3694)..(3696): a, c, t, g, unknown or other
  modified_base (3889)..(3892): a, c, t, g, unknown or other
  modified_base (3918)..(3932): a, c, t, g, unknown or other
tttttttaaaaaaagaattatatttttacgtttattttttttttatatatatttttacggtttttcatagaaacaacaagaaaactatataaaagtaacatgaaaataatgtctaaagaacatcaaaacaacaataaaaaataacatacagataacaaaaaattaacaagaatataacataaaataccgtattttctgtaaataaattataaaaatatttaaaattttatgaaactgtatttttataatttttttttattgtttttgtgtatcgtgaaataatccaatttagcttatgtggcctctctatatatagagcttccttgaaaagaagcaggctgaatcttaggtacatgcgggatagacttatatttaaagcccatcaactctctaagagttcattttttttttctcttttaaaattatataatttttattaatttttttaaaatattatattttataagataagggttcaaaaataatttattcctattgcccattaattaaatttgagagtcggtctaaaaacaaagttcttataagtttgtgtgtcttcatcaagatttggttgctataaactatataactaatgcaattatgcaatattaattaatatatcatcaatatatagaatgtaattataaacacataatataaacattagtggaagtttacaaaaataatgacatgttcatgagtatgagaaagtataatttgttttaggtgattaaaattatacatgattatgattattgatgaccaaccaaacaaaaattaattaaaagatctactcggtacatgagttttttgctttttttttttttttttggataattgtatgtatgatatatataagtttattcttccatatatatacacacatacacacaatatacattataatatatagtagctagggtagggtaaaaatcaagtagttcttaaaattaattaattatacaaatgttaagattgaattattaataaactaattatatatatagagattaattacctttcccaggtactacttcttacacggccacctatatagcctatattataaataatatttctgatttttttttttaaatttaaataattaataatatatataatataaatatataaatttatatatttatacactacattctgataatagagtaattgaaaaataaaactaatgtttaagttttgttatatttaattaaattcgagatcattcatgcaataataaaaacagaaacaaacttagtaatgagttcttattaattaataattatatttgttaataactttaattaattttaattagagattggaataatacatataaataggtaggtggaataactttaattaagttttaatttgcggcataaataactaagttaaattttcaattacaaataaatacgtacctaaatttaatttttaacggtaataatataagttatatttttaaaactctgtaggtaccttaccattaaatatgttaactcattatccatgtgctaatttcttattggtatatttaaannnnnnnnnttttaaaaaaaataataatttaataacttaaatcaattaagaattatcacgtagcaatttacttaatacttaataggtatctataaaaattctaaaattatataatttaaaaattaaacttcactatttataccacaaattactttatttatattatattttttttattatattataaattttgattgaaaaataatatgatgagatggaatgcactgaaataagaattaaagcacaattaattacttatatatatttacacatactataaaatatatacaagacaaaaagagagattacgtgtgtggaataggtaggtttattattggattgtatttattgatattaaaacttaaattgcatgtatataatatatatatatatatatgtatatatatttttaaaggagtggttgtacatggatgtacggatgagacaaaattgttgtaatataattatgttttgttaaggttattggaaatatttattataaatttaatcataattaagaccgtatagtatggtactactccatgcacttattattttgttagtggaaatgttgtcatcacttaccacaaaaaattaaaaataaaaaaaaataaaaaaataaaattaaagacataatttagtgtaatttagactttggactaataacaaattaaagctttatttgaatctgatcaatcatgcaccacaaaatatttttcatcatttacatatttacatacatgaatattcacgtaattaagttataatactaattataattaacgtaatgataagaaatgttcatatcaattacgatattcaactatatatatatatgtatacataaaataaaataattaatgttagataaatatatactcaaattgtacatagttaattatacgcaattaacatataccatatgcaaacatataataattaagttaattattattaattaatataattagtagtttatgaatatcattaattatcaagacttattattaggagctagactctgtatatatatagcttaataattaaaaatatttcctcgatatatacctattatatatatatatttaatataatatgcatgcatgcatttgatcatgtgctacgtatatataaacatatatactatacaaatacatctaaatataaaaatgttaattatatacaaaaaaaactttcatatatatatatatatatttatagaaacataccaggttatatagttgtggatatatattatatatcctccggtgaatgaaaagtggagatgagcttagttctcttttattctaccaacttattacttacacagatttagagatatcgattattagaagatgagcatatatatagtactatacactcatcaaatcttaccaacaaacacttaattatatattaatggttttatatataataataatattatttatgagcatatagctaaagttatagcttgctcacccaatcacttttgaacccttataaaatattcatagtatacatatacatatatatatatatatatataataggtagagcactactacaaagtttctcttcattattattaattaattatatataaaaatatcaagaaaaagaagttatacaaaaatttattatatatattaatttgagaaagagtgacacgtagaagaagtggtacgaaatagaagtacacacgcatgaactatatagcattataataaagagagcatgtgaaaattttaacgtacactctctttatatggaatcatattgctcttcaaaattaatacatactatattacaaaaattctatcgattttgattggaagaatattttagtgtaatttttttttattatgatcatgtacgttatataattattgattgagacgtttagtaaaattttaaaaaattcagaataataaaaaataagattcaaataatttattcacatgcttgaattctgtttttagcgtattaaattttttcgaatctctcaaaattttacaagatattttaaataactacaacgtagatgaccatatttaaactaaaatattttctcactacaaaaaactgttacttttagtaacaactttttannnacaacataatttttttgtgattaaatgtgattttnnntcacaacaaaatattacttgtgactaatatacatagtatttagttactagttttcactaatttagttttagtcacaacaagtattgtgactataaaaatacatttagtcacaacaatttgtaatttttgtgactaatacttttagccatggaccttttagtcacaacataggaatcataatttataattagtnnnnattttttcacttttagtcacaagttnnnnnnnnnnnnnnngtaagattttttgtagtgtatataccgaaacaaatagagaatatatcagtagatccctctttaaagagtgcattatatatagaagtatatattccatattatttttatatataaatatataattggtggcatgggtggatattccacaaagctgcaaatgcatgtagggttaccaaataatattttaaaatatatgtatataattttgttgttgtgataataattaagaaagaaacaaagaaacacatatatattggttggtgtgtgtagtaataatgtgtatatacctatcaaacttttttctcatatgggtgcttcgtaggattcccaatatccttcttgcctggattaattgcaagtaccacaattttcatcatcatccaatttaataaataattatactaattaaactactatcatcatcaattaaacccttttaattatctaattataaattattaccaatgataattaattaatacgttttttggaaattttggagcaagttttatttttgttttcggtatatacatatatttaaaatattataattttttttatatatatatatatatgacaatatattataactagttataatttttttcaagtaccaaaaacagaaatattcctattgttagggccaaaacccttattaaaattttctatatgtgcatataatatataatttgtttcttttaatagtataatttacattgtctttatatataattagtgagcattaattaattatatatatgaactctatactaattaaaaatcaatgaatgttcttccattaaaaaatatctttttattctttttaataaaatgagagataattaaaagccttatatatacaaactgaggtacaccaaactcttgcaatatcaagagtatgtaagaaccatcttagctatatatatttacaataataattaagttctctctatataaaatataattaatatatccatatgataataatatgtactctctaggtaatataagatcataataataagaaaaattatgctaaaagatacaattagtgcttaacactttttttcagtgtcatactgttattggtgtataaaattatgtcccacataacttaaaaaatagcttttagaaaatatcgaaccaatcatatatagggcacgcgctatctataaaaggtgtttaacatcattaatgtctaataataatattgtaataataatgttatgtagttattatagttagataattttcttcattttttggtccaaaatatatatataaatgtatatttaattactttacttaataaaaaaaatagtttcaatacaaaaatatgatgatgaaattaattattagccatatatggaatatgtatatttatagaaaatggttaataattagctagggcaaaaaagtggggtggtgtttttgatataggtcctcttagttagctagcttactatttttttgcaccaatatatccatataagcttctagaagtggtttattattatttttgggactgaaaagaatggtgagaggacgttgatgcaatattagagattttaggagattttagaaaaattcaatattagggcaccacttttcttcatatccctaaacacattgtctagttttaatactttacataaattataattcaaaatttttattatatgaatgtttatatatatatatattgtagttatatttaatatagtatacattaatctacttatttttaaaaaattaaaaataatttactatgtaacttatttttcttatacatgtgtgctcatgcaatcaactatgccaaaacatagttcaaacatgattacttacacgagtgcttgtttttctctattcttcgattttgtttagttgttactttattttaactcttacattaatatgatattattcgttttaaatttaaaccctaataattttattattttgggacaccttcttaaaatatcttataattttagacaactttgtttattctatcataagttcatacaaatttaattataatttttctaatatgtgggacttgagttagtaccccaacataatacaatcatagtaagttcaaacaaatttgattataacttttccaaatctctaaacccaaaaatataattgtctctaatctctatatcatttaatttagattaaaattattatataagaaatgtcacttttgccagtacattttgtactggcaaaagttggtattgcgctggtaaaatagaatttacttgtgatgtattggcaaaaaagggttg

SEQ ID NO: 112054 - DNA, 4152 bp, Cannabis sativa
tggggggggggggaagtctttattcaaaatcatagggcaagttggggagccaataatggttgatgctgtcacaaaggagcgggataagcttaactatccttgggttctaattgaagggtctattgaccaagattttccccataccatttattttgagaatgaacatggaagcaatgtaccagctaaggtcacctacgaatggaaaccaactctttgcgagaattgcaaaggcatggggcatgagacagttgattgcaggaagagagaagggaagcaacaagaatgggtgattaaaaaggactcaaagaaagcagaagtgcctgttggtggaaaagagcatacagaagaattccaaccagtcaaaactggttggaaagtaaaagagaaagggcctcctacacaaacagatacgaataactcatttacagttcttgaacaagctgatgaaactgtagaagttaaggcagtggggggggaactagtaggtggagttcaagagcacaatacaagagaggggggaggtccctctcttgttcatggatagcataatctgttggaacgttcggggaatcaatagcctgcaaaacaacacaatgtcaagcaatttattgctcttcaaaaggctggtcttgttggtctccacaagacgagggttaagtcttaaaaacttggagacttataccaaagaatgtttcaagggtggtgttttacatcaaacttagcttggcacaaaggtggaagaataataatggcatggaatcatcttcttttcaatatcgctatcatcaaatgcactagtcaactgattcattctcatattgagactataagtaacaggtataagttctttatcacctttgtttatggtttcaatgatgaaaatgggaggaaagttctatggaatgatttgcttagtatttctaatcaggagccgtgggttgtatttggtgatttcaaggatattctctataaagaagagagaattggagacaaggcaagaattggcacttctacagctttcttagattgtgttaatgattgtcaaatttcaaatgtgaaaagcagtgggtgcttcttcacttggagtaataagcaacatgcaagtgatagaatctatttcaagattcatcggctactagctaaccaatcttggatggatttattcagaagggctgaagctctctttcttaatgagggaacttttgaccatactccagtagttttgaacatatatcctgcttttcctagtggaaggaaaccattcaaatacttttgtatgtggtccttgcaccctagttatcatactcaagaaaatctaggaaaaaaaggtagttggatccaaaatgtttcaagtggtttcgaaattgaaagcattgaagattttctttagagaactaaatagagatcactactctgatattcaggcagtagagagaaaggcaaagcaagacttagatgaaattcaagggctacttcaccaaaatctgttagacttaaatctgtagaaaaaggagcaagaagcaagagaactgtatgtgaaaatccataaagactactgttccttcttgcagcagaagtctaggataaagtggctcaaagatggggatgaaaactcagctctttttcactcaagcatccgagagagatggttctgtaatagcatcctatctattagtgatactgctggaaatagaattgaagatcctgatgagattacaaaggttttcctagctttttatcagaatctgttgggatcaaagatagagaatagaagggctgtaatcactaaactagtcacacaaggtgcttgtgttacagatcagcatactcagattttgatggcagcatacaccatggatgaagtcaaagaggctgttttcagcattccagcaacaaaggctcctgggcccgatagatacaatagctccttttaccaagataattgggaattggtcaaaaatgatatatttgaagcagtcacatctttcttacatacaggccagctgctcaaggaactaaactcaacaattattaaacttgtgcccaaaagaaaatgtccaaatgttgtaagtgaatatatacctatagcttgctgcaatgtactttacaaagtagcaactaaaataatttgtagtcgcttgaagctgattctcccagatattgtagcttaaaatcaaggtgggtttataaaagggagattcattgctcataatatcatgatctgtcaagacttgataagaaactatgggaggaagaatgctaaggctaactgtatgataaaacttgatctgcataaggcttatgacacactggaatgggactttttaggataaatgatgcatgctcataagtttcctgctttctttatcaaactaatcatgacttgtgtctcaactcctaggttctctttactcttcaatggatccttacatggcttttttccagctaagagaggacttagacaaggggatccaatgtcgccccttctatttgtactgggaatggagtaccttagtagaatattgaaggcaattggagataaagaagattttcacttccatgaaaggtgtgggagcttaagaatcaaccatttgagctttgcggatgatgttcttcttttttgcaggggtgattacaaaagtatctatttgatgctcagaggcctcaagttattctcaatgacctcaggccttcaccctaatcaacagaagactgctctatactatagtgggatagcagatgttgaattaaggaggatcattgacgcctctggtttccaaaagagcagtgttcctttcaaatatcttggagtcttaatttgtgccaagagaatttcttgagctgaatgttcagttctagttgaaaagatgacttcaagaattaaagtgtggagttccaggaatctgtcttttgctagaagagttgtactgataaattcagtacttttgacaatacatgcttactggagccaagtcctcatccttccaaaaaaaaagtaataaaggagataggaagtatatgtagaagcttcttatggacatggaaaagtaatatgaatggtcctggaagcattgcttgggaaaaatctttgcaaatcaaagatagtaggtggacttgggtttcaagatatagcaaaatggaatcaagctgcagtagcaaagcatgttaccgcaattgccaataagaaagataatctctcggtgaagtgggtgcatagtgtatacattgatcaagaaaattgctgggggtacaaagcccctgaccgtagcagcttgtactagagcagagttgtaaatgtaaaagaggtagtgaagctgatcttgcctccagatcaatttgctgcatcaaatttcaaaatagctcatatgtacaagcttttaaatcaagaacaaagaggcttccatgttagcaagcaagtttggagcagattaaatgttccaaaacacaactttttactcttgatagtagtacagaaccggatgaaaacaagagacagacttcaaagatttcaaatcattgctgatgcttcttgtctactgtgtaataatgcagtggaaaattctctgcacttattcttcgattgcaggtatgcttagttctgcttacaagaattaaaaaactggctgaactggaggtccaaagctgaatccctgtagagcgtattgagatggattgatcgagcaaagttgagcaaattcaaagcaagctgttacacagcttgcattgctgctttggtttacaagatatggcaatccagaaacaaaatgttatggaccaaagagagtattgatccgaaagtattcattcaagaaactaagtggctggtaaagaataggattacttgtgtaatgcctaaatgtatagatcaaaaagaattatagtggtttaaagagttataagaattttattacaaaatgttgtatagaagcatgctccatgaagagccatagattgtaaacataaaaagtttattgtgcaatgaaattcattcataaaaaaaaaaaaaaataggtttgttgaaaaaagtttttgaataaaaattaaatataaacaaacacaatatgtatgtaacaaatgtgaaataggatattaatataattaaattattattttaactaactaaccaattttgaaaatttagagttgttgaaa

SEQ ID NO: 112055 - DNA, 3684 bp, Cannabis sativa
ataaataatatttaaatttctaattttttattttgtttttcaaaaatattttatatttataattatatttttattataaataaacaatatcaacctaagtttcttataaactacaatttttttacaagtgataaaaatataatttaaaaatattaaaaattatttttatcaaatgcatataaatttatactataaaaaattaaaaatataaaaaaaataaaaattttatataaaatattttttttatataaattaaaatattatcattattataatagaatctaaataactcaaaacactttaaaatttataatttaccaaacactcagctcaatttttttccacagttttgctacagctaattttccccacagcacaactacaactgtttttttctacagcacaattgtgccaaactgaccctaaatttaatcggatttgatttgggttttgactaggcagatttggactagtaccatgtttgtgacattctattgtggggttagtaaatacaaagaagaaataaataaataattaatgatacgatgatttgagaatacatttgtactggtttagtttataataggtgggtatacaatgttattccaatttttgtccatctgacgtggcatgttcaggtggccaacatcaataccgcgtaggagtacaactcgccaacaagaaagtcaagccatctactcaatactttaatgcattaatgaccaaggggtcattatgtgagaaattaacttgaacaacatttccttctatgaaagagatagtgggttctttgagctttggttgcttggagcctctttcttcgatggctaggatatcacttttaggctattgatgaagtgtccaagcatagcgctctctagccttgttggtctcgcctgggatatggggtcttctgataatggcccttaagtgatccgccactggaggtggcatagggtctccatttttggcaccttgtgcctgagtttggtcgttctgcacatagcaatgcaaactgggattattctttcttataaggaatttgatctccctcttcaaattctaacactcgttggtgtcatggccgaaatcattatgaaatcggtagaacttggacatgtccctcttgctcatctcccttttgatgggagggggcttcttgtatgggatagttccctgagtggccatgtagatggtcttaggtttctccgtcaagagcctgaagtaagtgaacttgtcctccttatctttgcagtttcgtggcgtgggagaagtattgtacttcccctttttgccattgtttcttcaagagctgtcattgttgcgcttgcccccagtattcttgccacttgaggtttgcatagaaatgctagtacctacatgtgcatcaggcaaatcgtggggctgtagggcaccctaagattgcctattgtcgacttgccctgtctgggcttgtcgaacagcttccttcagcttgataaagttgtcagctctattaaggaactccttcatgttgttggttgagatccttcagatatctttttagaagtcactcaatggaaggatgccccctagtatggttgtataccgaccttcttttgttaggcctttgacttttgtggcctcagccttgaacctttggatgtaatcatttaaaggttctccttgtcattgtctgacctcgacaaggtcttccaactgcaatggtatcaaccttgaggatgagaattgtgtgtataattcttaagaaaactcattctaagaattgaatcttccgagagccagcttaaagtaccatttctgagctttttccaacaaggttgttgggaatattcgacaccgcacgtcactagtaattttttaaagatcaagttgcatctcaaaatacttgatgtgtgctagtgggtcttctttattcggtatacatcttccatatcagcatcttgaacttgaacaagggaaaggcattgatatatgctgagaatggtgatccccttgacctatccaattcaaggtctaaaggttttcgatagctaggcccttgatcatgtcctttatttgatccaagtgtgcttgcaccgaaggatccgttgctatagtgacttggctgattggcccttctcgaatgggctacaaccctgaatgggcgaaggtcttgccagccactcttggaaagctggactagccttggctggccagacccattatgggtagttgttcatggccgaccaaccctatgttgggtagggtctagtcgctcattctcccctgatcggctagtgtagcctgagcgttgacagggggtagatcacaccagttactagagttaggtggtctagatatttgaagtgactagagtcacttctcaagctgttatctcaggtgtttccagccattctcggacctagccagttaaagattgacctctaggttactcgctctcggagacctcgggacaggagttcaccctgttggccggccaatgttgtaacactgaggggctggctggccagaggctgataatcgggggtgttgtcaagcctaagatctttgactggctctcagactggtggtcgttgatatctgactattcttgcaaccagatcttcgtggtaactcttgtgctcctttgggtaagggaaagtctgtcctggttcttgaggaacctggttggagagtttgttggtagaccctcctcgatctatcgactagtctcccttggagaggttccttgatgagatcctgacttcttctagtagttctctcattgaactgccttatcatgttgttagcttctctattacggcagtccagctccacctgatgagatcagaggatgtactcttggtcatccatccgtctcagaaatttgcgtctttgtagtgcaaatatatcgcagccaacaacatgtggttcgttagttggctgacttggcagatggcttctctaactctagccaacttgagatcttctcccaagtctacatagggctcgccaatggctgtttgccaattcttcgccctatctctccagcataataccgaggaccagatttgcttgtggtgcctaggggttgctccacgtgggttcttccttcactgggaggcgctagtggagggtcctccctatgaggcatgggttgattattcagacccacatgaatggttgtgtcgacctggccagctgtggtggccatgtttgtggtgcctgcagaggtggcaggagtggccacatctgtcgagttcgtggagattccaattgtgactagaacacgaacatcaagatcagccgccataggatcttgaggaagacccgaggaggcagatgtcattgccggagttctccttctgttaaccatgacacttgatcagataaattaataactcgatctcaatgaaagcaccaaactgttgacctcagattcggccaaccgatagcggagtcaaatttaatactgatgccacatgttacacaataagaacaaaaaagtaaatagacacaagattttataaagtttcggccccattagttaatgggtaacgacctactccccttttagttgtattggtaccaaagattttattatgaaacctgtagtagttctcttaagattacaatatgataatggatatggcaaatctcaagtgatggagacatgcctatgcgtgagagagagagagagag

SEQ ID NO: 112056 - DNA, 3758 bp, Cannabis sativa
  modified_base (36)..(36): a, c, t, g, unknown or other
gtacataaacaatcactgaaacagtaaaattgaatnaaattagacaaaagtccttacatcaaacaatctcaatagttctaggggaatttttaatggccaaaaaaattcagggggcataatttggtatatgtcaaagttcgaaagaaaaaattactaattagccttaaaattattgttgtaacttgcaaattactttccttttacaatctactactttctcaactttttctcagtaacacaattttaattttgtttgttatatttcttatattcacaatttcacataattgtattttctatccctttttttttatttaataatacttttttctctccttttattattattatattggtcttcaaaatcatgtttttaaaccatttccaaaaagaaaaaattcaagtttttatgtgagtttgtgatattgtggcttctcttgaattattcttagctgctattttattttgtatgtttctaaatttaatattatatatttctgtaatttgatgggtgtgagatgaattttttattatatgtcgacatgcttgaatttttgtgtttcttctcctctgtctttgatgtttcttatacataaatatctattttaactttatgtgacaatgagaaatatagttcttctataagacgtaccaaataattttttaaataaaatatatatgatacaataattttttgtatatggatgtgattatgtatgtccactaataaagtgtttaatctattattctaagttcgtgtgtgtcgtactggtacaactcgtattgatttgtgttttttaaaaaacaagtcgtgttgtgccgtactatagaaaaatatggatcgtgttgtgttgtgctaacattttaaaggataggcccaacacagcccgtaggctcagtattttcatgtcgagctcagattagtgttgtactttgctcgtgtcacccagtatttcttaaataggttctattttcatatccagacttaaattggtactttaatttttcatatttttattttataattactaaattatatatattttttaaaattttaattatatttatataacttttgatcaacaatattttaccgataattcatacaaaaatattaaattaaaatttcaatatttacttataaatacctcaaattattatatcacatttaattaataaattaatatataatctaatttatggtgttttaataatttaaattgtagaattaaaatattaagaattatatttaagttttattattattttaacttatttataattgaaatcttattaaatatttataaagttttttaatatgtcgggtcgtatttttcagacttgtcgtgttttgtgctttttggactagtctattctgctttagtgtcgtgcgtttcgtacttctcgtaccgtgtcgtgcccaaatttgtattttttcgtgcctagtcatgcttgtacctttcaaactcgtgtaaatttcgtgtcgtgttaaaaaaccagacccgtatttacagcaatagtttaaccctttaagaatgtaatttcaatcatagcggttgcaacaaattttgataaattttaggctatattgtgagtaaaatcgcacatatttttgtgtgtgctagtaatatccatgtaagagactacatcaaaaatgctttttttttatttatttatttaaaaacgaagtaactatgtagttaaatcatgctcacaaggtctcctacctatagctagctagtgtttatgtaaaactgtaattataatgtatacaagaatgaatagttaagttgatgaaacaccaaaagagaaatgatagtagctaggctagaattaaatgaaatcatcaaggcggccaagtgggaaaattgaatttctttgaagtggtttgagacagaaaaatgaaccttttgcccatacagctgaggggagaaagagtaacacggtaagttttattgtgcttgcattatgattagatgaacctttttttttctcttttcttcctttgaccactttgaaattcgaccaattttataacataatcaactctacaacacactacacatacttttggtagttttagaagccacaatttcctatgaaaatttgcgtgggaccatgctactgctaaacaataacattaatttacactgcatgtaacttaaaacaatgccaacctactatattcaactcactctaatgcccatcactcttggtcttgggtgggggagtagagactttggtttctaaagctaaggtttggggtttaaactctaccaagcccactttgtacatatttattgtatatatttacataatatttaatcctccttgtttgtggttactgctacatacaagtgcaggtgtaatattgtaatatttctcccaagttgctcttagattattgatccaaaaatgttactgtgcttaattgatgtaataaaatataaatcgtttatagatttgtatttctcattataagtgtaatttttgtctaattgttagtgtactatatgttgtacatttaaaagagaaaaaaaaatcttgcatgtcacttttattttctattggcgcactcttaaatactaaagagacgtttggtatgagatttagactagattggaatgggaatgtaaaatttaaattaaatttgaataacaagatgtttgtgtttccaagtaggtcttacttttttaattataattgtgctaatgttaatcccctcaaaggcatggattttatattttttctaagtctactccctccaattttattttctccaactcaaagtcagataacaaacaccccagtaagtagcatttagttagaatgaataaaaacataactagaacaaaataccaatttaatactttaaaataaaactaaataaaaaaatagaataaaaactattctattttatttcattccctctaatcaaatattacctaaaacttctgaatatattaccaaagaaacgttgtcttcaaaatgttttttaattaaatccttcaatgaactattgaccaacataagcaattttttttttgcttgaaaacgtattttgatattgtatctctccaatcaagtgtaactagctaccctgagaaagtaactagttgccttaacaatttttatgtcaaaaaaaaatctcatatattttaattttaaaaaaaaaatccaatagattaacaatttttttgaaaaaaaaaagatatatctttacacacatttgcatcaaaaacgataaaataagtaatttcctcttattataatttaattagtaagtagtaatgttaaacaacttagattaaacttttaagtattatatcatcactatcaaaggcatgtggtattagacaccatataaaatacattatagctgtttggttttgtaccttaaataaaactctatttcaatgtaattttttatattcaattttaataaagaaaacagatttattttttcattacttatttaatgtatttcttggttcatgtgatcatttgtttgatttataaattcatcaaaattcttatcacattgatattcttgtttattgtgtttcaacacagtggaaagtaatcaacattgtgtgattaaatgtattcctatgatttatcaatacacggtgtttaactgataggataatctacaatgtagtttccttgcacctttgataaatgttatgtcctttctagggaattggttaaagtaagcttgggttggatgtattcagtatgcatcgaaagggaccgat

SEQ ID NO: 112057 - DNA, 2523 bp, Cannabis sativa
taataaattgagcaaagtgaattaatatatgtatatatgtacatatacaaaatttgatgtatatatttgagtgagggctttagcccacatatggcataaagtccctccgtccctgtaattatgtatgtctctccctctcggaaaacaatatattatttaatataaaagaagaaaattgtttgtggaattcaaatctttaatctttaaacaattattctccaaattaatggttcaaaactatatcactgtaactacgtcaattaacgtacatttatgtatatggtagctagctatatatttgaatatatatttgtatgtatgtacatatatgtaaaatgtgataatataaagcagcaggaatttaaaaattgatgaataaagttagaaatttgatctactacatacataaaagataaagaagggagacccaaattggaaagatgatgatatgatgcatggaagcatcattgaatcatatatgtgtctgtggtgaaaaagaatctcataataaaaaaaggagaagttagacaccagaaatgtggcctcctgttggtggttgccgggcccaaaacacaagtgtcacatatctttattaatttgcccactcaccataattttcacccttcttattactctcaccatatcacccttctctctctctctatatatatatatataattatatttgattaattgcaatcaaagctagctataactaagaagtagtagttgtactatattagagggaaaatcatagaaactaataaaaaatcagacccccccataaataggaaagagagagagagaaatatatatttatatttgattccatttatttttgaatttggttgcttaatggagttaacaattatattgattaaataatgtgggacaaattaataagataatgtgcacataaaaatatagtttaaagtatatgaaagtaggattattagctagattcgggatcgacaacacttgggtactatgattacaaaacatccagtttcgatgctgcatgtgtttgagaatctgaatccccatcatcttccatttgcatccttccccaatattatttaaattaacaaaaaagtactttattaaacttattattatgaattaagttgatttctattattttatatacttatttaatcacatacaaacatggttagctttttcttggtataatcaaacaatattccaaataagtgtgtgtgtgcagtgtataaaatcgtaatcattctcaaagacctagttagcgcagacatataaatatatattataaattaattaattatgtatcctaagatgaagttaaatggattctaaattctaataattgaggtcaagtagtataccagttcatccttattttgctcagcacaatatggcccagacatatataataatgatataataatacgtacttagttttattaatgtattgctacctactacaagtatatacaccgatatatatttcattaggacaaagagtactaagaaatcgccccttaattatatatgtgttgcccttttattaataaaaaatattaatcaaaactttaatttagacattcatgtcactcattatttcgctctcgttattattaattaattaactataataattattgttattgttcagttgactagaaaaaatgtttacgaacggataatgttttaaaatctgttaattaataacactatatagtctatataaatattatacttatatataatatacgtgaagtcggtacactatataagaaatttaggtaagtacgtagcagagagatgaattacaacattatatttattaattaagtagaacaaatgtgggacacacacacatatatagacaccacaatttagcgaagtgatgatacattataataataaaattaatatggaaactcatgatcagggggtgaggatgtgtagagtatatataatggagaatgaagatgagggtatgaatgtttgggagagaggtgaaaataatggcattatcgatcactgtctctgtggctgctaaataattgggtgatgggtaggcacaactatcatgggaccccttacactgtttcccgatacctttgtctctcttctctctatttcatatatttattattcacatatttagtaatacttggctttatgtgttccacattttgctaattattaattataaattgtattatatattattgttgatgcagatttttttttaattaatttaaaaaaaattgtaaaaataaaaaaagattggatgtttgaattttttatcactcataaatatataatatataataccttaattcatagataggaatgatcttaatcttggtaaaaataatctttgtggtaaatttaagtacgtaataacctttcaggaatcaagactaaggagtttggttgggaggaaagaaaatataggaataggaataggaataggaatgggaatgagaatggaatggaataaaatttaaaatagataaaaaaaattgataaaaaaat

SEQ ID NO: 112058 - DNA, 1965 bp, Cannabis sativa
  modified_base (623)..(624): a, c, t, g, unknown or other
tggtcaaatatgaggagctgttggattgcttgctgtacaaggaagtcaaaggtcaactattatgttcttttgtattgtaatggatgcttctgcgtagctcccatgtgaaattactattatgcccttcgagtacgacacgtctgcataatgggtgaagaaggcaaatgggtccataccataccccattcctgtgggtcgctcacccaccgaccaagcaatagttattgccttattggccaaggctaatcttttctatgtgtttatcttttaactaaaaaatttatcattttcaatttaatattgttattttgttaaatcatatcattttaattgagtatttaattgctctggcattttcattgtgtccaaatctttttaagagttaattaatcaattgttaattagcaacttacagatgtaaagttcatgttactgcctccaagtaaagtgacgtaagacttacgtaatcatcagaatcactgctacgtcatgtttatgaatataatattgtaaaatagacacgggataattgacttattgaccattgacaataacaaaatggaatataaattcacggtttatccctttcgatattgtttaaaatattaaataataataataannataataataataataataatcccaaacaaaagtgttatatggaaattttgagttttcatattgatgtggaggtctatttccaattatattttagttaatatatatatcatgtatcattatttgttaaaacaaattatgtattatggtatataaaagaaaagtatatgatttaatggtgttacaattatattaattattttttgggcccacgaaaagacgagagtggtagttccctcaagaaaaaataaatgtattttagttacattatatttataatatttttatttttttaaaaaaaaattaattactttccaacatctactgataaaatttagaaaaattcgataatacaccttgaaatgggtggattaatgcaccttttatctgtttcagtacttaaaaaaatatttaatccaattttctttatggtcgtatacattgtagttatttaaaatatttggcaaaattttgagatattcaaaaaaaaaaaaaaataacacataaaaaataagattcaaaaagtctgttgcgcgcgtacgcgtgtgaaataaattgtttgaacactgatttctatacatagatttttactttattactgaaattcggccaccatacataaccacaagaacacaatcttaaaaatatagaaaaactttaaaaaaaattataaaataaagcaatttacattaataaaattattagagatttagatttatactttaatggacgttgagattcaataatttttccaccaaaagtgcatgccgaagctacatgaaccagcacaaccaccacctctgagcttggtttaccttaaaaaactaaacaaaagacgatcaaactccaggaatatatttttggatatgaaaaatgcaagatttaaaaacaaaaataggtaaaatggataaaaatgaagaaatgggtggttaggtgagatttttgtgggttctggttatttcagggtttgaggaagacgatagagaattatataaatacatatggcatctggtattacaaaataactaacgccatatgtattttttcgttaaaattaaaaaattatcatcctatggtgttagttattacaaaataaccgacgacgtatgtgtttttattaaaatttcattcggccataccctatgacattggttgttaatttattaatcagttaaaaaaaagtgactctaaaggcttgtattgtagtagtgatatttatttgtttaaataattaataactaaaaattaatataagcttttaaaatttatttatcaggaaaggaaaagactaaatatattgtgaaattccgtattttaatattctcagtttaattatttaattaa

SEQ ID NO: 112059 - DNA, 4137 bp, Cannabis sativa
agtgccaaatttgagataacagtagagttagtgattccagatatatttttacacttctccagaaaatactgctccaccccaaagtaatcactatttcttaagtagactttctagcattgacgcaagtttagaaaactgattcggtgtagcctaaggattttaatacaccatccttactaactaacatatagttcatcttcttgtatttcaggatgtgtttgattatcttctaatgttcctctatggatcaaactaatacttactcagaaatcacactcaacaacagatgtttggtctaattgcatacaagagtatacataagacctcttactattgaatccttttctttacttttatcttgtttagagtaattgaaaatatctccttagataaaataactccatgtctataagtcaagtgacctccattagagttagccatttgaaaatttccctagcatcttactaatgtaagctacttgcaagaaaataagtaaattaccatgtataccacaagccataagttttgatattctcatcaaaatcttgatactaggaatgagaaatttgcttaagcccattgaagagcatggtttaccatctgatccatgtattaagaaaactctaggtttgtgaatggctaaactttagttctctaggctttgaatcttagttccttatttgactatctatcacttgtttaaactagcaatggatcgtcatcactagtgtcatccaagtcatactaggatgggttcctaaaaaccctcccattatgatttgtaccgtgataatatatctaggaacttcagtgatatagacatctttagttgtatcaatacaataaaggttgtgggactatcttatataatataagatgatggaacacttttggatttgaatcaaatagtatattcgcttctttgctactttggttttgagattacatctatgtagtcaacacctagaaaaatagtctttgtgaaaataaacactttctagtcttgatgatcatggtgtagtctattcctagtcacattagaatagccaacaaacatggaaatctcagtaagtagttctagattatcttaaagatatgatcatggcatccctagatttaataatggtgtacactaagtgcttaaccattatctcattctatgattttaccaagatcatacttagatgagacgacatttaaaatattatttgctatctcaaaggcatatctttagaaagactttatcatctgttagtaattaatcataaacctaattatttcatcaatatgagactcccaaattctttgaaggtaagttcgattacaatttgaagttcatttaaatgatctatgaactgcatatcaaatatttctccatccttattagttgcaagatctttaatgactttcttaactgtctttgctagaaattcatgaaattttttaaacatttcaaatttattgcataagttaaatatctgtagtaatcatctataaaattgataaagttctcataatcacccaggacttgtacatccctatgtccaaggacacatgaacataccatttaagtggttatgtagcacaaatatctctttgcatagtatgatcttgtcaaaactactatgaccaagataaagtgacatagataattcatagtcattatcattctttgatatatatataattcctaggtcgagttacaataaatagtttctttaatattagtggatactcagtctcaaaatatcaaactcatgttcatacattaacactttgtttaatccatgaaaatagatatctaaacgtgtgaaggttaaacacagcgtttatgtagtctagaaattcattactattctagcttggaccgccactaagacattattatgactctaagttcaacttgcaaaatgcttaatatcaatttcaaaactataactcaagtatatattcaatcgatgttaagtaataatttaaggagattcaatttctagaaattgaggatagtcatcatttcatggataaaatatcttgaatatgttacctgcgttactcattttcttaaaaaaaaaaattagagcaacatcattggcagatgattataatcattcttgtccaatgatgtatgattatagcaattttctaataaaaatctatagtgaaaatctaaagaacaatctcaatcaaaataaaaatctaatgatgtcccgagagtcaaagttattcttattttgtaaacttctttattgtttcagagttataaatactagtctaagttgtcacctttagggatgagtcaactagattttgtatttactaaatacttatcttgcgagatctaatactattaatttgtttaatggatgaccatccaaattactaagttagaccaacaataaagattcaaaattgatactacataatcaataacaaaaatcaaagcaatgttcaatataatactattcacatatatttagaaaattataaacacataatcaagtatggaagatatgggaaaaatactaaaaacaaacgtatctcaatttttctaagttttttaactaaatgatatacaatgtcccatttaggtgagagtcaaagatatcactggttaaacagagtagtgagctcttctattatagacattattttaacaaccttttattcgatcaaaataagaatctgacactgtcttgtataagcaagagttaaggttattcctatttcatgagattctaccattgtttcatactcataaatattcttctaagtagtcatctttagggatgagtctactagaaaatgaatatatgaagtaattatctttcgagctcttagagtgttaaattgtctaatggtgaccatccattagggggacgacaagcgccttgagatcccaatagaacagtaatcatgtaagaccaacaatggagatcgaatgtcttataaaaataaagctcattatttgaagaaagtagtatttttattcaactatttattttaatatatatatatatatatatattaaaattacaaacttaggaataaaataattataaagttaattttatatccaaaataaaaattttaatcttgaacatatctcattccgtacgttgatatttttcctcaatttttgagacttatatccacgtatcgtatccatatttatttaaattttattgaaaatttagacattttcaaattacaatataacggataattattatcaagaatataagtgctaattagtggtgttttaaaaagttactttttccttttaaaatttgaaagttagaaaaaaatccaaatattttgataattatttcattaaaaaaaaatccatatataaaatataatagtcatctaatcaataaaaataagttagttatccattcgataaaaataagttaaaatttatactgattttaatacttttagttataagcaaaagtaaaaatttaggtagcgtttggtaatacttttttaatcagttttctgtttttaaaattaaaaaagtgaaaatatttttcaaaaatatgttattgcttctacttttcaattttttaattgagaatcaaaattctaaaaacaaaaaatagtcactttcaatatttttttaaacaattttttttttcttaatcaatattttagatttcgaccagtcctaaacccgacctctgacccaatccaaatctaattccagacttagactcgacttaaacaaaatcaaaaaataaaaatgaaaatgagctttacagaacacacttttattttctgtttttaaaactgaaaaagaaaagtggtttcagaacgcattttttatttttcaaaaacaaaatttttaaaaacaaaaattttgatttcattttatgattaaaaaattagaaaataaaagtattactaaacggcaccttagttaaataatgtgtaattaaaatctataaaaaatatataatattaataatcataaaaatgatatgctataactaaggtagcgtttggttggaagtaataaaataaaataaaattaaatggaaattaaattatttttattctatttctttgtttggttgcattttaaagtattagaatatcattctaatagaatgacattttcatcattttggtagaatg

SEQ ID NO: 112060 - DNA, 2994 bp, Cannabis sativa
cccagcctttggatcaaagtaactacccatccgacggttacagtacattacggattgcaatccgtgtccgtacagtaacgggacaaaattcggtccctataaatgttattattaaccttttcaaaactttgtcatacaaaaataggaaacttttttttttgtttggaaaaataaatatgaaccattattaatttaatcgtaaagaataattagtatttttgtctcttaagcttttgactagtacaaaatttcatcccattttattaaaaaaattaatttaaatattataattttacattaattctgaaaaaattaataaaaattattaaaaagttttaaatattaaattaattagaaaaaatattaattttactttaaaacctaaattattcctaaaaaaatattttcaagttttattttatttataaacacgtatcttaacaaatcaaaccaaaatgatagagaatccaataaataatttaaacaaactaagattttttttttttaaaaaaaaagatcaactttgtttatatttataaactcatatcttaataaataaagaaaaataattaaatattcaataaaaatataaaattattttgaaaaaaaaaaaattaaaaaaatgttatttttacttaaacaaatctacagttttcgaaaaaaataaaatagactcaagtatatttccgtaaaattttatttttatgaaaattaaatttttaatatattttttttaatatctaaataaatattttaataaaaaataaataattttttaaatcgctcttaattagtgttaaaattttattttttttaattttcttaatctttcaaaataattttttcagatttaaattaatttttgaaaatttactaaaagaaatgtcaaatctttcttggaagtacgatttgatagttgttaaaatttaaagagcaaatttgctatttcagaagtacgatttgatatattttaaggggtagaatcagtattatttttatttaaaaggtaaaattactaatttaatatccacgcacaacaattaaataaaattaacccttaaaatatgttgttacttgttaataacgaaaaattcattaaagtaacatttgaagcttggaaatcgcccaactcataaattagcatgctgtaaagctagccagaatagttactctttacattcttaatgtcattaattcacttttataaacgaacaaacaaacaaacaaaacttgtcaataatccattattagcgttatgcaactctaaaatttaagcaaaaaccgttcgagagaatcctctgtcatacaattagtaatagtatcttaaagggtctgtttcatgaaattaacaatttggtaagctctattaagtggcattcaaaacaaaatgctatactctttaatgatactagaaaagaagatgtagaagtctaatagcaaaaaccagaacataatgtaaagctcagtcaatacttataattgactcaaacaaaagcaatgaaataacacacttcactgtatcaagagaatatagtactacaatcctatgcttgaattcaaaagcttatcactttgaaatagagcaatttatttagcattagcagaaacaacattgcaaaagagaaagagatctctcttttactttcttcaacaagaattagaaaaaataaaagtatacacatacaactagaatattacatatttccactagtgggactataatgcaaattaagctaggaaaatcaaatcaaacattctagtgattttaaataacaactctatgatgaaaaaaagaaagaacattggcatgacattgatcttaataagaaattagtaaactactaagctaagaatatcatactcatcagatcaaatcccattgatttgctttttcccttgagagttcattcattgatcaaatgctaaagagaactctcaattgagcaaaaccaacctgaaaaacctcattcgggagatcatagccaataagaaagcctacaaaatcaaatgctaactagccccatctaagcctcaggtgagggcattctcttgaccttcttcttcttctccgaaacagctttcgcgaaagcctcaacgatcctctgctgcgaatccaatatcatctcggttcgcttcatctccatctccattcgcattgtttcaatctctctcgccatctccatcttcatctgctccatcctcacaaacccatctcccaatgccttaattgccgaaaccatttcggtcaccggatctttctccttttccctctctctctccctcttccccaatccgggtctcactgaattacactccctcacaaccttagtaccaaaatttggccctgaattcatcgaattctgatgaatcatcccaaactttggatcaagtttagcataaaccttcgtccctggttgagcaatactaaccccagtgggaattcgaattctaaacccactactactcgaaccaccaccactacccccaattccattcctgtaaagcttgctcatactcttcatattcgacccatatttcaattcctcataaagttgctgatctggatcttcctcttcatcctcgtgatcttcgtcttcaccagggctatctgagttttcgggcttcgccgtcggacctttctccatcgaatccatgcgcttaaaatgaacccacgaagaagtaaacctcgaaacaggcatagatcgagcacgctgaagctccgtacggtaccgtttccgcagtttctccatcttatgtcggcactgcacggcggtcttagccggagacgccgagggacatctagccgagacggcatcggcgacctcttgccagtgggtggccttgaggttcccgcggcggagagagtaccacttatcacggtacgaatcgatcagagaaaaaaagaaaagggaagaaaaaaagaaaaaaaatattttataatttatttattttttaatttttaaatatttataataattttttaaaatatttttt

SEQ ID NO: 112061 - DNA, 5803 bp, Cannabis sativa
ttatatctgtctaaaatcaatagttaaaaaaaaatttctaccgataaaaaacttatgctaagttctaccacaatcttaccctaaatatttatatatatttattaatttttttttgaaagatatatttattaattaagttcctcttaatttagtattcataaaatctacaacaatatcctgaattaaattgggatgatgataacggtgcatttatcacatatccatatatcatttattttataaatcttatctcttagcatatacatcatcacatggcaattattatcattttaaatttattttaaagggtgattttatagtgcctgtacttagattggttatttttttttaacttaaattatataatatttattaaaatataggttaattaagatttttattctaaaatttgacatgtacccaattatgttttctgaacttttttaactgttaaaattttctaatgaattattgagattgttagattgtagaacttttgtctaattttattcaattttactaattttgtgattatccatgtactaaattatgatcaccaaactttgatatctaccaaataatttcctcgaattgtaatatgtaccaaattataccattcatgttagactttccttaccaaaattggacaaaagtccttaaactcaacaatctcaatagtttaagaataattcttaacgaccttaaaaattcaggagacatgatttgatatatgtcaaagttcgagaaataaaaatcctaattaccctaaaatatataaacatgatcgaccttgagttcccaaccactcaaggcccacactttgtaaaagaaaatagtattagtaataaaataaacataatacacacattagtaaatttatattgtagattagttgaaatttgtttagagtgttaatttggaggtctagagtttaaattctcaggaccccattttatgtagaggagcccaatttttatttttgtctaaggctcaaaataacactgtaacactctagtatctaaagcacatcatgatattttctaattattgtgttaacctttactaatcaaagggttttaatataaaaagtgcatttaataaaaattttgtgatgattaaaattttacagaacatgtgaattttttaagaaatatttacaatttgggatcttgaaatctagttacaaaacattctgcgacataaagtatcaaaaggtaacaatttgggatcccatatgaaaatatttacgtgaaattacctgtaccaataaaggcccttttggtctccttccctttcccaaccagccacgtcccccaggaactatggccccttaatccatttcatgcagatgcccagctacagcctcatgaacttcataaacacctctattaatttcccaaggactttctaactaataggatttctccttttagcctattgggggataatactttgatatcaatggcctcttcatctcttccctaggcaacgcaagcaataatacttgccttgaaaccttgcccaatgctgccacaccaacactcccacaaaaccagcaactccaagtagtactcgatccatctttcactgcgcttatgtctgcagcctcaggagggtctataaccttactttacctctccaagatatccttccacccgaggttgagaagttctacttcccccactttcatcttatgaatgatccattacaagtaccaatcctaatccagccactggccctattcctacccctaatgttgtaggaactctaagttcctttgcgtttgtagtgggcagctctgaaggcccaactaagaagaccatgacaaggaagagccttgctactagctcaatgtgttttaagagacaactagcgactgtaggcaatgaacagaggaaaatgttaaaaaaatacaggccctaaccacatcaagaagtcgtggaggtagcctctagtgaaaaggcatgtcctgtggacgaacatgcttgcctaaacaaataaatctcttaagctagaatgcttgaggcttggggagttattgagccttcctaaatctctccttcttgattataatgtatgagccatctttcctctttgttatggaatctagactatgtaagggttctattgatagaattaaggctaaattgggttttgaggtccctagagttggtttaggagggggacttttatatttctggactttgaatttgaatgtaacgataagtaattactttataatcatgttcattgctatgtctccaatattaatatttctgattttaattcacctgatttttatgaggctccttgcccatcaatcgtttcaatacttggcaaattcttcatagaattagccactcatgtgttttattgccttagcttatcatgagagaatttaacattttttttaacttggaatgaaaaaattaataataacaataggaacgacccatatgatcattttagagatttcatagataaattctatgtagaggtgttagattttgaagggccaatgatgacttggaataacaatcatttaggaaaagttagactaggccttaggaaacaaacattggaatgctctatttcttaatgctagtcctagccatttagacttctttgactctgatcatagagccatacatttaaagcttcaacaccaaccccctaacctcatttcgggtcatagacataagatattcctgtttgaaaacttttggttaaccaaactaaatcgggaagatgtcctacttaaggcttgtaactataatcccatgtctggttcctccatccaaagccttgctgtgacttaagaggtctgtggctgaccatctctctaactggaaacacaaagctttccttggttttcagaagagaatcaccaaaccccaaaaaaagattgaaaaggctaggaacacacttgttaactctgaagagtctctccaatgtaagagaaaaatactagctaatttatataggctcatttacaaggaggaaacttaatggaaacaacgacctagagtcaattggctccagacagaagacaaaaacactagatttttccataggtttactttgaataaaaaaaagagccaaccgaattaatcacctcaccctaaaagatggctccaaatgggataatgttgatgatatcctccaagagatagaaaggttctacactgacctgttcacatcacatgtgacacttcctcaagaaaagtttttcccctcaagaaatcaagagaacccttttccaaatgccctccgacaaagctcctggtattgatggttttaataacctttttaaccaaaagaactggcatattctaggaggcacattgactgatgctgtgttaagttctcttaatcatggacctaatatctctcacttcaacacaactctcatcactcttatacctaaagtactgcgagatctatctactataaatgactttttccctattagcctttgcacaatcatctacaaaattgtctcaaaatttttgggtaataggataaaacaagttatcagtccactcatatgacaaaatcaaagtgcctttctcaaagggtgacttatctctgataatatccggatggcctaggaactcctgcatgcattaagggtagggaaaaaaaaagaaaactagctagatggcaatcaaacttgacatggccatagctttcgatcgagtggaatgaatttttatgaacataatcataatgaagcttggcttcccaagaaaatttctctccttgattatggcttgcctaaccatcgcttccttcaaaattaatattagtggccgtgcacttggctatgttactccctctagaggaattaggcaaggggatcccctttccccttacctctttcttctttgttccgaaggcctctcaactttactcagacaagctgaggcgactgaataagctatagggattcaaattactaggtctgcctcaaaactctctcacacttttctttcaggatgataacattctattctttaaatcaaatatccaagtctgtaatgatatcaaagaaaccctctcttgtatgaacgtgtctcgaggaaattagttaacttcagtaagtcatccatctttttcttccaaacgctaacttaacctaccaaaacctcattcaggattatatgggcatcccttccactaacagcttggataagtacctaggcttgcctttgtgttttggccgctcaaaaaacatttctttaatctggtaatggaaagaatctggtcctatcttgccaaatggaaaggaaagtttttctcaaaagggggtaaggaagttctccatataaagccgttattcaatcaatttcatctaatgttatgcctgtcttcaaattccagcctctttttgtaagttttttgagagagaaatgactaagttctggtggggatccaatgagggggaaggaaaaatttattagaaaaaatggaatgccctctgtagctctaaattttgggggggactagggttaagatctttaaactgctttaaccaagcaatgctggacaaacaagcttggagaatccactccaacccatcttccctacttgacaagcttttcaaagtaaaacattaccccaagtccaccttcttcgaggctagtatgggccacataccctcttatgtttggtagagtttgcaatgggcaaatagctcttaaaaatatattcgttggagaattgagaatggaaaactgtgtatatatttaccaagataactagattctaaattgcacctatctccccttcatttagctgcatcacaaactcgagcctctgaccttctccttgccacaagtaactagaatgtaaacaattagtaacctctttcctagagatgttgtcctggttatcctctcctccaaacactaaaaagccagacattctcctctagcagttactcaggcaagtacacagtcaaaacaagttaccatctcgctcaaactattcgtcatgctgccaagccagcttcctccaaccctaatacactcaccaactggtggaagtacccttttggaatttttgcattgcttccaaaatcaaactttcacccataggctttgtcataatactcttcccacagctatcaacccgcatcataggaaaagtagcccttcccccatgtgttccaggtgtggtaactttcctaaaaatactcagcatgcttttttgaatgcaagggtgtcaagagggtttgttaaggtaaagaaaggaaaaaaaaaatacttttgacacactattttttttttcaaatatcaattgtaattaaataacttcgaattatttctttgtgttatgttgaagatttagaatagtagaaactcctttacttttaggaatatacaggaacaacctctctggatatatcaagaagacaatgacttccacagattctatcaacaagcttaacaaaagcattctccaggtgtttctaattacatcacaacccacaaccgtacatgaacaccccagagacaagactcttaaagcttaatgtcgatggtgtagcgtccaatagaaaataaaaaataggatcaagagctctggtttgaaactctacaggccaagtgattgcagcctttacaaagagttgtctaagaatgatgcccccaaacactactgaggcatgggccttgttacaagcattaacttgggggaaatttacatagtatactaatttttgtcatttttttacaaaaatactgtcaggcggcattttttacttttttactgtgtttttttataagtttcatactgtagt

SEQ ID NO: 112062 - DNA, 4077 bp, Cannabis sativa
ttttgattcctcaatcgaacctggtcggtacattcaacctattttttatttgttgccctaaccaattttcatctccttatctcttactttttgtagatgaaccctggtgaattttgaggaggaaaacactgtatcgaccaggatctgcttcaactactatacgagtatcatcctcatctccatgccagcccatcttcgtccagtgacaacctttctaactctagctttgaagattgggaaataagtagtgaacacacaccatccctggaacccaaggtgcaacatcacatctatcctgaccagatcaaaggtcaaggacacaaccgcttcatttgggagcttaagaaggggtagagatgctatctcacgtccaattggacgtatatagtgtgtcaagacatagttaacactctgcttgaggaccgctcaaaccctgcagctgggggtaaacctgttgccactttttctatgaccattgctaggtacacaaataaaatgcaatccaaacgtagaatgatggcgcaaaccaagccaactgtacgaaaatcttcactgtctgattcacacattgcctaacttgccaccttgcccagggcagaacagtccctacctgttactgaagaggaggatactgttggggacgttgaagtccaacatgtggagtacgaaggcgaggtctgtcttgctactcttcttgatgctgaaggagatgaggaggagggagtagctcgagggctaccatttggtggctacaatgaagaaggaaagcccatatctgaggctggaaaaggctatgttattgaggaatacatcgaggttattcccttaaagaggcaaggtgcattaggagttcgatggatttgtccaccatctgtcgtgaccatgtcaaagatgaaaaatttgctcaattgtggttaactcgggaatgtcgagtgcttccttccctcccccgaccagctttgcgactaaccaagaggaaggttactgtgcttggtcaggagttcataccaagtagggtccgatgctacccttgctcccatacttcaagaagatagcagactattatcacataagtttgacccagttcactctcaaggacctcaagtacttatttgccttgttcatcctctattcctcacaaggatggggcgagccctcccgacatgacaccaattggctttttgatctacagtccaatcccaagcagaacaggtcggaatacttttatttttctcagattgagaaaaaatggttgacgggcaccatggccacggaagtgactaagattgggggctttgtggatgaatactatcttgtcaatgtaatggacactgtccacaccagtttctagtaggtgttgtcctactactgtactctattcacattggagctccaaaagaaggcattcaacttcctcctgctgcacggaacatctccctcttggctaccaaggccaattttgtcaagtacaatcttttcccagccaattttgtacaaaaggctgtgaagacatcaaaaggggtcgtgctcagataggaaacaccgagcaagaagaggaaacagaaggctcttccaagcggccaagtacttattgagcggtttatcaagatcagggaagaacctaaatgagttgctcgaccatccaccctaatggtaggaaagggaaaggccgccttggtggagcaggagtaggaagattcctcagacgataagccttcatctctgcttgtttgggagaatgctcctgtctacatgtagggtattttaattaacatttaattttcatatgtattggcttatatcgtgcttgtctttaaccctcttgttttgttcacatgcagctatgtcttagaaggtgttccaagccttttagaagaggtcgggtgatagctctggccaaacggtcaaagggtgatgagataacgctgaaggagaagaactctgtcgagtcacccattgatgtctttcaggaggtggcgtcagaggtggagccaataaccaagaagacctctaagtccaagggtgccaagggtggaagcacagatgggtctggtctgcccaggccctcaaatactactattgtgctgaaccctgggaccaataagggcaaagagatgcttcaaaattacaaggatcggttactccttgaggtaaatgatcagctattcggagcgaacgagatgtctgtggagcttttgatgggttgaatcctgaaggaaaaaacccgagtaagtattttcccttggtttttatcttgtccctttatccgtgaaggttttaaccttttcctgtgcagctcaacttaaagatggcctacacttactcccgagccaagtccagtgccttgaaaactataactaccaccagcaatttgtagaaggaggtggatgcagcaagaaaggaggctgaggtcacaagggcaaagttggacgaggtgaacaagaaactcttggtcgccaacaagaaagttgaggagtggcaaaagaagattcaagacataccatctaccgccccacttgaagcgaatgtcgaagctctatttagggaggttaatggtctgaataacgagaggaaaagtctccgatctcttcttgccatgttaaccaaggagaagacaaaattggaagaggacgtcaaatccaggcagacaagggagcaactgcttccgaaggagattgaaagtttggagacggccgccctagaggttttctacgaattttggaaggccaacccagagagaaactttaattacctcggtgaaaccaaggaggcgtatctttgttatagcgtggcctaaaaagataacgaaaatctcgaggtagctaaccccacagctccgaccgaccaaaacactaagaccccgaccactaatgaccaagctgatccgtataaagaacctaggactcctaccgcatgaaacattctgttcttttttttcttttttttttagtttggcctatgggccttttttaatgcaatatggatgaccaagcagcctttaaattttgtaaaatttcattttattttaagacaactagctgaccgaggaaactttaatcccgggtttatgtcgtgcttttatcatctttttaaatgaatatttcccttgttttagtaattgcacatgcaaactgctatgtattttccgagcttgttatttacctatacttagtacaggtatagttgcctcccaagtgactgagcagaattatgattctgggtcacttgcattttacaagttcaatttttgtctgtttggcttttgggttcgagcaaacccttaaacattttaatggtaaatttataacatgctataaaaaaaacaattgaaacaattaaaatgataattaatatcttcattcatttatttgtcgaaataatttttttaccgcagtaacttatatttattaaattatgaaagctattatatgatctaacttatctttagttgattgaaacataaaacaattgcatatatatatttttaagctgtactttaaagatggtcatccgacctgagtactagttattttatccaaatccttgagcgggatccacccagaaggccatcgacttaagagtaaatgttctagcattgtgtacttgagatggtcatcagaccttgtacacttaccggtaatatttcctcagatgttccccattttaacatcttggtactagaacgagctccatattatcgtcataccatcccagcttgtatgctcaagagtttgtgacttcaatcacctggaatggtccttcctagttaggtccgagcacgccagctacgctatcttttgtgctcaagaatactcttctatggaccatatctcccacaaagaattttctcgccctcacttgcttgttgaagtaacgagccaccttttgctgatgagccactagctttaggtttattgaggttcgtttttcttcaatctcgtcaaatgattctgccagggggtatggcttcataaccataggccatagcaaatggtgtttgcacagttggtgttttctctattatttggtatgaccacaatacttctagtagttcctccgaccagttccctttagcct

SEQ ID NO: 112063 - DNA, 1312 bp, Cannabis sativa
atatatatatatatattaattttactaattatcttctctattatccatgaaaaccctctttcttatattcatttcagccttttaatgtattcactttctcatacacatattttaactttgatccttttcatcctaattaagcttcacctataaataaaatatcaattaaacaaacaaataaaacaataaaagtaaagaagataaatgtatagagaacttagatttattgagaggaagaaaggcaaatctaaggaagaagaggtgggagaatatagtagtactagtctagtctagtcatggtctaaggcaaaaatataagccaacttaaatacttccatgatgtgggggcctttgctttgaagctctattattattaaagcaaaaaacaaatgaagacaacaattttactttccaagatcatccttcaccatcacattcaactttaacagcaaaagttatctattgaatttggtatctatcaatctcaatttcattttatttgtttgtttttattttttacatccaatacaatttatcatatttggcatattttcttgtacattaacttaattgtttgattaaagtgatgagagataagtgagataatatattatatatgtctgcgttgcattctcaataagttttgttgtgtaattaataaaacagttaccataaaatatattatcttttatatggtcagtcattcactaactgaaaattcttggagaatttcaattcttgaatcaatgcgctttgttaaatagaagatatgacaaaagatttaagttcaatatgaaaaaaagtaaaggaaaatttacatcctatattaatttttgtacaaaagtcatttttttacaaaaataatgttatgcagtattttttacttttttactatatttttttttataaattttatactgcagtatactgtgttaagttttcactggtgttctactagtatttttatattgttctactgttattttgagttactctgctttgtattttactggtgttttataaaaatactatttttgaaaaaaaaattcgtttgacagtatttttataaaaattaacttaaatttcaatatttttataagtttccaaaagaaaataattggaataaggtcttaatgaaaaaaaaagggtaactaataatgtattttaccataattaatacattcttaaataaggatatttagagacaataatagtaataactctaaatttgatttacttatcaacttgacccatatattgtataacatttcataccctatggaagaggtttcaatggttacatttttattgt

SEQ ID NO: 112064 - DNA, 2725 bp, Cannabis sativa
agcttttattgctttagtagtttatttcattagtatgttataagaaaagcctgataggaagcatgttagtagccttatgattgaataagcacatgttttagtttctaaaataagtggtgattaataaattattcttgaccgcgatctgacaaggctagttcttggttttgcgggctatgtctagtgacgttcagggagtttagtttccctcgtatagacgtggctgagacagaggtccaagaggcagagcacgcagtttgggagatgtcaacccaccgcaggttgccaaggatttggacaacaggtttgcagctataaaagctagaattaatgaacaagacgaggagattagaagtctgaggcaggcagggtcggttgttgttaagaattggatggaaccactgtatagaaggttccgcaagcagacacctctagtctttttgggaggaccagacgtcatgagaactgagtagtggctgtctatcattatacggattctgaattttataagagtcattggcaacgacagagtggcttgtgccacattccaattccaggaggatccatggtctggtgggatatggtggctttgacttgggatgtcactaccactacctgggaagagttccagtaatttttctatgcagagtattacaacgagacagtcggaagtgcaaagagaatatgactattattgagtatacaactcaattcgataggttgactaggttggcctcaggaattatgccaactaactttagtaagaaagagaagtatctagatggactgaaccctaagattaaacatgaccttatgatcaccaccgatgataatatcacgactttacaaggcttgggtttgtgttccgagcaatggtgagctcaggaaaaaaaatgcttgatgagactcatactacaccttactcattgcacccgcgtactgacaaaatgtactaggattttaaaccctactattagtgctgcagaatgaagagagatgtaatagaatacgtgtccaagtgcttaacatgtcaattgatgaatgcagaacatcagaaactggcagggttactacaaccattaacgcttcctgagtggaagtgggaggattttacaatggactttgtagttagtttacctagaaccacaggaatgtatgattcagtttgggtcatagtggatcgtgtcacaaagtcagtacactttttgccagtaaagaaaaattacacaatggaccaatatgtcgagttgtacgtaaaagagatagtacatcttcatggagcactgaaatccatcgtttcggacagtggatccaaaatttacatcaaagttttgggtgagtctttagagggatatgagtacaaagctgatgtttagcacaccttttcaccctcaaactgatggacaattctaaaggacaatacagatgcaagaagatttattgcaagcctgttttatggactttgagtgatcctagagtaagtacttgcctttgatataattttcttataacaacaactattcagagtacaatagggatggctccctatgagatgttgtatggtagaaaatgttgctcctcaattcattgggatgagaccggggaaagaaaatatctaggtcctgagttagttcagaggaccaatgaggtaataaacaagatcaaggtttggatgcctgcttcgaaaagtaggcaaaaaagttgttctgatcctaagcgtagagacattgaattttaggttggagaacatgttttccagcgagtttcaccaatgaagggtgtaaagcgctttgggaagaggggaaagttaaggcttagatccattgggccattcgagatgctttagaaggtcgggcaggtagcatattggctagccttaccactagtgctatcgactgtacataatgtattccatattttgatgttaaggaaatatgtatcaaagctgactcatgtcttgagttacgaagccctgaaactacatccaaatttttcctataaggaataaccagttcaaatccttgataggaaggaaaaggttctttagaacaagatcatagcattggtcaaagtactctagaggaagagcaaggtggaggaagccacatgtgaactagagtctggcatgaggactcaacatccaaagttgttcaagttagattttgaagacaaaattattttaacgggaggataattataatgaccgcatgattagattatggattagtaggaaaattagcattaattattgataatttatgttatgcatgattgtatttgttgtgggttctatttctaaaaaatgggcattaaagttataatttctcaactatggagatcttattactctatgtgtattagtaatgccatatgtgaaatttacattttttatgatttttgctctataacgataaaaaatgcgacagatgatcgttagagtccacgagtgagtttagagcgtttgttttagcggagtattcataaatgatattgggaatatcaaggttaggcggggttgtggtattgaaccattttacccctaaacctaagggttacttaagtgtgagcaagtggaaaaaatggaatttttttcaagagatttatgttgtctttagtgttttggttttattctgattattagttaagtttttaatttattcattgtaaaataaacttagaaaattaagaaaattaaaccattatccattctctctctctctctctc

SEQ ID NO: 112065 - DNA, 2345 bp, Cannabis sativa
attgaatagtcacccatataaattaacaaaagtaatagcaacaaattatatctcgaaggtggtgctaaaatctcatctcgaaggccttgcacaacttgatcaaacaattaaataaagtaaaagaagattcgatggcaaatcaaattgatttatcatgattatcatttaacattgtttatatttatgtgattacaaattatgcgcctttcatgggattattagcataccaaaactaaaacatatatacatatattatataattaattaataaatagtttgagcaaaaaccaaagcaaatatacataattaatatattgtttgtgagctcatggaagacgcacaaattgggacataaacataaatcaaaacaaaagtatataatatagcaatatagattatatatatggtattactttataattccactactaaattatgaattataacattaataatgatgttattgttaattattatagagttgagagagacatctcctcatcatgattcgtgatgcatttcatgtagtccttcttttgtttaattattgtcattataatattaaaaatttcaaagccaccgtatcatcatcatcatcttcgtcataatataaaatcattatataaaaacacactataaaatgctatatatatacataatattatcagtcttaatatatataacacaaaacaagagtaaagagaagaaaataaaaaaatggaagtctcaactttgaagccaataatcaaagtagcagcattgtgtggttctcttcgtaaaggctcctataactatggacttattagttctggtaattagctagtactaattaataatttttattttcttctctctattatatattattaatattatgaactaattaataataataaataatataattcattgtaaattttctttttttgtagcgattgaaatgagcaaggagtcaatattcaaagggttattagagatagagtacatagacatctcgccattgccaatgctcaatactgatctcgaggtcaatgggacttttccgcccgccgtccaagctttccgccggaaaattcttgaagctgatagttacatctttgcctcgccggagtacaacttctccgtcaccggtgtgtatactccatctcttaattaactttgttttattattaaaagaaagtatgaaaattatgtttttcttttgaacaatattgctataggcaacaatgtgtcttataattggttatatgatctttaaataaaatatatgatacttaatattgaattattaacaatattatatatgataaggatattaagcactatcagagaacagggttctttttgtcgtttcaaaaattatgattttttttattattattttgtatataatgttatattatttcaatgcaaaaaggatttattgaaagtggcatgaataactcccctttaaaaaattatattattaaaaaaaacacttataaatgtaaaaaaaataaaaaaaataaaaaataaaaaaaaaaactcataacttcttaacattatttatctatgccataaaaaggtaaaatcttatcattttttcatacatataatgtaatttctactaaaatttgacaaaatttccaacaaaaaaaaaatgaagtttttcactaaataattctttttgatttagcttgtgatgttaaatttcatgtacaaattttattattggagattctaaaacaccagcattggtttcaatctttctagctagccatgttatttataaatacacttattgtgttccatatccatatgatatactatatagcacctctgaagaatgcaatggattgggcatctaggccaccaaatgtatggggtgacaaagctgcagccattgtgagcgccggaggccaatgggggggcggccgatcgcattatcatcttcgccaaattggagttttccttgatattcacttcatcaacaaacctgagttttacttggatgcattaacacctcctcagccatttgatagtgatggaaatttgattgatgaaccctccaaagagaggttgaagcaagttcttctttctcttcaatcatttactttgcgtctcaaagcaaaatgaatatgaagccttattaataattaattgctgtgaaattatgaaactagtttgtcacttttaagttactatttgatttcacaacattttctcttatatttgtactattttgatatatatgctattaatatgaaaatactctgtttattattttcaatagcaaagaaagggtaaataccattttggaccctgtgttttacaaaagttaccaattggaccttgtgttttgttaa

SEQ ID NO: 112066 - DNA, 5486 bp, Cannabis sativa
  modified_base (5219)..(5221): a, c, t, g, unknown or other
tctcgctctctctctctctctctaacttctatctctactgtgttgtttctctctacttcttgtctttattctttttctactctctcttactatatccttgtgaaataagataagtagttctctttatataggccaaaagacccaatatgcaagctattaagttagttaaagactaactaatcgaatgtaaattgggggcttaaaaaataatactacagtctataataatgtgtattattttattaatatatattctatagtttataaaagaaagttaaagtgaatttagataaaaatttctattgttcttcattttattttaaaaaaattgtaaaatttcatattttgtcctaataaaaatttatttttgaaaatatctcacatatataaaaaataatttttattctgttgttccttttattattctcaaaattactattttttttatcctgtgtttgatctattttctaattaaaaagattttcagataagtattttaagagactatttattttaacgatagtattagattaattttttttaatttttttttttcacatctagcaaaataattttttttttgaagtatcatagttctaattttgtattatatcaataattcaattaaaatattaaaaaatattaccgtaaaagattagttccctatatttgaaatttattaaaaaaaaattggaagaaaaatatgttaattattcttttgtttttaaagtacaggaattaattctgaaaaataatgaaaaaaaaaggaaagaattaattaaagaaaattcaaaaaattttaaagacactctattctaataatatttattttatatcttttcaaaagaaaaaaaaattgattttatataaaatttatattttaattatattaagtttttttttaacttttttctttcagtttatattcttagaaaatatatttattgaacaaaaataaattatattttaaacattatgataaaaatcaaaaaaaaaattatatgaattttttttttaaaaaaaatatatacataagtgaggaaaaattatgaaaataaaagcaaaataagaattaaaattaaataaaattacctcatatattattttttttttcaaatttacggtttggatttttaaagtggtttctccggtagtttttatgtggattgttatacgatttttagttgtcatttaagttgctccattagttgcaatatgagtttctacgtaaaattccgtaaaaatgtaaaaaaaaaaaattgttttgaaaagtaaaaataaaaaagctcctaaaattaatataaaatagtgtgaggaaaaaattaaaaaatattaatattaatttttaaaattatttaattttatattttttttaattataaagtgtatttataattttaggtgagaaaaactccttaagggtataaacgagtctttggtgaagggtttataagaaaaagtaaaatagtgataatggctgaggcagaatcaggatgtagcctcaggacctcaagatggtctctcaagggagccaacgcacttgtaactggtggcactcgcggaatcgggtaccttatttcctctgattcctattaattttcttgaacgcttccatggcatgccatttcctaatcttgatgaaactttaaaagaaaaaaaaaacacagaagttagccttttgttcgattaagtttgttttgttttatctctttccgagttcaggcgtgccgttgtggaggaactagctggttttggtgcggcggttcacacgtgttctcggaatggagcggagctcgccaagtgtttgaaggaatgggagagcaagggattttcggtatctgggtcagtttgtgatgcttctgtgaaaacccaaagggagaaattgatacacgaagtggcttcagtttttaatggcaagcttaatattctcgtaagtacaatgtgtcatggaagtttcaatttagtggattcaaacttctattttattggtacacaatattagatttgagtatatttagtacatatgacatttacttatgatagtgattgttatttgtgtgtatcattgctattgacatttacataatgatttatggattatttctctttctcgtataattacttgaattatagtgtcactcttagcacaaacttaagattaatgctcattggaatcaaatggttggatatccatgaaagagtaaaaggtatgatcccctcagtctttgaagcagctgcatcagtacacccagagatgcatagtccaaattgaagggccatttatggcgtggatgtcatgcttgacagttcttaccgacccaagttattggaggttacatgctgtctcgactgtacaagagcatgcaactatgatacagaggctatagtcggagggggaggagtaattagaggtcgtgacattttcaacatcgtctttggttgtcttttcttgaacgaaaccgttcacgttaggccaatttagttgagccataagaaaaccttttgatatgtaatgattggtgtgcaagtctgttggatattgtggaatgattttttattgaggggtggggaggttggggtcaaatgatctggttatactggaaggcgtgaacgacaaatttttggtcaatttaaaagaagaaaaaagaaaatgcccgttgggatttgttgaggcttttgagtctttagggtcttaataaattggagagttggattctaaagtctcttttcaattcataacttttctttgggcacaggtgaacaatgtgggaacaaacatgagaaagcctactattgagtacacatctgaggagtattcatttgtccttggtactaaccttgactccgtgtaccacctttgtcaactttctcatcctcttttgaaagcatctggagtaggaaatgttgtgttcatttcctctgttgctggtttggttgatataggtagtggaactgtatatgcggcaagcaaaggtgagtagttgttctgatatgatgctattttttcttttgcattaccatttgaaaataatctcatcagctgctcatctcatggcatttaccttcttagatattttcagctgcatttaactagctttatctttctcaatattttcagcggcattaaatcagctaactaaaaatctagcttgtgaatgggctaaagacaacattagaaccaactgtgttgcaccttggtacaccaaaacctcgcttgtagaggatgtaagatgttttctctttactttaatcatctaaatgctttctggggctgttttgaaattcgattgtaagctgggagattctgtattttacctctttatttgttttctgaacgttatccaattggtgtttacttttttcctccattacagttgcttaaaaacaaggaattcttggaagaggtaaccgatcgaactcctctacaccgtgttgcagaacctgaggaggtctcctcactggtagcattcctctgcttacctgcagcttcatacatcactggacaggttatttctgttgatggagggttcactgcaaatggatttacacccaaaaaaagacctttttaaccaagaattattcatgataacattaaccttcgtttcttatttacgtggcggctattgttgtgccaatcatgtcttcatcttaaactttattatcagttatacgttatctgtaatattttcttcagtagttgtaagtttttttcttaatacatctcgggaaaccgaagtttggtttgatcaagcttgcagaaaaaataaatcaaaaaataataattagaaagtttatttcaatgaaatttgatgtccttgtaatgttaggtctcaatttcctgccagattcaataaaaataatcacgtgttgtggaaaatttttatttaaaaaaataataatgaatgcgcgaagaccgtgaaagagaggcaatgttagaccttgttattgcccctgacaatagggcgtgttcataaaaatactcaatttaatacgggtgattttatctaattcaatttgtatattcaaaattgtgttgattaaattagattgaaaaatttaaaatttgtcgtggtgtagatttgatgttgttgtttacaatttctctcaaaatatgtgacaattcaagagtaagccatgtggcgttatgatccacgagtgcaagacgcatcaccttgattactttcgaagtagagtaatgacaaactggtcatctccgcgagtatctagctagaccacgagcatccctcatcggatcttctctgtgagtatctagtagagtagtgcaagttgatgtcactcaaggaccaagatattgttgggctctgtgccctaaataaaactctattttaacgtaatctttgtcattcaattatcaataaagaaacataaatattttcattacttatttagtatgtcatttggggcacttcccacaggacgaggaggagcaaagtacgccgtggtggctgtcgacttctttacaaaatggacggaggctgaacctctagtttccataacctgcaaaaaagttctcgactttgtagtaaaaaacataatttgtaggtttggaatactcatgaaaaagcatgaaaaaaaaaatgcatttggtgcggatggtatgcaatgcataccatccgcgcgcgcatgcaggggcggctgactgaggattgccgcacaatcatgctggatgcagcattttcgcacgcggatctaggcttcagacacggccgtgagcgtgtttcttcgaacaagcgttgtccgaacacgcgtgctaacagagtgacactcggtgtccgcgcgcgtgtgtaggtgaccatttcctgatttttttcgatttttcaaaaaatcataactaattcaaataaaatcaaagttaagttttgtaagaaagtgaattgcttaattttttttccatactatccaacaaaaataattccaaaatgaaattttaattattttatgtaaaaattttacaaacatgaatcaatcatcaataaacacatagattaacatgaatcacatccaaaacatacatacatcattttaaatgcgtatttcttgaaagcaaatcattgtcatggttctgaggctagttgttggaatatattttactaggacctacatttactaacaagtatatttttaaaatcctaaatataaacttctaaaatgatattaaataaacacataaaagatatgagaaaccttacattggttgnnncggaattaaatgactcattctgcttagatctctaaccctcgtatcctttctatagcagagtataatcaagatctgagtccgatactccttcagttgtttggattcattgagactaacttgctatgggtaggcatgcactcaatcactaaggcttgaaatttaatggtgaagaacattacatgattcgaattagaagagagaaaagaagaagaagaagtctcaaactctctagttgtcttacaataagaaaactaggtcaagagtc

SEQ ID NO: 112067 - DNA, 3974 bp, Cannabis sativa
ttataggcgacggttttaaaccgtcgcctattgtatagggcacgatttaaaatcatcgcctatactgtgttataggcgacggttttaaaccgtccagaagtccacattagtgacgattttaaatcgtcgcctattttgcccgttttacgacggttgtataggcgacggttatagaaaccgacggaaatactttaaatgactgtttaaaaatatcgagaaaaactatttttgtagtagtgagtcaattcttttagagtgctggagatcacccagggctcattttggtttcctccgtcctcattggagctaattaccaatcttggaaacatgctatttcaatatatttttcgtccccaagctcgagatcccctccatggatcctggtttcgttgcaacaatatgttcatgtcttggctcctcaatgttgtttcccctgtaatttctcaaagtattatgttctacgatatggccactgacatgtagaatgatctttccgatcgtttcaatcaagcaaatggtccacgaatatttgaattacagaccgatctcacccatctgcaacaaggagaccttgatatatagtcttacttcaccaaattaaagacctactaggatgagctaaaagaatctcaacccgtcgctacttgtacctgtggtgcgatgaagactctactcgcttactataatcagaaccaagtcctccaattcttgacttgacttaacgattcttttattgcggtaaggactcgtatcctcttaatggagcctttaccttcattatttcaagttttttctatgattgtccaagatgaatgccaaaggagtatcgattcttccctaccaattgcttttgttgcacatccaacaggaccaacaccgctatctaacaatccctctcaatccaagaagccaagaccttcttgcacctactgcaaaaaacctggtcattacattcacaatttctatttccttcatggatttccactcgattatggtgacaataaaaaatatgacaaaggaaaggtctttccaaataaaagttcctcttcataagaagcccctgatgatcccttttcatcatctaatctcaccaatccatgttaataactaatttctttaatgagccaacagctccaacagaatgcaacacacaataatccctctactcttggtcctggaacatcgaatatatctggaaaatcttcccaaatctttccttttattgggttgtcgacagtggcgttactcaccacatatacttcaataaagattgtttttaagattttactaactccaaattttcgaaatatgttgctatggtcataaagttttagtcactaacattggcaatgtataaattaattcttttatcactttgcacaatgttctatatgtataacagctcaaattcaatcttttttcaatacacgctcatctcactaatacaactaatcaaattttttcactccaacttcttgtatttttcaggaacctttctagaataaggagattgggatcgctaggaaatacaccaatttgtacttcctccaacaatctctttccaattatgaatgtaataaattagctcaagcatgtactgtcttagataactcagactaattgcatttcttcctaggtcacccatctttgtacatttctaaaaaaattcaataaagagcttgaattttttattttagacaacttgcattctcattgttttatatgtcacttagcaaaacaaaaaaaaatttgtcttttattttcaacaacaattttgtagcatctacctttgaattaattcactaagacatatggggttgcttcaccccataagcattgatgagtatgataagtctcgttacacttggacaaaccttctcaaagctaaatctgatgtccaactcattatacaaattttttcatgctggtttgcactcagttctcagccaatatcaaagttgttcaaacagataatgccatggagttaatgtttcttctttttacgcgtctaagggtgtgttctccattattattcatgtgttgagcaccgccaacaaaattcagtcattgaacgtaaatatcaacacctatttaacattgctagagcacttatatttcaatttcatgcccctatatgctactgatcctatctcctacccataaccacttacctcatcaatcgcatttcctctgccactctcaaaggtcaaattttgtttgcgattatccatggaaaaaaaatctcctacgaccatttgcatatttttggatgcttggcatatgtctccacataatctcagtgccacaaattctctcctagaagtcagactttcatattcattgactaccccgatggaatgaaggcttacaccttattggatattcaaagcaaccaaatctatcattctggagatgttttatttcataaaaagattttcccattcaagaacaatatctctaccatttttgtgaatttcttcgataatcatattatccctacccacaagcctttatccccctagcctacttcaacaacacctatgatacaccccaattctactatcatcaaaagatttggtagaatatccacaaaaccaatatgatttaatgacttcatatgtcatttatctgctggcccatctaccatagacaaccccatcaactctcaccttgattattcaaaacttcccactaatttcatagcaactttcctttctgccaattcaatagtagaacctacatcatataaattgcatcccaggatcctaaaaggaataattcaatagataatgaatttcatgctttagttaaaactaaaacattaattctcacaatccttccctctacccataaatttataggatgcaagtgggtttatacaataaaatacaaatctaatggggaagtttagtaatataaatcacacttagtagtcaaagactacacccaacaacatagagttgactacatataaacttatgccttatggaaaaattaaacactataaaaatcatgttggcacttcctgccattaacaactagagcctccattaaatggacataaataatgtattcctccatgatgatctccatgaagaggtttacgtaaaattttcacctggatacaagcatgatacttcacttcttctttatttagtgtgaaaattacagaaaatcctatatgtcctcaaacatgcctctcaacaatggtacaaaaaattaagctctactcttcttaaagatgggttcacacaatccccctcagacaattctctttttatcaagaaacatcctaccatgtttcttgctcttctagtgtacgttgatgacattattgttcctagcaacaatgataaagccattaatgcatttaaaaccacagtagacaataaattcaaacttaaagatataggattactttgattcttccttggtctagagattttcagtgactctagtggtatatcgatttcttaatgaccattcaccatccaattactcaatgaaactggttttcttgactcaaaaccaacctccacttctatggaaccaaatcataaattgagtaaagactttggcgatattcttcctaaccctacttcgtatcccatccttattggccagctcatttattttagtattacgcagcatggtatatgccctaaatagactaagtcaataccttacctcacctcaagtacctcatctccaagctactagggttgttcaaaaaatgaaaaagtcgcccaactccaataaatttcctaaaccaaaccgaataaaccgacaaaaaatacaactcgaataactttaaaaaaaaaattcaaaccgcccaaatgaatatatttggtgggtttaatattatattaacccgcctaaataacccaaataaaccgaataaaccgatttacatatttttcactaatattatttataacataatatataaattacgtttaatagttaaactattt

SEQ ID NO: 112068 - DNA, 7276 bp, Cannabis sativa
  modified_base (569)..(577): a, c, t, g, unknown or other
aaggagaatagcgaggcaccggagaaaagtaacacataccttaactacaataagcaaattaagtgtcaaagtcggattggctcgaagaacaagaatgtgagatgacaatctcgctacgaggaagcttcatattgttccatccaactaacaggagcgaggctcgtaacccttgcaagtcagaagatttgtgcatacccacgatcgatgcaaaacatatcttgtcaacctcggaaagaagaatggtaccagctcgccattgggatcacttcagtttggtttttgtcgagacatctccagattcaacaattaaagacgtgtttagtacacgatatttctaacctagtaaaagctggaaaatcacagctaaatgattttcaaaatgatgcaccgcatttagatttcatgatatgtaatcagctcccacgatttaaggaataatgactgtaattacattttggtcagccttgtaattaactaccactatgcaattataaatagtggcaaacaatctcaaaaaagggacaaaaaactcttatacgagagaggccctaaaaaaatactcagaaatnnnnnnnnnattgactcgtggactatgtagaattttaactgcaaaacctcgtaaaaaaacccaatgttcatattttatttttctatagcttttatattttctgtgttgaatcataatcgtgaggctcaaaataggttcacaaaaatctacgttaatatgtgagaaaagccaattttatagtagtgaaatgatgagatgttgtaagattataagtgtttttcaacaccctgagactctaagaacttttctttagcatcatttgtaggttcggagtaccaaaagaaattttgacagacagcggatcctacttcattaacaatgacttcaaggatttttgcaagaggtggggtattcaactaaatttctacacctcaagataccctcaagctaatgttcaagttgaatctacaaacaagaccatcattggaatgctcaagaaaagattagaaaaatccaaagggagatgggcagatgagcttccaggagtcctttggtcttaccgaacaatcacaagaacatcgactagataaacaactttctccctaacctatagagaaaaagcgatattccagtcgaacaagacctcccaacagcttgatgcctacatgcaatagaggaccacagcgataggcagctgtgccataaccttgattaattgatgaatataaagattaaacactgataagagtagcagcctaccaacagaagattgcaaaacacttcaataaatatataaagactaggaatttcaaagaaggagattgagtccttcgcaaaatcttccaaaacactcaagaacctggcaccggtaaacttggaccaacttaagaaggttagtaccaaataaccaaggtcataggacgaggggcgtacatactccaagccaaagaaggacgaatcataagtaatagttagaatgcagtccaccttaaatagtatcacttatgatctttttctctcaattatttactttatttaatttcagttattaagtctcagatcagtacacttagaagcttacaatttctcatcctttcactactataaaattagcttttcccacaatttagggagtggtgtgggtggagaatggtgcacgtgaccagctaaccctaaacctttgcatattgattttgatatgtcttcgtaagacggggtcttttatctggctagatcataacgatagccagctgtgtcataaccttaacttaatcgatgaacataaagatcaaacactaataagagtagcagcctaccaacagaagattgcaaaatacttcaacaaaagcataaggactaggaatttcaaagaaggatattaggtcctctgctgagttttccaaaacattaaagagtcaggcaccagtaaacttggaccaacttgggaaggtccataccagataaccaaggtcatatgacgaggggcgtacaaactccaagaccaatatggacgaaccataagtaatagttagaatgcaatccacctcaaatagtatcacttctgatctttttctctcaattatttactttattcaatttctgttattaagtgtaggatcagtacacttagaagcttacaacatctcatcctttcactactacaaaattggcttttcccacaatttaaggagtggtgtgggtggagaatggtgcacatgaccagctaaccctgaatccttgcatattgattctgatatgtcttcgtaagatggggtcttttatctgactggaccactacgacaaccagtagtgccataaccttgacttaatcgatgaacataaagatcaagcattattaagaataacaacctaaccattatgtcttcgtaagatgggctcttttatctggctggatcacaacgactgccatctgtgccataaccttaacttaattgattaacatagagatcaagcactgataagagtagcagcctaccaacagaagattgcaaaacacttcaataaaaatagaaggactaggaatttcaaagaaggagattaggacctctgtagagtattccaaaacactcaagagcgaggcaccgctaaacttggaccaacttgagaaagtccgtaccaaataaccaaggtcataggatgaaaggcgtacaaactccaagcccaaccataagtaatagttggaatgcaatccacctcaaatagtatcacttctgatctttttctttaaattatttactttattcaatttaagttattaagtgtagcatcagtacacttagaagttacaacatctcatcctttcactactacaaaattggcttttctcacaacttagggagtggagtgggtgtagaatggtgcacatgaccaactaaccctaaacccttgtataatgattctgatatgtctttgtaagatggggtcttttatctggctggaccacaacgatagtcagttgagccataacccagggtcggcccaagggtggagcaactggggcctaggccctaagccccaggtcccataattttgggggcccaaaattgaaaattggtatataatgtgtagaaaatatataatatatacaaatgtacgctaatgtatgcaagaaaatatagcagcacaattggtaatgcattggatgaattccttgggattcatgagatcgacattgaccgatgccaaagtcaatttttaaagtttttaatagtttatatattaataatatataatagttaggaatttgttttattatttggctggaccacaatgacagccaggcataaccttgacttaattgatgaacatagagatcaagcactgataagagtagcaacctaccaatagaagattgcaaaacactttaacaaaaacataagaactaggaattctgaagaaggagattgggtcctctacagagtctttcaaaaacatgatgtcagatgatgtagcttgtttagtggtaggttggtaggtgtgattgtcatttgtgaatattattcacgtgtgaatattattcaagactatttcttcacgtggtaggttggtaggtagtgttagaaaattagtcatgtgaaataaatgcaatatatattatctattatcttgtttaagctgcgggtcgggttgggttcaacgggctacaatttagccaacccattttcgacccaatacatgtaggttattaaaattttaacctaaactaatttcgcccccactttttattgggctgttcgacccatatcgggttgggttgggcgggttggtcggcccaaccctataaatgtccagccctagtgaccaactaaccctaaactcttgtatattgaatctgatatgtcttcgtaagatggggtctttattctggctggaccataacgatagccagttgtgcataacccagggtcgacctaagggtagggcaattggggcctagaccctaggccccataattttgggggcccaaaattgaaaattaatatataatgtatagaaaatatgtaatatatataaatgtaccctgatatatgcaagaaaatatagcaacacaattggtaatacattggatgatttccttggggttcatgagatcgacactcaccgaggtcaaagtcaatttttaatgtttttaatggtttatgtattaataatatataatggttagaaatttattttatattgtggtatggagaatggtgcacgtgaccaactaaccctaaacccttgcatattgattctgatatgtcttcataaaatggggtgtttattttgtaaattaatgtaccactgtagggttgggccgacaaggctagacccaaaccctttacaatcatcttggcatatttttctttaacagtcaggccctttttggctttctcagtaacttcattaaaactctgttttagagattcaatccttgagtttttctcttagatttcagtttgaaggtcattggcttgaattttgagcttgtcattctccgcaacgacagaatccattttagatgctaaagcttcgtatgtcttaagggcttcattaagttagagggtaagccaagtagtattctactagtgagattagaagccaaggcatgccattagagtcccctaggtggaaaagaaagaaggactaaaaaaaagaggagaaaagaatttttttttacttcaaagtggagagggaaaactttcaaattacaccagatcttcgcttcggttgaggaggtcagaagatgagtcgtagttgataagctcccagtcgtccttcacatagtttcaggagtaatgacttgctcaggtaatgaaaccagaacaagcctttgctttagaaactcctgcttcatggggaagaggaatgattggatcgagaagctgcacctcaagaaactcagggttaaaggtgaccttacgtggatcttgaaccacatgttttcctttatcaagggtcgagtcttcaactgcctttggcggagacgaggggacttcgacaatagaaactgtctcgatattgactagttttagaggaagaaaagatagcttattagtcttattcttttgtggaacctttggttgtttagatcctttagtagaagaagtttctcgcttttttcctctctttacagtaataatggggctattaagagctacttcaagatccatttttgtaaaggtaaaacaggaaataattaaagtctgaaaagcgaggataactataaagttgcgagaccaaaactcccacctaaataacttttagaagagctaggagagggggattgctataatagttactaaattctctagaccagttatcataaaaaggtcaaaggaattaagcggagacaagtccaaatcccaactagcagccctatgagtatttgtactatattggtcagcaattccatagtaagaactgttgttagtcaactaaacatgaaactttgaatactaatcatgggacagaaaattgacacggttccagatgtagaagttatattggctatccctaaacttgaccaagcgattaggggttttttcgaggacggtaggggaccatccataaaaatgagatgaattacctcggggagccccttctggtgtcttggcggcttcccgagttatgaggttattcttatatcctgtttgaaatattttttgttcataatttgtcccccaatttatatatctcgcctctgtcactggccccatatagcaataattagtgcaattgactaggaagagtccatataatttcatttaaattataatataagaaacttttttttgaggagaaagtctcaaccaccaaacatctagagcaacgggcacttaataattcatcatgaattaccatacccaacctctctgcattgatttgtcaaattaagagcagcatcagtattcactttcaaaaaaccacgagggagaggagcccatttagaagtttgaagagcaaaacctaatctttcattagaagcgccatcccgaggaacagtcactctcggccgtgacgggggccagccaccacctgttgtttgttgtgaaaattcccaaggtagtctctagcccaaataacagtgagctcaggagtcaactcaatattgttatgggctttcctattacttcgaaaccaaattccccataaaattaccataaccaattcaagcatctctttggaaagggttgagatcaataaatctatgaacaaagttaagaaaatttacgcaatggctccttaggtcacccaacacaaacttacaaatcttcatacaatgtatcaaagaaagcactacaagaaatgtcacttttgccagcaaatttttgcgctggcaaaagtttggtattgttctggcaaaataaaatctacttttgatgtgttggcaaaaggggttggtattagaacttttaccggtgttaaatgaaaaatgctggcaaaaataagccagcacgtaaatacactggtaaaagttagatttttgtcactgcaaatgtgcgttggtaaaactttaacctttttgctagtggagtttgcgagatgcgctggtaaaagctactttcaccagtgcagtagcaaattgtgctggcaaaagtgacatttcttgtagtgaagacaatctcaaagagcatgatgagtagtttcctcttctaccccacataaaggacataaagcatcagataaaagaccatggcgagctaaatttactttagtaggaatccaattatggataatttgccatgcaaaaagtcttaccttaggaggatggttgagggaccaaatcttcctccaccatccaggaaaaccattagatggagaggcacgagtcaaagccaagttacgacgagccaaccaatagccactcttgatggtaaaccacttggaattctcaaagttgcaaataagtttgtcagaaacatcgttagtggaccaaggaataaagagaatagtctcagcttctttaacaagaaaattagaccgaataagctctttattccaacctccctaagcgtcacgaagcaaaaagaccttagccaacccatcaagtcgttgaggagttgacacaagacccggtggaactgaaggaatccagtagtcggagtagatattgatgtccaaatcattctcaacagtcaaactgcctcaaaatcaaagagtcactacaacaataatggtttataccaacgccactattaccaacgccaaaaagtcctcattaaaaatggtactatcaataacgacacttacctgtcgttggga

SEQ ID NO: 112069 - DNA, 5735 bp, Cannabis sativa
  modified_base (60)..(65): a, c, t, g, unknown or other
tagtaagagtgattataatataagtataaatactttttaatgataaataagcccccacannnnnnaaattctgggtccgtcactgagttagattgatatagtgtttctacttttgtatataaactcatgtaacatttacttaatcaattaagaactttctttctttctttctctgtttgcttttctctttctttgttctttcttcttcctctgatttcattttgcttcaatgccaaagaggatcaaacacctccaacatcttctaattcttttcctcacttaaattttgttttaaaagtcccagctataagtaaaatccgtattatttccaaacttactaatgtttatgttgaatttcaaaaatcttattgtaaagacaacaatttttttttttttgattaactcaagacaagcaacttactcatagtctattctattttattttgagttttatttttagattcgttttgtctgtactattaccacatgtactacgagtacgacaccgtactcactgaataatacagtgatatgaacgtaaaacagatcattaatttgatttaatatttcttttaattaagagatgctccactactccactgcccacgtgttagtaagcttttgtggctgttgcttgtcctagtgtttcgtcaaaacaagccatatttcattatcaagataaaatcagagacaccctaggccatatcccaattaaccagattcaaagaaatgacatttacgaatcatattatcttatcctttgaaatgtaccattttcaaaataaaaaggcatggcattcaattcagctattatattggttaccattagaaattaattactacaagaaacaatagcacatttcaaaaatagttcatgacccctagcagttttttttaagtgttattagaaattaattatctctcatttcaatatatggtgcatttttgtaacaaagttggacatggattaagttattttatacttgcgactaataatgagttaacaaagtacaaaaataatttgtcgtgtatcttaactaatgtacttaacgagttttatcaatgaacattagtcctttatcaaaaaaagaaaaaaaaaaattacatttacaaaaacagtcaatattacattgttgtctgaaatcattagttggggtcttatagcaaaaatggaaagtattcggttaggagagcggccataatgtaataatgattccaccaaaggtgaaaactttctgtggagggtgtgtaataaatggctacttgtgggagaagcctttttgtaaaaagtgtggatagaggtgaatctaacttgctgttggtatcgtaacaaaagagaataattttgatcgaaaacaaaagagatgtattgtgcatgttctttggggttttgcacattcctcacaggaaactggaaacttgctgatgacttgtgtgactgcttttcatcatatttatgatgactctattaacatttcttatgcaggtgcactctatgtgctcaactgagaaattgaccaagttcattatggtgccttgggtgatctggaataggaaaaataaaaggctgctgaattgtcatgttcaaacttacgaggatgttgtggaaggggactctatgctggatacaggattgctctaatattgctgctaaaccagttggtgctctgaaaagacatgaaccagattgtctccacatcttgcgggggtggtgttggtgaactgcgatgctgctattattaaggactcgtcggtcagtctgtggtttcagagttgtgatgcatgatgagagggggggaagtatcttagctgtggaatgaatctgtgtacaaggctggctgaggctatggcagttcggcatggttggagaaggttagaaagctgaacattaaagatttttggatcacttcagattgtgcgtagtatattaaatctgctctaaagaacaacattattaaagagatgggttgggcctagtgattgatgagataaatgatacaggactgctcagattttgctcttctatttttttactcatttagagaagctaacgtggtagcccatagtatctatacgtttgctttacaaaacaatgttttttgctcctcagttgcgattgttccatcgtgtgttctggttgtaattcttgcttgtttaatgaagttccagttttaaaaaatgatggtcaagtaagatgggaatacagtacagaagacattaatgattgtagaatgagagtgatatctgtctaatgcaacacacgtaattgccagattaactaaatcttggaccaagatacaccataactagatctagggacaatgctgataaaaacatgtacttacagaaacatgtattgttcaaacagtaattacacgaaacaaattagacaatttaatatatatccaaataagcacaatatactggttcttcttcatagattcaacaaaagcacaaacctttgcatcatcccagcaagtatttacctctaaacgtactagacaagattgattagccgtagcatcgaatgggatcattgcatcctttctctgtggattgtttgaaaccaaaacggcctccttttgcaaggtactgttgatggtactcttctgctcggtagaacctcttcgccggcaggatttcagtaacaatcttcctgctaaattgtttttgatacttttccagtgattcttttgctatcttctcttgttcaggagtgtagtagtatatcccagatctgtattgagttccaacatcattcccctgtttataaaaataacaagatgttattaagttggctataccatcgttgacatatgaggagtacttggggttgctgccaaaagaaataatctgataggactacgctccaatgaaccagtgacacaacaagaagatccacactctaggccttgaaatcgagaggtctgctatgtcatggccatttttcaatgctttttcccacataggactaacaaagagcatctccctatgatcttatgtattaactaaacatgcaatccaaggaaagcccataattttcaaagctaggcacctgtctaaccctactacatagaaaggacttgaacctcagattagtaaatcacatgcctcaccatttgagctagcctcgaaatgaatatgcaagtaacccaataattgaaatataaacagaaccaagatcagacaacacaaagaccacagaagagcatcatagaaaaatgatgaaagtaaacaatgaatctccagtagagttccagatgcacaagcacaaatttaaaggagaaatatcagtacacttaatggaaaactcacataacaattattccacacccaaaaaaaaaactccaattgagcaattctttttcatcaccttttaaccacgcttgatatgaatactcatagaggattactcagcaaataaacaagagagaataaaaaaagaacatttcccagaacatgggtcccgtggaaagtttaggcatgataatgagctcaaaatggatctataaaataattcaacatctcataattactccgtatgataaaactacagccacaaccccagtagtaaattacaataaagcaccgaaaaaaagttagaaacaacgtacagagatatgtaacagttgtgataacttcagcatgtgcaatttttatcatataaagttttcgcatttgtttataatggttggataatttagacagggagatccaaacaagacagtaggaaaagatagttataatgactttaacatataaacaactcgctgggtctcaaatgattatttttaaaagaaaacaggattgtctacatgatagaagaacaaatacaaaatagatgcggtttgagtccccaaatagataagggtatcgatgcatttgtagtatgtttgtgttcggggagtgaagatttaaattctcttcaatattccaaaacaaaggccaaacaaattaagcatcacatagatgatagaccaatacatatgcccgaataggaaaaacaaaaccaggataccaagaagtaggaagaaccatggataaacaattcacaatacgcagaagacagaaaacatggaaacaagacaccaagatgcaccaaatacatcaatcgaaagcagcaaatataaatttaatttaacaaaaatgaatcaagcatggaaagtcacagacccgaaatttcacacccacaaaagaatcaagcaaacacaagaattatcatcctatatccaagtaaagaatcaaattaacgattgcatacttagaacttagaagttagaatcattaccaaagttacaaattttttaacacccacaaaagagtctgagctgaatttcataattaaacaataaaaaaacaaaaatttgaatccaagaaacctcaattgcattcaatattctaaaatcaaaacctcacctgacgattcggcgtggtgggatcatgcctggcaaagaaagcatcaagcagagactcgtagctgcactctttaggatcgtactgaaccctaacgacctccgaatggtttgtcgtacctgtacagatatcctcataagtaggattgtgaagcaaaccctggctataacccacctcggtcttggaaacaccaggaactcgctggaaagccagctcgactccccagaaacagccggcaccgaactgggcaaactcctggcctggggcaggcacgtcctcatcgggaccctgggcgatggacgatgattcggaggaatattcaggggatttggaggcgaagccaagcttgttaagcaaattcatggtgatggaggaactggggagagaaaagggtcggtgagtttgggggaaggatgaaatgggttttgggcggaagttagagagagaaggaatgaagggtttagagagagaaaaagctccggtggtggagataagcataaatggggtggtagaggcggtggtggttgtcaaggccaagtttttgagcattttcttatgtggggatgacgtgttgcgtttttgatagttttgataggttgtgcttgtttcttgtttgaaactacttctttattattttatttatttttttaatacaaaaaaatgttttgtaatttaatttcattttgttttctgtcagtattaatattaggagaattgctattaggtaccagtagtgtctagcactttctcgacatatagcgttgcgattggctagatacttcctaaaaattattatattaaattatatggaactcgatacttagttggaccaatagcaatattaacacttaggagggtgctagataccactagtaccttttctatttttgttgattattgtaaaaattagtcgaaggttgacgtggcagagtcctattgggtataagcttactcggagtggtcccacttccagagtagattatgtttgcatggcaaatccaatggtcagcgtcgtacaaaggaaaagagtaatgtggagaaatgcataccatagtttttctatttgaacaaaaatgcataccataattttgaagttacacgttctacctagaaaattctattagggaccaccagaagtgattgcatatgtaaatttttaagtatagtttaggatgagaattataaggtttcattttatcattaactaagtaacaatgccgcgcttcgcgcaactcttcaaatatttttaaactatattattttttaaaatacgacaaactaaaaactaacaaaagaatcatcgtcaatctaaattaataatt

SEQ ID NO: 112070 - DNA, 4738 bp, Cannabis sativa
tatgaagaacaattgaacaaaaccatctcaagttctggtataatgtcacctagatacacataaaaattttacaaaaggccatcttgggcactgaaaaaattgtaaatttttgcactactttcattcaatgttggcaattggacctttaaaccagtaccttgctcttaacacccaagtagagacagtaataatgaacaaaccaccaactgcaactggtgtatagttgagtgtctctatggtaactgggtaggccacaggcaatgagaataggactgagatgattgccacccaaataactgcaatccaaccgacgacaacaccatatcgacccaagttaaaaggccctggaacgaaggatttgcgtgccaaagttaccctgaagaagatgggcaatgcataagctatgtatagtccaatcgtcgctatggataccattgcgttaaatgcaacaatgcttccaagagactgcaatgcaaacaagcaagaacaaagatatcattagcatttcgattacttttcgagacagtttggtatctccctagagcaatgttttactttaaataactcacacaaaattctgaatttataggttaggttaggtacacttaaacactcatttcagccactaagcacttgacaactcagtcttcgaaatcctaataaattatactatcgagtcaaacttgactccacttaagaactggttggtttggttcaaaaccatagtttgtatttcgtaattgttctaattctttcttttaagtaattattcatatgaagtcaatatcaaacatcaacattccatccaaaaccttcaccttattagagaatataaacagtcgggattgaccaaattattaacaccgaattcataaattacagattatatgaacacccctactaccatatatggatttcagttttgtataatataccataacttaacaaataaatgaaaataatgttgtgattaccgtgagagccatgcagaatgatataaaagcagaaagccaaactgcatttataggtacttcttgcttgttcactttatgccaaagtgaagaaaagggcatggctccatctctagagaatgcataagccatcctgagaatcaaagctaaatcaattacaaaacatatccctttgataagccaataagaaaagtttcaaaagactaagtaattttaccttgaattgctagtaactgagctcatgccacagaagaaaatggcaacagcaaccactcccaagcaaacaatccccccaaccccactaccatatctactcttgaatgcttggtaatatatttcagcaatggcataaccaccagcatcattgttttcatccaaaagggatggaatgttggtaacagcaaaagtgatgccaagtatgtaaccgaatccgacaatgatcgatatcccaatagaacttattattccttttggtccatttgtatcagcattcttggtttcttcagtctataaaacaaaattttgaaagttaaaattttttccactgaactatgacccttctagagttttgacctcttaattttttttgttgcgaaaatttccccgaactatacaagacttacaagttgtaactatccacattcagtttcaatttgctcatcttttaaaacaatttacttatatgaccacgaattacatgtatagttatagtatgatgatgtatttaacaattttaagctaccgaaaatcaagtttattaacattaaacatacaaacattagctctaagaatgcatatagacattttcataatttatcattagactgtaatttttgtttggattcttaaactaagttggattaacatcacgttagtaactgtaattgtaagagggtatttgcaacgatttatatagttcagagagaatttttacggccaaaaaaaattgtgaacaaagctctacaagaaacataattcaaggatgggggcatgtcctatttattcaacttaaaatgaaagcaatctaagtaagcatctgttggagtctaatatgaaagaaagtagcaaagaacacttaccatatgagcagatgcatcataaccagttaaggtatactgactcattagaagcccaagaacaaatatgtaaattgtgctgccaattccttccccattatcagtgttgaagtgagtgaaaacaaatttagcactagctctctcggtagcgacagagggaatcaagatcataagaacaaaaactcctaaaaaatcatgtgaagaagacttcagattcaagaaattataactggtcttaaacaacaaatagtaaaaatgtaagctttttcttaccaactatattccatgcagcagcaatttgcccaatgaaagataaccaagatatagaaagactgtttataaaagcatgtagaagcaaaattccaccatggaaagcaataactaagtatttagatgcctcatatcctccaccatttttcccacctgtgctaagaagaatgatcacttgaatcatctgagcaagggagtaatctacacttgctgtcactgcccactgcaataagaaaaaaccgaaaatttcggttactacaattttaagcactttctgtccataattttcttttctcagaagccaaaagtacctgaccaacaatgttgaacctgcaagcagtgaaaaaaaaccattcattctgtattagactgatttagctaaaagattgatttggtaacagttcatgattgtatttaagattatgttagaaacactcttctattatagtattcatttcaacttctttcaataataatccgatgaaaaagaaagaacaaacaaatgatttttctttttcaacagtttcgagaatggaaactgaaccttccatttggttttccccgaaaacaaacgaaatttcatttttcaaaacctcttacttatctctctattgttgctatatttgttgcttttagtcccaaaaagaccaagcaatagaatttaaagaaaaaacaaaccaaagaaatgatctgcaaaataaagattcacattcttttcaatgcagagcaccaaaccatagagcaagaattaggaattaaaagtcaaaaagtggatttgataaaataaaaccaaaatggtgattatttagtcaaaccaaagataattcattcaagccaaccccatatcaaccaattctaaaacaagttttagaattagtattaccaaacacaatattcaaataaagaaaaaaagagtgtccaaaaagaccaagcaatagaattaaaagaaagaccaaacaacaccctctatataggtgacgtcctacgattggtattccctaaaagttccctaaaagttattttcttaaattatatgagacttgatatttaattggaccaatcgcgatatgacaccgagactcttttagcatttctcaaccaaaaaattaggataagtgaagaaatgagctgcaaaatcaagattcatattctttgatgaagaaatacaaaattcagtcaagtcaagtgaaccccatatcaactaactccaaaacaaagagtttaattcaatacagcactttcccaataaccaaacacaaacttcaaatatagaaaaaagagtgtgagtaataaagaccatatgaaaagaaaggcattattagtattaccagccagttagccatgaagcaaaaggtgcccatttaggaccagcaagcttagcactccaatagtaaagaccaccagaagttggataagaagaacaaatctcagccattgataaaccaactaacatagtaaaagaaccagcaataaaccaaccataaataacagacactggtccaccaaatctcaacccattgttgtaaagagtggttacaccagtaagaactgatatgattgaaaatgaaaaagcaaaatttgaaagcatcctgcaaatcccagaagaaaaagaaaaaaacccttttcattttcaaacaaatttgactataaaagaagtaagaaaaccaagaacaatgaaaagggttttgagaaaatttacgaaagatcacgcttaagctcttgtttgtagccaagctcattgagacgagcatggccagaatccacatcatgagaagatggaagaacagatttttcactgaaagataccatctttcttcttttttctctttagttttgaagaaatttacacagaatgagatcaaagattgaagctttggttaagttcccaagaaaaaaaaaacaaaaatgaaattatacgtctctacaaaaaagtgacagctctgttgttgtgattggttggaactctatatagtcaactgatccagcggcttgcatctttgactttatttatttattattttcaattttttggggggatttttcattatgtttatatatattattattatttaattattgggtggtggagagagaggagaagaggttattgattggaaatgatttgatatgtctttgtgggaatctttggtcctaatttgatgatttctgttattaaagttatttaaggcagagagaatcactcttattcattttgactactttttcatttattattatgagattgcgtaactcaaaaaaaaaaatatatttgctccaaaacttatgatactttatctaataattttattagagtcttgtattaaatgtcaatttaaaaacaagtggtgatatattattgaatcacatattaaatacttaattattttggctaaatagtaattttcctccctgaactttgac

SEQ ID NO: 112071 - DNA, 2120 bp, Cannabis sativa
actagggttctggaaattcccccaacaggcagaccggttcccaaccggtatcccggttctgggtcaccaaggcgccggggccttggtgcttttgccagtaatgtttgaaaaacaaagcagacatccttgtttagtatgggaagcaccaaggcgccggggcttgacgggatgtttgctttgtttttcaaacattactggcaaactgtgggagacgacttttgcgaagctattttggacttctttaggttgggatacatgcataggggagtcaatgcgactaacttaattttaatcccaaagacccgtaacccgacaaaaccccaccactttagacccatctctttgtgcaatgtgacatataaggtcatctcgaagattatagcgaacagaatcaaacccttcctccccaatattatttgccccacccaatccgcctttgtgcctggtagggatatacaggacaacaacgtgattgtgcaagaaattatccacacctttaacaggaaatggggaaaggagggtttgttttccattaaaattgacccgacaaaagcctatgacaaacttagctggcaatttgtgacccatgtgttgaagtgctttggagttctggaaaaattttgcaattgggtttcccagtgtataacaaaaacctctcttaatgtctgcctgaatgggggccaggtgggtaggttatatccttcgtgcagtattcgtcagggtgacccccttatccccctacttgttcatttgggccgcagaaatcctttctagacttatccatgacgctttgagaagtggtaatatcaaaagaatcaaacttagttgaggtggacccaccatttctcacatcttctttgcggatgaccttatcctggttggtaaggctaacgttgaggaagccagacgcatgtggaattgtctcgaaaaattctgtgactggtcgggacaaagggtcaataagcttaaaacaactattttcttcagcaagaatactacggagcactcaaaagaggtgatcaaagtggctcttggtattgggagcccagtgagtaaccccaaatatttaagtcttcccctcttctgctctagaggcaaggatgcggattttaactttattgtggaaaacctggcgtccaaacttcatgggtgaaaagcgaaaactttatcaaaggtgggaagggccaccctcataaagtctgttggcttagcaatgcctgtgtacgctatgcaatccaccaagcttacaaaccgattgtgctcaagaattgatggtatggtgcgtgatttttggtggggttttgagaaaggaaatcatggtattcatttgagggcatgggacaagttgtgtctccctaaatctcggggcagcctcgggtttaggaaaacgaaggaaatgaaccaggccttcctcgctaaaaagggttggaaactgcttacaggatgtcaatccttgtgttgtagagttctcgaagctaaatacctcaagggtcagaatatcctcaaatgtaaagctaaaacttcagactcctgaatctggaagagtgtagtgaaggccaatgagattcttaggaaaagggcctgtaaagttatcacggatggtagggacacgaaaatatgggaagaccccctggattactcatggcatcgggttccacccacaattatctaataaccacgtgttccttactctactgtgtcagaactcctgacggaatcaagaaactgggatactacaaaattgaataacttgtttactcgtgagactgtggctgccattctgaaagggggtaacccgtcggcccaaggtaaagaccattggatttggacgaaggaaggatctggccagttctcttgcaaatcgacttatttaatccaggctcttcaatgctcccctcactgtgaggtttccccttctctgtggaataaactgtggaacagcaagatcttggaacgccacaaagtgatgtggtggagcatcctctcaaatgccctcctggttagggcaactttacttaaaagattttttatagaggacagtaagtgcccaatatgtggtgatgatgaagaatcaatcgagcacctgttcctccattgcaatctggctttccatttatggc

SEQ ID NO: 112072 - DNA, 10837 bp, Cannabis sativa
  modified_base (628)..(640): a, c, t, g, unknown or other
ttgaaaaaagtgtcatattttttttagtttaaaatgtattggtttaagaataaaatattaagattttttaagtatagaaaatcaaatttcctatagtatatttatgtatctactgtcacttgtttggtatcatatatagtggtttgtcatatacataatggtttgtgtcactgatgcaaggttgacccactcaacttgacaccactttttttcgtaatttttcactttttgttcaattttttgtaccattaattttgttgtccattagttagtacacgaaaatactacttaatagttacgagagtcatttgatttggtacatgttaaagttcaagaatataatataatatatgttaaaattcaagggcatgatttactatatgccaaatttcaggaacaaaaatactaattagcctaatctatttacaagaatattaacacatcaaaatatttgtttagagctctctcattttcctttcccaaaaccaattaggcaaagattagaattaattttgcataaataaactgtataactaggtacttattggaagacactacgagattaacttttaagaatcttggaattttgaaatgatattagttgcttaaaataataataataataatnnnnnnnnnnnnnataataataataataatgaatcaaagtatgaaaacaaattttaaattgtgtttaaaatcattccttcactatcaaaaaatctttggttcaatttttagtgctcttatttgttaactacaattattaaaaacaaggtttctatggaggcaattgctacatcaaaattttcaagtttcttaatttttagtatatttaattatttgtttgacattgattattgttcattatttttgacttagatgatcgagataatcttgatagtaattcaagattttaaaagaaactttagcacttgaaagttcccccaaaattaaataatctgctatagagattacttgcacttaccaataaaatcttagcttaattaaaacaaaaatgttcaagtggattttttgtgctcattttgtggattacactaaggtggtgtttggttaaagataatgaaatggaatgagcatttgtgttctatttgtagattatattaaagagtgtcatttaattgtagataatgaaatagaatggaaatgaattaatttttattacatttcattgtttggttgcattttaaagtattggaatatcatttcaatgaaatgactttcccaccatttgggtggaatgatattgtagcgctcccgcttcaagcctccattaggtcttctcctacgaatttatgactcttatacacgagtacatcactttagctgcttcctagattgataaatggtcctacaaaccaacaccagtgttcccagcatgctttgtcactcgcaagcttcttaagaagactttccatgaggttactcatcctgaaattagggctgcacacgggtagggttgggctgaccaacccgaaactgggctgaaaatgttttaaaaatattaggtcgaatagagatgggttaaaaaactgtgagtcgacttatatgggtcgaaattgggttgggccttatgtgacccatataactcaacccaacccgaattcttatgatcaataataaaaaaatataatacatatattacaattcctttccatcataaggaacattttaatgaataattccacttaacccaaacacattacactcaccaatattttaaaatgaaaccctaaaaaaatgatactctctctctgctccctcacttctctctctctctaaaactcaagatccagtgatccaccaccagcaacaaatcttgaccagccctaagcaagttgtcaaccaccccatttccaccatcccgcaccatcgaaccttgccaaccacgccacgagtcgctggcagccactgcacacgaatccactggcagacgaaaccattcttccactgcaccaattgtacgaactccttcctctaatcgcactgcgcaccagtcacaccaccagtcgaagccattctaatcaagtagtctctcactctctcttttctttcaatttcatatataatgaatgtattgtatatttgtggattaggattcattaatacctaaaccacgcaaaaaatttcatctttactttctattattttatttaatctctttattataatcagtttccaaaaataaacatacaaaaatacacttttaaagtttttaaattataaaaatatattttttttatgcaaaaaaagtaagaaaataattaaaaaatagtaagaattcaactttaggattacataaattaattataaataaactataaagcaatagtatgacagttataatactataaaataacaaaaaaaaaaaaatgcagcagaaatgatgctgcaagaagggagcaaggctgctggaaggtgccgaggcatggtgaggttaaaattaacgtggatgctggtgtgaaaaatggtgttggctgctcggtctgggctgtgtcatgagaggtgcgaatggcgaagtactctatgcttcggccactgttttgcccagggaacaatcaccattacaacttgagcttttggccattttatgggggatacaaactggaatgcagagacgaataccacggtttagcattgaatcggactgtttggaagctgttcaattaatccaaaaaaaggaagacagctgccgagatgttgattgcttgttagatcaaattagagttttgttgtctcatgattgtgtgattagtatctcctttgtattttgtcaggccaataaagttgctcatgtattagccaactatgctttggttcacaaagctagtgccatgtgaattgaggttaatgaaatccctttaaaaaaaaaataacaaaaaaaaataataatttattatttttaataaataaatatttttgtaaataaaaaataatactaaaaatttcttttctattttatttatttatctttatataatgtaactctcaaaaggaaatctaatcgaaagaaagaaatcaactccacaatgttcattgtttgacaaaatataaatgtcacacaaccaaataacatatcatatcatatggttcatgttctgatcaacacaacgcaaaaaaaaaaaaaaaagaaatccatagttctcttcgaaaaaaaaaacaaccaccaaacactagaattatttatacacagcatagatggacatgtaggtgtaggtgtaggcttagatggacggaaatcgccttaactcacaaggcttcagccaccggataatgcatcttagtatgcgagttcttcaaaaaggaagtcccgcaataggactttgagtctgggctaccaaccgtaaaatcatcaaaatcatcattagcatccaccaccctttcacgactatcaattgatttactataacaaccactagaatttccagaagatttaccgcggtggtgtttcttgtctttgccactgctcccacgagaactagaagagcttcccttctgccctttctttccgttgttcttccagttcttcttgctattcttcgacttgtgctgctgtttcttgtttcctgtgaatgtatgtgataaggatgtcggaattggatcgtacacctcaggggcccatgacacactaagcttcctcactgatgcaccccgtttctcacggctacctttcatggcagatacaagcttcaaagggctctggccataagaaaaatataaaaactaacatgtgagcatagatactaacaagtatttaacattcattgcattattaacacatgttctttctttatactcatcagttcaatatagttcagtgtaaatataaagccacaaacttccttagattttgacaaagcaagccaatcaacaactacagggaatatcaagtcaagaccaatcatagaaaagaaacagtacgactgagaagaaattcaaacgcattctgtcacaggcaaagttattgacccaattgtgaaaatttcttattcattatgctcatcagttcaagctagtatactatgcatataatgccacaaactcccttaactttagccaatgcaagagaaattcaaacacatctctcattagctcaagccaataccaactgaccaagcattttaagaaaaccaatacgactgaaaagaaattcaaactcatctctcattaggaatcacaggcaaagatattgtcacaaaagtaactccactatgaaaacaaagccataaccttctttaagttcaaactttgacaatgccacattctctcatggtatggtactagtaatagtaacttaattaaatacactcatagcatcaacaatattactaacatggattccttaaaatactctttatactagtactcgtgagttcaatctagttcattatggataaataaagccacaaacttcttaaggtttacagggaatatcaagtgaagactaagattaaaagaaaacagtacaaatccaagctcatttcgtaaagcacaaacatagatatcgccccccaaagtaatccaactaacaaaatttcttataatattctttatgctcatcagttgaagctagtttattgtggatgtaataaagctacaaacttccctaattagtgccaaagcaaagataatcaacaaaatcaaatacgactgagaataaattcaaactcatctttcatggtaaagtaactagactacgaaaacaaagccataaccttctttaagtttaaattaaaaactcacaggcaaagatattgaacgagagtaggcattccaggaagaatccttagagaaggatcctttcatagatgttccaagttccccatcctctctatgggggcatggtaaggatgaacatttgttcagtgacttctgagattgatttgcatactcaatctcattcacgttactaacatcatcaccatcatcaccatcatcatttccataagaagaatcttcaaagtcacattccaattgttccacttgttcattttccttaacatgtaaagtgagggaaattgcagtgtcaagttcattcaccaaatcatcgacactatcaaattcagtatagtaattttccttgattgaagattgcaaacttccaaagctggctacatcttgacaccactccgacttatcagaacaagagctaacttccatctacagacacagattctaccaagtccaaacaaacatacattaacaacacatatcaaatcaatgaatcgaaattcaaaagaaaattaaaaaacaaacctggaaatcgtattgatacggcgatccaagctttgtattaatcgtcaatcccaaagatcaaaaaataaaaacagaaacccagaaaccctagctaaaagctaagaggtaaacagataggtatagaggaaaagaaaagaaatccaaatcaaaatcaaagaacaaaaaaaaacctaatgttaactaagattaccacgacgatcgcttttttcaagatgtttcagacgatgagtacaagagccaccatgaaaggaagtgacacaaggaagcaaaggacgtctaatgggcaccgaaggcattatacgatgctcttcgaaacccactttccccttataaaccctaaaatttctacagattcaaaaaaaaaaacacacacaaacaacaaaacagctcgctgctaatagtttctgtcaccgaaatcaaacacaaaccaataaacgaatcagagattcagatcagtggagaatcatcctaaagatcggatcacagagagaaagaactgatacgaaacgaagaagaagaagaagatgaggttaaaggaataatgggaatgagtcagatattttgatttggataattgagtcattgacccatctataatggcggtcttcttatctcatctgaaccgtacacgtgtcctctgacaagacttaacattgggcctctttctagggctttccccaacaaaaaatgggcccaccaacaataatttcgcgcatttttttcaaaaataccatttttcttggtttgcaatttgttatttgcagaaatgaaattggtataaaattaaagacgaaaacgatgaatgaaccataaaatctgataatactttctcattgatttaaaatcagtcactatataaacaatatcatcatcatcaaaatcaaaaaagaactaaacaaagccttaatcatcatcatcatcgccattaacataaacaagatctcgaaaatctaagaactggtgaacttcgtaacagccttggttccttcagagacagcgtgtttggccaactcaccaggaagaaccaatcgaacagcggtctgaatctcccgagaagtgattgttggtttcttattgtacctcgccaaacgagacgattcctgagcaagcttctcgaaaatgtcattgatgaaggaattcataattcccatggcttttccagaaattcctatatcaggatgaacttgtttcagaactttgaataggtaaatcttgtaagtctccatgctcttcttgattttcttcttcttcttgtcacttgttccttcttttgagatcttcttctcgaccttagccgtcttctctgctgctactggcttcttctccgccgccggcctcttctcgcctttcgttggtgccattttcgaattcggagggtttctttcgatagaatcgaatcggagaagagagaaaggtaaagcaatgagagattgaatggtgaaatcagagttggggaaagaaactctttatatagaactaagtcgtattctgattggaggagaacttttgttgcggatcgatgacgtggtaagtcttttgtctgctggattgtattggacggctgtgattataccatttatagtactgaggctggttcgctcataatacaacggctaatcgagactttctaatttttattttttttgagaaaacaagagtatttttggaaataatatgccacacgtttgtaatacattctctttacatttctatttatttcaattcaacataagtggtatttgttattttttataagtcacgctttataaattttatttgttagtaatattttttaaaaattattttttttaaaattactgagactttatatttaattacactaataataatagtatgatatacataaaagttatagcaattctcatttcattttttttatagaaaaatgtaatattattattggtataatttaatatcagatcttatttagtttacttttataaaatattactattaggtagaggcagacccacattgtagcgagaggagacagtcgccctccttaaaaaaaaatcgtaaaaaaaatgtatattcattttagttagttacaacatatatataataaaagattatttttatagacataatagtagaattgatataatggtttaagtagattacatatatgctagaggtcgaaggttcaaatcccattaacaaggtccgttgtataagaatcaataattatttgcatattatcagctcagaaacacgtggcgacatatttttttagcttattaaatacttggtccaataatatgtcgccacatatttttgagttgacacttaacgaccaaaaaaaagtacgacaataaaaaaattgtaaaataaaatatttttgccgccactatttttaattaaggtcatatgtgtaacaattgtaaatgttaaaagagtttcactactaatatccctaatataatttataattttttacattttatatatatttaataaagattttatatgctttcaataaaaatattaaaatttaatatttttattgacttttttatatttttttcatgaaaaatgattaattttacccctaatacattagagtattattataaaagttaagtgaaatataatattattttttttttaagttaaatttaacttagatggtcttagttacaaggtcaccttattaaattagtaaggcccattagtataaaagaatattcaataagtgttggttattaaagatttgaactttaaagccttaaatctaaaagaaaaataacatagacaaataatgagaacaaacttcatctccacatttaggaaggctgcaccttacacaaccaaaataggacttgttgaattagaaaaaaggggagaaaaaaaagacttggttggaattccataaggattggaataggagtagttggtttctagtcactttcacaatttattcatatgttttcaaaataaaaaagaaatattgtatagtcaaacccttttattcaaagttcatttatgcaacttttgtttaaagtttcttagctttgtaacaatcaatggaagagaaacaaatggctttaacatatagcaacttttaatgtgaaaatattatgaccaaacaacttggccccaaagtgtgcatcattacatgagctgagatgagatgaagttccacatttccactcatatgaaactactgaaaagctcctttcgaaaactgaagctaccaacactcactcctctccagtcctctgaactaaactctgtaacaagaaacaaaatatctgttataataaacaaaaccccttctaaaaacaagaccaagaccaaactttgaaaatgaactttaggtatgtcattacacagcagatatgacccttgtagcttgattcaaacacagtaatcacaattcacaagcaacccaaaactagatcaaaataggaagagaaagttgatgttaaaacaagtgcagttgtattgacacaactcaaaccgaaacatttaatatgttcgggccagccaccaatacacatgatcacaaaagccatataaattactaaaggcattgcaatcatttgatacttcccaagcataagtggatgatctatttcattgttaaagataactatgcttttgtagagaagaatgaatattagagcttaaaggctgatttttttattgagttacattttaaaatttagagaagtgctaaagtgaagcattaagtgcccaacactctaaaatttagaatattggtttccaacagatggattagctacaactaattccatgtaccttatatcaatgctcttaaatatatggagttccatgataaaccccaagttagtagaataggatacaaagggtatttgggccattgtattaagagtactgtttgggaaggaatacaatagtatatatagaatactaaggagaatagaagggtatgcaatgtatgagtgttctctttgcatcaaaggtccaaaagggccattccttttgtgtagtgttcctttttcagtaatacaaagaaggccatagctgtaatggccatagtttgttgctctgttattgttcgatcggtttggttcttaacatttggtatcaggtttttcgggtcttatcattccaactcaaaagaaatggggtgaccccatgatctcataaccaattaacatgtttacatctactcaatgtgctatctcattcattcaatatctcattacacattccaaattgcaaatccacccttctctaacagtcaatgatcttcatcaagtattaccacaatcaatcctaaaatcatgttgaatatctcttcagacaatccataattctctaagctaaatcacatcttaacttatcaaaagcaaaacacacaaaaccaagaaattaatgcacaagtttataacagttgttttaaaaaaacaaaccttgaagaatcagcattcatattccgatgtagaattcgaccctgaccaaccccaccatcatcgattaattccctaagccccaaattcacaactttctcctcttcgaccaccaccacctcttcttcttcttcttcttcttcttcctcttcctttctcttactcttcccctgaactctctcaaagtaattcccatatatatactcaggagtatacccattatcttcatcaaaaagcatgatatgaccatgccactcccaaaccctatattcagaatccttctcctgatgaaacccaacacagacgtggttttcagcgatggtgacagcctggccagaattaggcttgagttggtctgtctttccggttaggatgaggcgaattatctccttctcgagcttggattcttctttggcgagctgggttttggaactgtcgtcatcttcgtaatcttcgtcggagaaattggcggagtcgaagagaaggtcttcgagggattgggattgggattgggattgggattgagagagggagaataaagggttattgggtggtcgaatacggagtctgcccatgagggtttggaggagaaggttgtctatgttgctgccgttgttgttgaaagaagccatttttgcagagagaaagagaataagggttttaggaagaagaaagggttttggggaaatatatttatatgtgatgtgaattagggaggaagaagaattatcatacaataaaataaaataaaattagagatattttcaaggttttcaattttatttctagagtaaataaatacactaaaacctctatttaagaatactctattaaaaaataacgtctaatttattataaaaaaaaaattaagtcccaatttagaccagttataaataagaataaactttaaattataattagttatatactttttaagtctcatattaataaagtatatatagaaaataaattctatataaaactattctaataatattgacacggtctggggtcgaatatacattttctatttatttcgtaattgtcgtatccgctgatacgttttgcagtctctcagatttgagagtttagttctgagttttgtttttgttcaattctggttggttcgaaggtcttcaatggcg

SEQ ID NO: 112073 - DNA, 6049 bp, Cannabis sativa
agttcaggaggaatttttaacggccaaaaaagttcagggagcacgatttaatacatgtcaaagttcaaagggaaaaattactaattagcctaatattaaatctaaaacttgtacaaatatttaaatatatattatataaaaataatatacaataaaaagtttaaactttattatcgtcacatctacaaatttgaagttgtgtatggtgggcgaactaacctataaatttaagtgtttaaatttgtctatgcttatgaattattttgtatggaatgatttatgattaagaaaaattaaaattttataatatcttttatctttaaaataatttaacttttaacttttcaaaataatggctacccaaatcaaaatttagttgatatagtatggagtgattactattttcttggtactgtaataaaaaccagtacaagcagcctagcaaagttaaactatcgatgtggttcactcaagatccacattattcaaaacttggtgattcacaagacaattttggtcaattccatacataggcgggctaagtctgtgtcaagggccaacattttcggaagcccaaaataaaaaaaaaataaaaaaatttattaagcttttattttaataaaatttaagtgtattataaactacaaatatccataggttagttagctgaagtgtttggcataatattcaaaatcatagtttaaatcccatatattttcaggactggccctgattccataacaataagaaatgtatcaaagaaaaaatttactaacacactatagtataatacaatacaagcttataaatatgatagcaatattactgtttaagttgtggaaattaagaattatcaataaggaacaactcaatgaatttagtactgcaaattacaaaagaaaaacatactcaaagttagtttaaatttcctcactatattatcaaagctttcatcagctatttttcattatatatttattagctgaactcaaaagtacactttgatctcttgaaatcacatatgcaagagctacaataattaattaaagaattgaaaagtgtataatttatgtatatatgcaatgtaatgtaataatgtactcatctgtaccatatcatattcagtctttgctaaagctcaactttgaaagaacagcagctgcttgatcaccacccaacaagaaataaggatgcctcaatgcagcagaagccgataatcgccctcttttaaggtatcctcctctttcggagattagttttgttgctagatcccaacctcgacccgaatcaagatcaagaatcgttaaatcaggcaatcgacgagtgtattctctccatcggattaaatcatagttgaatgtttttagctcggaattgaagttctttaagccagctgatgaccttaatgttggtactgccatttgcatcagtacaattccagcagagtacatatcaaacagatcaggactattcagctgcaaaagtatgataaaaagcattaacaactcgatttaattaaaaaaaacatgcctcctgaactattatccatattaaatattttttctgaactattactataaggaaaatgctaaactttccttatataattagtaattttatcctcgaattatgacaactattacatttgccatctaaattattactaacgccaaattgtgaatatgatactcgtcatattttggagggtaaaattactaatgatgtaaacaaaatctaccaaaaaatactgttagtattgaggataaggtgaatgaggttttatctcaaaatgtgggattctctaatattctttgaagatagtagctattttatttgctcaccacaactcgatcataagcagccttttttttttagtctacttcgatcgaattttttttgtttatttttgccctcataccatgttagaatttagaataagatgaatgaagttctatcttaaaactaattggtaatgagaggagtagctcgttcattttatatattccactatctttccatacatcagtaatacgagactctctaacaaatacttatttattcttttaacggttacgaaatcacaatacctgccaaagaaaaggagaaagtaaggctgcaataggctcaggaggaggactcggtgtctcctccggcatgacatataactcaggaggacaataatcaggatcaaggaggccgcgattagggacataatttttgcctattctaagatctgttgcagcaccgaaatctatgagcttaatctgtcctcgtttcgttaccactaagttagctggctttacatcgcgatgaacaatgccggtgtcatggattttctttaaggaagtaataatttgacgcataatttgcttgattatcaatgcactgcgttttactgagtccactccttgcaaaacttgtccaaacatgacagattctaagttgaatggaaagtttctctccctcatgtaatccaacagactttgatcaccctgtttggtaaatggtaaatatattatcatttagcctatgagtaaaaaaaaaagaaaggaaaattatgtaccatggaagaatgtacctcaaatttccaaacaagccatttcccaccttttgtgaactgagaattggttttgtcagaaacaaaactgccaagaaattcagcacatgtttcaggtgctgctcttgagagtctatagttaaaccattcttcaaaatcagcacactcatcagcccctttcactccaacttttacctgcaaattctcactaataagaaataacacaaaacaattcacaattcctatttggatatgtagttaaaataaacaataaataaactccaaaaatcccaacactacccagtagcaagaaatttcaactagactgagaaatcagggaaaaaattgttctgatagattgtaataaactcaaaataggaattaaggttgcgttcggtttgaagtaatgaatgaaaaagaatcaatttttatttcagattgcattttaaagtattgaaatatcactttctactatgactattcggaaagacttccatttcaatgcaagataaaataaagaataaattttttgtcaaactttttctttttatacattttaaattttattctaatgttatcatttctctccaaccaaaactaaacattggttgaaatgtaaacaaatactaaataaactctaaaagttccaatacaacagttgcaagaaatttcaataattggacataactattaaaaatttcaactttaaaagtccattgagaaatcaagggcataattatttgaaatcaagtatatagaaatatagattagttacacctcatatccaacacattttgtatttttaccaccctaataattacactacatagtaaatatacagttgctttcaaacaaaccgaaaacaatgcaaaatagccataaaatgcaagaaatttgaataaaaagaatttatttagattaagtatagagaaatatagaactagttaccattttaagaatgactttttccttgaacctactatccaacctgtttgttttagctttacccctctttttttcaagagtaacatttttaggtacaacagcaccagcataaacaaccccaaaagacccttcacccaatttctcacccacaacaaaatcagtcctcttcaaatttcttctcccaatcaaactattgaaacccaattgaagaggagcaagaaggtaagaatcaatggcacccaaaagcacaccaggccttgcagtcaagtaaatccaaatgattccagcaaaaacaacaaaaccccatttttgagtttctgacaaatcctttgtaatcctctctaattccaagtaatagtaagtttggtccaaatccaaatggagaacctcttccaattgttgagggatatctccaactccaaataatgcattgcatttgcaccttaaggttaagttgttgttataattattattcttgatgaaagtgagatggtttgttgtagtgtttgggaagaagcaaaagttgttgttgttattatgtttgagtgtggttgaggttggagatggtaagctcatggtcatggccatggatgatggttggttaggttggggttgagcatggcaaagttttgtgcacaaataacaatttgatagtatagaatagataaggtaacttaacgtaaagagtggaccacgttcgttctacttttatccaagaaaaatatatatatatatatatttggaaattctaaaatttcaatgatcaaaatagttttaattttgatttttttgtaatatgaaagtgtataatgtaataataacaagtgtaaaaataaaaaaaaaaattatgtgttaaagtattttttaaaatttttaatctattatgtaaatttttttatattttaattatgtgagatgtcttataattttttcttaaaaaataaaaaataatttacaataaaatttaaataattacttaccaagcaatgtaagaaaaaacaatcacttattcaataaaatatttaaattttatcaaccctatgtaaaattctctaaaatttaaaccttaaccttaaataagtataacttactaaaaagttcttattagcaacggttctttattgaagactgtcttaaaatttatttatttatttattttgagcacgatgtcctataatttatttcaaaaattaaacataagaataaaattgaaatataattttacccgatgaattttgacatatatcaaatcatatttttaaaatttttcaagttgttaaaaattttactgaattgttgaaattattagatttaagaacttctgtccaatttcatttaattttacaaatgtgacgattgtccatatattaaatcatgtccttaatttgatatctactaaatcatactcgtaagggttcgtttggtacgccgtattacatcgtattgtattgtatagtattatattaaattgtatttcataaaatatttttatgtaaaattatatgtggtattgaattgtatgagcttcatctatataatattttagtataaattaaaatttaatatagtattatataaaaatatgatatataatcatattcaatataatacaatacaatacggcccaatacaacatatatttttaataatccttaaatctaataaaaatacttaaattcaataatttcaacaattaaaaaaattaacaaatgtgaaaattcaagaggaaattagtctataatttatttccattatttttttatttttatttttttcatttatatttataataacagaagaagcaaatacgtcaggaaacgaaattgcaaaaaaatcgtgtgtagctacattcattgaacctggacactcttacttttttggccctataaaaagctaccttattcattaccacaactcacacaataaaccatacataattttcagtttaacaaaattcaagaagaagaagaagacaacaatggcggtgaccaagccaactgataagtcctccttcgaagaccagatttccactacgcttaagaagaggaacgaggaattggaacaagagctgagacagagccgcgagagagaggaggagatgaggaacgagctactcaaagcttggcagcgactccggatcgccgaagaagcagaggagagactctgttctcagctcggggagctcgaagctgaggctgttgatcaggcgcgtgctgaccacgtgaagatcgtctccctccttaatcaactctcacgcgctcaacagctccttcaagctgcctctatttcgatctctctctgatcttgaattgaaacgtggaataatctgagccgttcgttttcgaagaccctctctcgttattcgccttagtttgatttttgattataatttacttcttcttctgtaaattgtatatgtaaaatctgaattttgtaaaagaaacgatttgacttttaaagggtaaataccattttggacccttgcaaaagttaccaattggatcctgtgttttgttaaatgacaaaatggaccctgtattttttaaa

SEQ ID NO: 112074 - DNA, 1296 bp, Cannabis sativa
cacacattcattaattatcaaacagacccatgaaacttaaaatataattatatatttatattagatagctcgtgtatcgcttcaagttgagaatagatcaccataaaatagtgtcaaatcacacactcaacatataaattcaactacccaaacacaaattagcctcttattaacatatgggtgctaaaatgtcatacacatgggatcgctgaaaaaatatatataatcatatattaaataaaaacgacaactcattcgcacataaactcaatgtttctttttattgaccaacatcttattgatggtcaaagcagtttcacaaagccaacgaaacacttcactcttgtttcccaacacagaatcgtaaccagtaagtgcgacgtcacacgatttcgagtcgctgacggcaacattgacccaagtttcaacgtctttataggctttggatatctgcgccgacaccgaatcctcgagctgctcggccgcatcgatgtagaattcgaggcaatccgaggcgccatcctggacttcaggatcgacattgggatcatttaacttggtcttaatgaactccgaaatatcagaagcgttagtggccgcttgtttcagagcaataagacctaatcctcgtaggttggcattgtgggtgttgggatcggatagaagcattgaactacagaaagctttttgggtcacattctggcaaaccttcgagataagcttggcccctctgtggtgaccagttttttgtttgttgttgatgttgttgttgttgtttccttcttcggttgttgctatggcggattgtggcgaatgagagagaaaaagaatggttagtaaggagaggaggaagaaagtgttaacgtaatactccatatttctttgaagaaaatataaaaaaggtttttctttgttaagtcttaattacttctaataatgattagaagtatgtggtgttcattaattgaagaattaatatgagaagtggtttatggtttggatggatatgcactcaattcggctgttttttaggaaatgttgtaaaagttaaagcgttttgttaaaggccgaacaactttataacattttttcttttcttgattcaactgtatgtacattttgttttgctttcgtacgttttaacagctatatagccatttgcatggaatcggaacctcttgtgctatatttcttttttggcacttaaatatatatggatgtgttataaaataatataaaataatataaagtagaagagaggaaagaagaagaaaatgaagagagaaagagaaagtg

SEQ ID NO: 112075 - DNA, 1170 bp, Cannabis sativa
  modified_base (864)..(866): a, c, t, g, unknown or other
attggcctttgactttggtttcgatgaacggaactccttggtcgttacaatcgacgaataggtcgtctttgaatcgtccggctagtgggtagaagagggttaagaccttagacaaagatttcttgaggtggttgatcatattattgttgaggttgtggtgagaatgatcatcattaggatcatcacttttaagttcatagaaaaagagtaaaggattataaactttgggtgatatttgatcgaggaaagagagcttgtaatggcggagatcatctggggttggagaataaggttttataatctcattagagattacttcaatttcgacaaccttagtactagtcattttatcacattattatggcgtaacaatgatatagctaagttaggttttgtagatttttatatacatggccttacatttaatttatatataaaagaattatttcaaatatatcttaaaagaagataaaatagtacagattttgtgtatacatatatatcaagatgaatgaatgatcataaaatcatatataatactatactatattagcaagtcgacaaaagcctgatgcgttattaattcaattaatattaatgtattagttttcttctccattaagataacattatatttctctctataatctatatacattatatatgtcaattttttctttgggttattcttgtagttaatcctatagttggttggttgatttacttgccgcttttaacttcatgaattctaaaacaaaagtttacctaatactatatcgtgggttttagtttggtaaatatatattttgcttcgaatatttgtgcttcttagacgttaccctatttattattattattattatnnnatatatattttttttttttggaaatgcaacattacttgtccttagaaacaacggacccacagtcaccccacagcaagcagatgcacttgtacctgctgtatcgaatgaagaagttagaaaagcaatttttgccatttcaggatctacggcactaggtccggatggatattcaagctacttttttcaagacaattaatgagatataattgagggggacatatgtgatgcagtgagatcgttcatccactcaggacacatactcaaagagataaattgcaccactcttactatcatccccaaagtc

SEQ ID NO: 112076 - DNA, 5657 bp, Cannabis sativa
  modified_base (40)..(49): a, c, t, g, unknown or other
tttagaaagttcatatttaggttgttaataaacatacttnnnnnnnnnnctaagatcctagtaaaataatttcgaacagatggtacatcctatgtaagctccagaagctagaagttctgagcccgagatgtgttttatattttactcgttaagtcacagccaatgcggaataataaaactaagatatggttttgtaggctagacaaacgctccgccaaatcaacctgcccgaccaaaaaatataataatatttaaattgggcatattttattaaatatgtgagtatacaattattagagtaagattataatcttacttaagctaattgtgggttaaatagtataaatctagtaaatgaataattaagcgttatttattaattacagagattttattggattatgggggtattgtagataccattttcgaaataaaatattttcgggttcggcggccgtggaaactcaacgaaagtgtcagaaatgtcacggtgataaaagttgggatatattggaaatatactggactagtttgaaaagtcgagattgttagtttattcgaggaaagtaagaaatgatcaaaattcccctaggttatattatagcttaaattttaaaaggatgggtaaaatagtcattttatgagattagattctttgttcttttagtgtcttctaggctgaattggaatttgagtaagtttatattatgttttaatttaagtatttatttttttagaaaattcaaagatacatcctaaaactaagaaaacattatctatctctcttttccttcatctacttcgagccctacaaaccagcagcaactaagagcattttttcctcaatttcatcttttcctagctgaattaagaaggattaggagttgtacaagctttgaggtaaggttctttccatgtcactttaaattttcagttttaggttgagttttggttatgacttatattaattttgggtctgtgtgattattggagtttaaacatgtttttaggtttgaattgatgatggtttaagcttactttgattggatattatgcctgttaggcatgaattggaggaaataaggtttaatgagctcaattcttactcaaatatggtgatttgagtattttgatgaattttttagtattgtttgattgtagacattatttttatggtataaaactgttctagagagtttgaaaagatggagttttggttgggttttggttcgaaaaactagggttcccattctgccaggagagaaaccgattaactgattttacaggtgctgtaaaactggtcaaccggtttgccagtagggaaaaccctagtttttggtttgaaaccagttttgttcggggtgtttttcagatcatagattagggtgttttagtgatgtttaagcttttttgaaaccagtgggaatttagagttgtccagttatggaattagggttttttttttcagaatttgaataagttgtttatcgaattttattgtcgtgacataggacccgggatcgtcaagctttattccacttaggtcggtgtgcacacctgattactagactgaggtaagaaagctaattacactactaagcatgttaagtgaggaacaattatcatcgtttgcgactcgattatgatcaaggtaacgattactatcgtgtgtggctcgataatgatcgagataaaaatacggtcattaccgttattgaaaatgggtaaagatacggtcattaccatttattgtgaatgagtaatcacttgcttgaaaccacagataggtttcttacttatcgattgttgtatcgggcatcgatagtgacatatgtagctcgtggatgatgagtggtaaggatgctttatgaggcatcaagaacagtttgtcttaataggcaaataattgtcatgtaatgcttgattatgtgttgtataagcatttatttgtgaatgatggaattgtatgccatgcattgttatattatcttgtgttatttactgtttgtgattacttgctttcttactgagtttttgtgactcacgggtgcttcgcggtgcaggtaaagggaagggaaaagtggatcagtcatgagtcagaggtctctcagagatgtacatatcaatcacgatgtcttggcttctagtggacagaatctactcttttgattatgtttggaaatgtaaccctattttttacactgattttgaaactagttgtaaaaatttataaacaggggatccccatattcagcaatattttgtataaaagttatgtttttagtttaatctgaaatttttaattaaggcacacttttcttaaactaatagattaactataaattaatttgtaaaagcacacacatgtggtgtccctatggttcaaggcgttacaagcttcaccaagcatgtccttgacttttaggactactagtttttcactaccagattcccattgaagagggttccaactttgtccctggacttctccaaccctggtaagaattccatacttcgcatttctctcattcacttttttatgtgtcgtccttatatttctaatagagatgacctctggtttgcagccaatactgaataaaaattatcctcaatttttacattaaaggaaatgcaatactggaagatcctttctgatgtcctgaaggtagccagtttagttactacagataacctccgcagttgttgactcattgttgagatttaaagcattaagcctatcaacaactatggatgtcgcgatcccctagatgtttgacaggagatcgctgctatggtggcatcagtgatgaaggaggtagttaaacttgacaagatgtggaggcctaattgggaacagacccatccaaaactactaagtgaagaggtcaagcttgcagagctgtttgcggtcgtggccaaaaacgaaggcaccccggggccagcacttttgagagaggtaaaaaatcctttcgtctcacttatgctccgcatctcgatgagatggctcacatcgaccagggaggctttgatgattatttcttaagtgtagaccctcgtaggtgtccagtaaatgaataccttgataagtagatgaaattgtgaggagtctggaacacttcaggcagccatctcactcttatagaatagatcccctccttttcatgccatgtccaagttttgaggaatatggtagtttctttgatcaggaggacatagctttatttgctcagggaaaaccaaaatataacaaagtcaacggttgctaccgaacttgaatcttgttattgattttgatgaccttaaagttagcttggttcaatcatttgtatatgtttctaactctttttgatgtcctctattttgtagaaaatccacaaacactccaaaatgggtgctttggacaacatccttggaaaaaattaacaagggtgccaccaaaattagggcccaggttgcatctcatttattgaccggagctgccaaaggtaaagggaaggctaagttccaaagcccaattctttcatttgatgcttctaatcctccgtctaagaagaaggagtcaattttcagaaggtccttagtcatccagccccctcagaacattcttccccatccgggtctactcctgccaagcaagttgtcgtaaatcctgttgctaaggttgcagaggttcctattctgatagatgacgatggggaaggctttgtattctcggtgaaggatattctatccttaaaatagtatgatcctcctttggccgtagagaaagaggtcaaaaaggcacaaaaggaggatacctccaattctgctcaagttccgagtacagcggtcaagacagagaccagagaagggtaggaaaaacattttcctgccagaagcgaggcccaaaacttgcaagtgagttcaaggcctccgtcttccaaagcacaaggttgtcagtagcttccaactgctctttgtcgattcccaatgtcaaccttgcacggtccatccggttcctcacgccgcttcccactaaggtccaaaagaagaccaaaggagttgaaaactggatctaaaagcatatagaactagagcagatctttgcacaaaagaaggctaacatcctctccgccagaaggaaggttgagatagcaaataagggtaaaggtaaaaggtctgactagaccgtttggctttatctaagtatctcaaacctagggtcaggagtgatacttcctattttgttgtggagatgatagacttattagccgacagcatctgcgacttgacccataaaaagtgagttatatcgtcaagcaccgatctcgtcttgttggcccacgccaccaaatagcaggctaccggtgtaagacttgatttaaacccttggtacttatctctattttctatttgcatccatttgctctgacatttttcttttctttataagttgagtagtttctttcatgagatgacttataattttattattgaaggaggggtgagttcattattgatccacctctagcttgggtggatgtatctgaagatatgaaatatacgcctgtgaaagtgtctgagccaacaaaagcccatgaaaaggccttaatgtcatcttttagagatggtaaaaaagatcatcagttaattaaagcccttacacaagagataatgtgtaagggcttaaacaaaattaaaggctttttttttaatgaaaaggcatttttaattaccacatcattgccttagaaaagaatagaaagattttctacaattggatcatcagaagattcaaatattaaaaaaatgtgtaagtataactttttttcagtctttttaagaaaatttgacttattagttacaatatttcgtttgaattttatatttagggagattaatatgtatgctatatctaaatactattagttgtccttaactatttcctttttcacactattgaaaattcaaacttttggtcctaatacctatcgtgccattagtagcttgtaaagttcttaatgtttgtgctcctttaataattgtatatatttagttaataatttagggccagcttgtttaatttgacatcaaacagaacaccaacactcactaatttacaaaactccatttcaaaataagaagaaagacaagaaaaagatgaagaaggaaatagaggaaaagaaaaagaggaagtaaaagctttaattcaattccaatactcgctatgcctttgtcgataaatttgtataaatatgtgggacatgattgcaagtcgcgagtctccattcccatcttgtcaagggtggactgcataataagttgaccccactcccattatcaacaagtatccttcttactcttttgttggtaatttgggtggttatcaccaagggatcattatatggcatctgtacatggtctatatcttcttcattaaaaataatgggattttttgtacgtggttgtttttgaggatgttgacgtggtggcacttgtgcattgttgctacttttcagttcattaatgtaacacttttgggccctgtacttgttctggcaaagtgtggacctctagcaattaataagacatcatctccctccaatggtggctccatgtttgcattttggccttgtggcggggtgttgagttttgtgccctaaataaaaaccatttca

SEQ ID NO: 112077 - DNA, 1750 bp, Cannabis sativa
  modified_base (1434)..(1438): a, c, t, g, unknown or other
  modified_base (1679)..(1701): a, c, t, g, unknown or other
ttttttttttttttatcaaaacatgtaaattcatacttctatcaaattaaataattaaaatttcaattcttaaaataaaattatacatgaattcttttttttcccggaaatttataatattatataataccatactgtcaattattttactatagaatatactaattccttataatgttttttaaaaaaattattacctatagtggtgattaaaaagaaagaaaaactcacttttcttgtatggaaaattggtacaatgttcattttaatgtatataaatgatattctcaatgaaaaagttaatttttttctgctttatccatttttcatatagtactaagaattggtacaatgttcattttaatgttccaaaaataaaaataaaacaatatattggtagaataataattgattgatgaacgagatcattgacatgatcttcgaccattgatattatatatatatatatatatatatatttctttgtatttaatttagattacttatattatatgcaatctctattctaagcattatattccctcgatcataattaataataatcaaagaccatggcttaattattcaattatgagtatatatatatatatttctatatatatagcattgtttatcattatcaatttttattttttttttgtgacaagaggatactgcaagagtcgtgtagtagtcaataatttgaatcatacatatataatccgaaatattacaaactctaagatgtcataatcaattcgaaccaaaattatactttcttatcactccaagccacccaaaattcaattaaaaaaatcatcatgtccatttcacgttccttgcatgagattctaattttgaaaacaaccactcaaaaaatatatacaataaataaatctctctttatctatataattattcatttaatttaaaacaatatatataactttcatgaaaatggagggctcaactcaggcttggtacttagttcaaagatagactgtatataaggcttatccattaatattaatttatggctggaacaaaattagcttgaatttgcaatgaaaatatatgatgaaatcatacatagttatccttttaaagattaaataataataagaaaactaaaaaaaaatatatggagttaatttcttcatgtccttttcttgtatctccctaactaataagataattattaattggtcaatatttttatatataaaatatggttatttaaaagtttttgttggtttaataaatatttaaggatataaaaatatttcattaaatttaatagtatgatcagtagggttagttttataaatatatataaatgttaatattgtttattttaaattaatctaaatatatatattaatattattgttttaggttaattcaacttgtactaattttaaattaatttaaatnnnnntaaatattaatatattatttttaatatttggagtatatttaattttatatttttaaatttatatttattttttttttcaaaattataaatattttttttaaaaaaaaaaaattaataagcatttttctttaatttataaaaattttgaaatacgcataataaaaataaaaattaaaaatataactaagtgccattaataataacttaatatatatatataggggaaattacactctatacnnnnnnnnnnnnnnnnnnnnnnntttttaccttcttttttaaagtctatcatttttaccttttttttaaaca

SEQ ID NO: 112078 - DNA, 5040 bp, Cannabis sativa
tacaataatacttactgtttctgattccgaacttaacataattaatagacgtatttttttttttaatgaaaatactaataattattaaactgagaaataaggcataagaataacaactaactcaagagatagaactctcctaatagtaggatatggacaaaaacaagaagcaagcgcaatataaaatgttggaaaattatatatattaaaaaaaaaaaaagaaaaaaaaacagagaaaaagtccattatcatatatatatagatttttttttttctgatatattgtttgatctaaacatagctttaaagtaaatttaagtaaaaacgaatattagccataaaaccattgaggaaacttttatggtattagtttgtaaatagcaatgcatgggagaaattaagtcttttgttgcaatctttaatcacatcatactaaaatggagaaagattaatggaaagattacctacaattacaagattgattaatcatataagcaacaccatgtttttaatgtcgtactaattggtaagcacttcctatgttcgataaaatgtctaactgagtttcttaaacctacataaaactgtacttaatcatattatatatcttggtgttttacattagtaatttcttccaacatttgcaaatcaagccatcctgtatgttagttagataatggtcactcacacatataataaccaagaacatcaaaagatttgcagagaatacatacatgaaaatctttcaaaatctgacaaacaaaacttcttataattttatattaattaaaaaaagaaaacttttttatgttcttacaaacaaattaactgaagggtatgtcaattcaagcactgttgctgcttccaggtgttgaaccaggtatcaactctctcaacatagccacaacctgcaacatgcttggcctttttgatgggaaatcatcaacacattgaagacttatttcaaggtaccttatcatctctttaacttcttcaacttctgcttcagctgttccttttgttaccattagcaactcagagtctattacttccatttgtttaccttctcttactttcattttcacccatcctaccaagtttgtgtccccgaaatcttttgtatctgtaggacgtttccctgtaaggatttcgagtaaaatgactccaaaggagtagacatctcctttggctgtgcacctgaagctttggtagtactcaggaggaacatagccgggtgtaccagccaatgtgcttacacttagatgcgtgtctagcgcgcttatgagccgagccatgccaaaatcagacactcttgcttccatttcgtggtctagtagtacattgctcgacttcatgtctctatggataatgtgaggaatgcaattgtggtggaggaaacatagtcccttggctgcacctcttgcaatttttttcctctcttcccatgtaagcattttcctgtccctgagcttggttctcccgtggagcatttcgtcaaggctaccatactccatgaattcatagacaaggagtctctcttcaccaactttgcagtatcccagcaaaggtacaagattcttgtgttttatctttcccaaagtttccatctcggccatgaattcgcggtcaccttggcagctcaatctgataagcttctttatagcaacacttgaaccatctttaagtgttgccttgaacacttctccaaaccctccacatccaataaggctttcagctgagaagccattagtggcctcaatgagttgggagaatttcagtttcctgagctgtctttgaaaagtagcaacattaatgctcagaggttctttttctttctcaatcttccatgtagtggctgcatgacatgcttgtaaactactaagcatcttcacttcttctgcctcctttcgcctcgccctcattgcgattgcccacacaatcagtatgcaaatggaagcaatggaaatgagaattcccaagacaatgctgttagcccatgaagcagctgaggactttctggcacctctgcccatatctgcacttgggtctgttgtggttggttggctattgctcgtgcactcgggcaatggaaccccgcaaagtcccgggttgttggcatactggcttgctggcagtgtgctaagctggcctcttgttggaatttgaccagttaattcattgcttgatagatcaatttccactaagaatgaaaggttggagaatgaatctgggatttgaccttgcaatctgttatgtgaagcatcaaaaacacccaagttcttaagctttccaagtgagaaaggaatctcaccagataattgattgtgagccaattcaagaacttgtaaagctatcatgtcaccaaaatcttcaggtatcttaccacgaagttgattgtaagaaagatcaagatattccagagtctgatactgtgtaaacatgcttagaactgctccagaatacattctagtgaattgacaagtcttcaatgtaggcacctgatagagcctatcaggccttataccagcaaactctagcaaacctcctgctcctctacaagagctccccacatttcgaacaaacaccaaagtgttcccagaaaggataccagacaaggctttcgcgccttgctgccttccaagccggggtgggatctcaccggtgagcctgttgctgttgaggtccaaccaaaccaaactgctgcaattggctagctctcctggtatttgaccactcaaggtgttattccccagctgcaaaacagctagccttgtcaattgcccaaactgaggagggatttcgccactaagcttgttacttgtgagtgatatccattcaagattactgcactgaaacagctcttgtggaatttcaccagttagcttgttgttgttgagaatgagatcctttagattcttgcatttccccaactctggtgggatttttccctccaatccattgaaccaagctatcaacttctctagattctcaagttgtcccaactctgctggaattgatccattgagatagttcagactcacatctattctcttcagctgagagcattgtgaaagttcccctggaatttctccaacaaagagattatcaggcattcttagctcctcaagagatgctgcaccaggacataactctcttgggatgaatccagatatcttattagagcttaaatctatgacctttaagttcttacaagaagacatggaagaaggaaactgtccagagatgatgttgttactcaaaagcaagctctctaaagagcttagattcagaaacaaagtatcaggaagtggacctgatatgttattgtttgaaatatcaagaacttggagagaagaacatgatgaaaaagatgaaggaataaggcctgaaatattgttatttgaaagcctaagttcctgaagtgaattacaggtgtttcctagttcagaagggatccaaccagtgatttgattttcagagagatctaatgtttgtaagctctttaactccccaaaagcttttgggatttccccagtaagagaattgattgaaaagtcaatagattggagatttgtgcagttggaaagtgatgaaggaagggatccctttagtactttgttccctgaaaaattaataaccaacaaagaagtacaagaattggccatgattttcaaaccagagatggaccctgttatgttgttataagaaaggtcaagagactgaagattatcagcactcaacaagaaattctcaggtaaaaaaccagttaaatttgtaaaagcaagattcacattaacaagatttggacatttgaagaagagattctctgggaatgaacccacaagtttgtttaaagacaagtcaagctgtttcaaaccatatggaagttgaggcagagaagctgtatttatactaaatgaatttgaaccaagatttagaacagataacatgttgagtgaagccaaagggtccatagatatgatcccttgaagacgagttgcactaagatcaagctcagttactctccccaaagaacatgtaacacctctccagttgcatgtgttcttattcagttgccaacctgacaaaactccatctgggtcattctcaatcatcttcttgaagttgataagagctactgcatctgttttggctgaaaaaactccttgttcagccatggaaaatgaaacaagaactaccattatcatcaaaagaaaaagctgaactggttggttgttctccattgatagagagaaacaaagaaagaaagaaagaaagatagagtggtgagtgagtgagtgagtatgatgataatttgttgtggcaaaaaagacaactttttttttctttctttcttttgtggtttgattataaaaatgggaatggtgagaaaaagagagggaaaacgtgggaatgaataagaaaaagagaagaattggaatgaagtatacggttactcatcaaatcattttttcagtactaaaaactactttagtagtagttgtagtagtgagtgagttgatagtatgaagagaaaaataaaagggtattgccaaaatgagaagtgatttgacttttggtcaaaagagggttggtggggtcaacatactagacaaggtacatctaaaatcggcgctgcagatatataaatatgtataatataggtatatatgtgagtgtgtaatctctatagaatagaatataagattaagaaagaaagaagacattgttgtttattgatttaataataaagagaaagagagattgagtgagtgtgttatgtgtcagtgaggcgtgagaatgtttccttactagaaatttggatgatgttgttattcatgactgggtgggtgggtgcacgccccacctctatttttttctttcttttaatattcatattagtactagattactagtattaaaaatactaatatattatctatactagggactcactcaactcaacactctcatgtctcacccatttggactactcatacttgtctttcttaattaattaattggtatgaaaaatgattt

SEQ ID NO: 112079 - DNA, 6157 bp, Cannabis sativa
tttttttttttgagagagagaggaagacttgaattgggctctatttatctctttatttgagcccagccatcaaaccctaaaacccttctgaatctttgatcgtccttttcacaaaatcacggctaccagcagagaagaggtgaatagagccacacagagatagccatggcagacaaggcggtaaccatccgtactaggaaattcatgacaaatcgtcttctatctagaaagcaattcgtgagtttctaacaacaactctagcgtgttcttaattattgtgtgtggttaatgagaaaatttagaaaccaaaaagaaactctgtatcaatttttcctgcgattatagatttattaaaattgatattcaactgggttcagtgagaaaataactgatggttaagtggttttgatgcaggtcattgatgttctacatccagggagagctaatgtttctaaggtttgatttttttttttttggtctttttcggtggtctttgattcggattaaggatgttaatcactctatgaagatcttaatctttactgtgcatagcttacaactgagatgaatgtcttgatttcgtaaaagctgtaactatagcttaactgaatgtttagcacaagctttggattgagtgtgattgttttgtttctctttttaaatctgattctttctacattaaatagctgttaatgattggagaaggattttagctttatccattttataatgtattaatcatgtatgtaggaaagctaatacttgtgaagtaaatttggcttctcagtgtgtttggaactttaggatttcaaaataataaaggttggggttttgcccttctgcagagttaaataatttcttctaattatttgttattcttctattgatatctactatcacgggtgcattaaaataataataaaagaattgactaaatgtacatctagcttcatatttattaatgacaattgtacatgtaatggtgtttgtgcagcaaatctgatttttattttatttgctcattgatcgttgttcctttccccttgttgattttttgtcataatcaaggtagagttgaaggagaagcttgcaaggatgtatgaggtgaaggatccaaatgcaatctttgtttttaagttccgcacacattttggagggggtaaatcaaccggttttggattgatatacgattctgtggaaaatgcaaaaaagtacgagccaaagtataggcttgtcagggtaagattaatctgctcacttggtattatttttatgtatagttatgcattgttgtatagttatgatgatagataaatagatttcatctattttcagaaaggtttttttttaatacctgcaagtttatgtttatgctatacattcaactagactccaacagcacttaatgtaatacagctcaagacacagtgaaatggggaaaccactgattttgaaggaatttctctgcatatttcctagacttgttttctctaaatttcactctcttttgaaaactttgcagaacggactagatactaaggttgagaggtcgaggaaacaaatgaaggaaagaaagaacagagctaagaaaatccgcggagtaaagaaggtatgacattttgttgtctttttgtacttgtttgcatcacactttgaatactatattatatgatttgtagtgctgtttcttttccagctgtaaatatatagttttactactaatgttggtatcttccatattttacggccattgctgtgtatgctcattggctttctttttcgattgtttctcgctcagaccaaggcaggtgatgcagctaagaagaagtgaggttctgcataaattttggctccatgttttgcagattttttcttcattacattgtttttttcatcttacgtttgcttgttaaacttggacaaaagttttgggaaattcaactttgagaacttttattttccgtttgtgttgctagttactttttatcaggaaaactgctaattatgatgttacatggagacagattgaattttgatttttaagttattcatgatgaaaagaaagatcagaaaatcttgtcttgagatatgttttccacatttccataaattttgaaaccgaaagctacagctacaaattttattcaagtggcaaaccttggcttaagcaagggtgaatttaagtctttgtgcttgctaggcaccttaatagaaggaaagaaaaaaaaaggttattatttgaactaggaaaaacaagaacattttaaactaaatttagggtgaattttagttcttatacttgctaggcaccttaatagatgtaaagattaaaaaaaaacaagcttattatttagactaatttatttatgttatattaaatgtactatttaatagaaagtgttgttattttaaaaaatattaaaattcaaatttaaactcacttatgtatctaaaaatatgtttatattattattttttacttaatccacatctacaaacaaaactatctttcttttattctttttctaaaataataaaataaaataaaataagttttcttaaaaacttattattatttattgcaattactaaaaacaaatatttttattatttacaaaaaaaaaaaactgaaaaggtgtatgatattttaaaaaaaataaaagtattataattaaatttaaactataattaatatcgtgcaagtaatagaagcagaaaacttgtgaatatattattgattgaattggataatgtacaatgaagaattacatggtttatataaaaatcaataatgaataaccctcgaagtctttcagataattcgaaggtttggttactcgacttgttcttcttgggatcacaggaggtgatgatgttggaaattggaatagattgtcttgttgtgtcgaagattggtcatctgtgtttgcggtttttgttgtgtaatcctgcagaggagggttagaaaaagtaataatagtatgttgtgcaggataatcatctatttgagtattggtaatgtgagaatttgataaaacaagtgtagagaaaggatcaacattagtgtgagcactattgagtttataaaaagaaaaaatattttcatgaaaaacgacattgcgagatatgaaaaattgtttagtatttagatcatacaacttataaccttttactcttcttgggtaacccatgaaaatacaagtccttgcacgtggctcgaactttgttctgtgagcagtaagtgtagatgcaaacgcaaggcacccaaaacatctcaggttggtatagtcaggagctttatcgagtagaatctcatgaggagttttgttgtttagattagatgtaggtgttcgattaattaaaaaaattgtagtcacaagacattcagtccagaatttaactggaaccttggattgaaaacaaagagtccttgcaacattgagcaagtgctgatgttttctcttgataacaacattttattcaggtatttcagtgcaagtaaattcatgtagaatgtcatgtttagaaaacaaatccttaaaaacaagtttaggtgcattattagacctgaaacatttaaaaagacaattgaattgagtttgtatgtaagaaagaaactctagtatgatagatataacatcgaatttttgtttaagaagataaattcaaatgaatcttgagtgtttatcaatcaaattgaagaaatatctatgattaaagtgtgaaggtacatgatatggaacccaaatatcacaatgtataacatcaaaacaattagcagcaaaactattattacattatttagaaaatgaagctttttttgttttgcaagagagcaaacataacatggttcaatatgatgtaaatttttcattttacaatgaagagtatctttaagtaaattcaaacatttgtgagataaatgtcctaatttattgtgccaagtctaagcataaatggaaaagactttggtcgaaattggtgcaaggtccaaaatatagagtttatttctggattcacttttgctaatcattttctcattatgtattttctgtatataaaatttattagcaaaaaaattcatgacaagagtatttctatctgttaaactgctaatagagatgatattatattgaaactaagtgcataaagaacatcaatgatgatgagaagatctataaacttgacattgccacttttgtggaccattaaatgattattgatagggagaatcaattttattagagatataagatgaatactttggaataaattcatgttagaacaaatgtgcctagtctactatccaagaattattttgaggtaatatagaggtattggacagaattgtacatgggataccggtagaggaactaggatccatgaaagtcatactagatgtttgtgtagcaagaaggtttgagaacttgttgatattgattggcagttagttgaggcagcaaggtactattgtcattgggaggtggacaattttactggaagtttgcaattgaagcttctctctaaaaattgaagcttatgagacttaaactagagcttattagtatttttctgtaattctcgtgataaataaaaagtcgaaatagacgtagttccattactattgcgatatggagagtgaactattataaattttgtgtctctctaaactatatacttaaacttattaatcatctcgccaatctaacgaactgatattggctactttttagtgtcaacaacctcaaaattcaatctaattactaattggattggatcggttttttaattgggtatccaaatacacacctaatttttttaataaaaaaattaagaaaaatacgtaaaattaaaacatcaacatttatttaagtttaatactctctaaaaatactaacgtgactagtgtaatgaaacttaaagattaaaataactaaaacaataacattagcaagtaataaaataaaataaatacacaaaataatcaagtgttacaaattcaacaaaaaaatacactaaaagtataattaatatatatttttaatatttataattatataaataaataaatataaatagttaattttttaatatatataaatgtaattagattagaacgatttttaattattttttgagattgatatccaataactgatttaatttctaacttttaacatctaatccaatttaattataatcgaatatctaatttttcgtgattggatatccaattcataaagaaaactttaaaaaatcataaaatattaataaactgaacttctatctaaataattaaatgacttcctaacaaaatcacttgagattgttgttaaaataggtacaactttaccttaaactccaaaatactcctcccattttcaaacaaccgcctctctcttcaccccttctttcctccctctcttgctctgcactcacccaaactttaatgaatcgaccacaaccaacatccacctcaatctcttatctccacgaccattgcaaccaccacaaccgcatgacctacatgacccacggaccgaacgaccatcgcggaccctcaggcttctccattgacttgcaatgtcgtcgtcaaaggttagtttttttttaatgttatccatttaaaccctaaattatccattcaccccgatttgtggttactttgaattttttgtttattgtttggtaaaaattgagttttggtgaaatttgcgttttctgtgatttttttgtatatggtacgattggatacgatagtggtccaatgggggggtacgatagtagtgtaatttgaaggtagggatgaaggtctgatggtggtttgatgcaggcacaatgcctttctgttgttgaaatgagcaaagtttgagacgtaggtccgatagtagtccgatggtacctaacattaaaaaataagaaaaattggtagcatcgggccactatcggacctacctcttcaaaactttgctcatttcaacaacagcaaggcatcgagcccgtgtcgaaccaccatcggatcttcatccataacttccatattacattactgaaagtactacttgttgattttcatgattcagattaccgagttgattatctttgaatagattgatttcaacacatgtattttagacttgaattaagagtaaagcag

SEQ ID NO: 112080 - DNA, 7297 bp, Cannabis sativa
  modified_base (1866)..(1882): a, c, t, g, unknown or other
ttcgtcggatgagtcgaggaagaagcggttgtcggggttggtggaaggagcggagtaagaccgaaagttggactgaggctgagagtcagcagaggcagaggctgaggctgagactgaggcggtgttgggggtggtggtggtggtgaagagaccgaaaacgtcgtcgtttggatcgatgtccatatttttcgggtgaaggagaaaatctagccaaatcaatagaggcttttactacagtgccagtgcctctggacatataaataattttttatttttgagaataacgtataatcttttttgcaataataaattttataatattaagttttttcaaaaataaatataagtttacattacaatattacatcacaaattttccaaaattaacaaatcaacttttatgactttacatttgcttcgtatattatttgttttgtaatatataaaataataatatttgagcaaaagaaaacgtaaagttgaagattagaaaggcaacgtggagagtactagtgagtttgttttgttggtaattggaatagaaaagaaaagaagaaagggtatagaagagagagtgtgccacgtcaacttgaacttttccttcttctctttggattttagtaaacacccataccctcatatccattccatacccatactataccatatatatatatatatgattaattggactaattaatggtagatgaaagttagctccctccactagtctccatttacatttatcaaatacaaacttatttaaatacaattcatcttttgtagattttgtccattattaattgatgaataattttgattacatatataattataatcttctctattattcatccataacattattatactcaaatctattttcctgatttggagcatttgttgatgttatatgattatgcacatggaaatagattatattttgatcataacattcacatctcaatataattaattctataaaaacattataccattaatcaattaattatagaacattaaaagattaaaaaaatggaggatatattggggtggtctccttcacgtttagatctatgactatattttctaatatttgtattgtggtttttttcttttggcttgatgtcttaattttcagagcacttccaaagttccaatagcacttttaaaatagagattctccacacaaagaagtaaataatgatataaactctttctttatttctttaaatgtttctcgatatgtaaagatatttaaattatatattctctatgaattatatattttaaatatattatttaaatgatatataaggagaagatataaaaaatagagaaagaaatggattgttgtttgatgtgaaatagagaaagtatggaaaaaagttattgggtgctcttacatatcttacaaaaacaaattaactgaatttaggatgtgtgttattctattttggtaaatggttggctttgttgttgttgttgttgttgttgttgttgttgtattaatattattcttgactttgagtttattgctctattatataatatattatagtaataagttggttggcttttcttttatagttgtgagatgcaggcagtcaaataacaaatgaaaaagtttttgtattattattagtttaggtttaggttgtgtcaattatttttgagaaaattattagagatcattatatatttagagtcaaataaaatagactacgtccgtaacgtataggattagggagagagacagagacacatgttgaatgttttgtgtttgattaggtggttgggttgggttgggttttggtgggtagatagttgagttgagttggtttatacaataataataataataannnnnnnnnnnnnnnnnataataataataatatagtaaatagataaagaaaatgaaaacaaaagattcgttggtatatagaaaagaaacaaagaaagagtaagaagaagattatgatttaatggtcataatggagaagtgagtgatcaaagcaccttactttaggaggacttcttacatatacatatatataattaaatatattggttcacgtgatcacaggacaaacataaagtgaagagaaaagaagaaacaaacaaaaaacgaaagaaaagaaaagaccaagaagacaagtgaagtgaaccacccacacccacacccactctttaattaaccttttttctatttttaatgttaccaaactccttcttcttattgttcaatgaaacataacagaagaagaggaagaagcagaaagtaattgatggtgaaaatgaatgtgatggtggttttgctggtaatgggattggtcatccaaccttgtcattctcttgaaaaggaaaaggaaaaggaaaaggaaaaggaaatgatgattaagttatggccaatgcctaaggatgtgaagttcaactccacatccactacaactctgttggttgcctctcatttccacctcattacccaatataaagactcctcctccattctcaaggatgctttccacaacctcatcaatctcatcaatctcccatcttcttctctttctactcttaattcccaatattaccttcttcatggcttaaacgtcgtcctctcatccacccatgacaaccttcaatacggagtcgacgagtcttacaacctatccattcctcatccacactccacttccatttccaacaaacctctttatgcatatcttaaggtaattaattaactaattaacattaatctcattcatattcatattcatttttctttttccttttttcttcttattcaggcaaacaccatctacggtgctttacacggactacaggttatgttatatctgttgtatacatactcattgattcattcatgagatcacttaagacttgagaatatggactattattgcagagcagaccttcagccaactatgccgttttaattatataaccaaaacagtggaagtcaacagagttccctggaccattattgatgaacccagattctcttatagaggcctcttgattggtaactcactcactcactcattctcactttactctataaagatatgtaaatctaaagtttattattcatcagatacatctcgacattatctgcctctgccggtgataaagagtgtcattgattccatggcctatgcaaagctggtatgtaatatgtaattttgatttgatgtcattttgattttattaactgatttgatttgatttgatttgatatggtgaattagaatgtgttgcattggcacattgtggacacacagtcttttcctttggagataccttcgtatcccaaactgtggaatggtgcttattctaatgcagaaagatatagcatagcagatgccacacaaattgtcagctatgctcaaagacaaggcattcacgtaatggctgaaattgatgttccaggacatgctaagtcatggtacaatgtaattctaaactttactaaatcaatcaatcaatcaatctatctaaccatataacgtaatgagagttttcatttttttaggggaaatgggtacccatctctatggccatctaaggactgtcaggagccccttgatgttagcaatgacttcaccttcaagctaattgatggaattctttcaggtatttatcatactcatactctcatctaatatattcttgctgtgtgtgctaattcactttcacttgttccagacttcaagaaggtctttaaatttaaatttgtacacttgggaggtgatgaagttaacacaagtaactacactaactaataatctatatatgcttgttattatttcagttttcttttttcagaaaagaataataataacaataatgttgtgtttcaggttgctggacaaccactcctcatataagaaaatggtaattaacttttatcttaagaagaaacatatatccttaattaagagatatccagttatttaataatcttgtgtgcaggttaagaaggcatggtatgaatggatatggagcttatcagtactttgtattgagagcacaaagtatagcactatctcatggatacgaaattgttaactggtacagtatatgcttgcttttatatatctccaatctaatttaatctaactattatatatgaaattgttacttaagaatctctacatcatccccttgtttgaaaatttttacagggaagagacatttaataactttggcaaaaaattgagcccaaagactgtggtacacaactggtatgcaaattgaatagaccttatatttacatgggatttggtatagagtatttttgttgagagggtaataatgattataatattgtgagggtgagcaggcttggaggtggtgttgcagagaaggcagttgcagctgggctaaggtgcattgtgagcaaccaggacaagtggtacttggatcatttggatgctctatggcaagatttctattcaaacgaaccgctcgcaaatatcagagaccccaaccaacaaaaactagttatgggtggtgaggtatgtatgtggggagaacacattgatgcctcggatattcaacaaaccatatggcccagagctgctgctgctgcaggtatgtaagcttacattgcaatgcattaatgaatttccatcattgattatgatgagggggcattttcactcatggtttttcctgctttgaaatgtcatgtgatgtgatgaagagcggttatggacgccttatgataagctggcaaaggatccgagggaggttactggaaggcttgcacacttcagatgtttgctgaatgaaagagggattgcagctgctccattagctggaccaggtagggttgctcctgaggaacctggttcttgctaccaccagtaaaatcatctttatatttataacattcacattcatttgatgtcatgttactaatgtgagtataaatattttcccattagatgagttttgctttgtggctgggacacaacattataaaaaccatctctttttacttgtgcatagcaattaggaacagagaaagcatctcttttataatataacagtgaataaattgaaaggcctctgtttgcaccagatagataaatggaatgtaagtatgataagatccttgctgtagaataataaagcagtagccaaatcaaacaaaaattgaaaagccaattacaagctattggagctctcaggcccctttgatgcaaagagtgaacactcataggagtcaagtcatgggtggattacacgaacgacctgcttgccaatattcttgccagaaaataagccaacaagagcagatggtgcactttccaagccttcactcatgtcttcaatgtacacaatctttccttgcttatagtaagtggaaacatgttcaaagaaacgagggaatgaatccaagtaatcgctttgtaggaatccttgtatcttgatacgcttgggtatgacattgaacaagttgtgcattgtttgaggatcagagagactgttgagggacaccattccacaggcggcaaccctaccgaaaactctcatgttcccaagtgctgcatcaagcatctcttttcccacattgtcaaagtagatgtcaatgccttctgggaagtacctgctccatccataacaattaaactaagctaactctaacatcaacatgttttaactcaaataatgctatatctgtctcactatactaaggttgttcatgaacatgagtattggtcccccttacctacctaattaacctaattaactttatggtcaccatcaccagctggaccaaccaatcagattataagtggtcaatttcatggtaccaagattgaaaaaagataaatgctaaaaggtacaagtggcccctcttaattgttatatcgttattggtacaatattgttaatcaatagcaacacttaggtgtccaatagcaatgctcttcaaaaaaataaaggagaaaagggaaagagtgagtaacctcttcaaagctgcaaccaagttaggctcatccttgtagttaaaagcatcatcaaagccaagcttattcttcaataaatcaacctacattattatagttaataaatatgtatgaatgtatgtatgtatgtatgggtatagtagttgttggttaaagtaattactttgtggcttgaaccaacacttccaacaacatagcaaccatgtaacttagcaagctgaccaacaagctgaccaacagcacctgaagctgcagaaacaaaaacaaactctcctttcttggggcaacacacctcaaacaatcctacgtaagcagtaaaacccggcattccaagaagtcccaaatggtatgaaagaggaatttgattttgatgatcatcatcaattttcctaagttgttgggcttgctggggtgaagaggttagtgtgtattgctcccatccagtcatcccactcacataatcaccagctttgaaatctgggtgatcagatttcacaacttgggacacaccaaaaccttcaagcggctgtatataaatatattacaatacaataagttattattacgttaagaaattaaggagaaggataatatataagatatatatatatatatatatatatacctgggcaggaagaaatgggggtagataggagtcatgaaaatctctcatacgacctctcatgtaagggtcacaagagagatagagattctttaggagaagaatatgtttatttggatttggaaggtaattgaggtgagttgtgttgagttccatgtctgattcctttggaattgtgtctacgtagcctttcagcaacacttgtttgttctctattgacattgccattttgagtaacacagaagagagaatggatttcaatattgtttgtgtttttctagtctaagacgtaactcatattaaatacccatttcttcttccacttacctaacagttctactattactaacagttatttaacactgttacacacacactcaaacacaatgaaacgtgacgtggcaccattttgtttacaaatcctacctacttagttactttccaatttccatccacatttctcacattgcaacattattctacttaatatttatatactatagcaacactttctgataaaaatataggaggcaggagtcccgagcacaatgctcttattattaagtgtagaattttggggtaagttgaaaaataccatttttatttatcaattaattaaatttacatctagttttatatttaattgaaatatatatacctctttttatatgtattg

SEQ ID NO: 112081 - DNA, 3540 bp, Cannabis sativa
ttcacgaagcggcttgccaattgtctctccttggggtttgatccctttaaagttcccagtaggtaacttatttgatgattcatgcgactcagtatacagagatagcatttttaaatgtgcaagttcctcctcgagcctttggacatcatcattgtgacgcagggaatctagctctatctttacgcgcaaagcttcaagctttctcttgctactaatctcagctgattctttcaagcgtctttctactacaaggtctgttgaggcgatctgtttagccttcacctcctgtttccacttcaactgtaataaaaagcaatataaagaacgatattataaatggaacactgaaatctgtaccagaagaagaagctatataggattagaacaacagaaaaatgtgctctaaatttctgtgaactcgcccaagttcagtattcacaaactacattaatttctatgcgaaaatcaaatgataaccaattttatagacaaatgaggtgaaacccaaaactatattataaaaccctatggggagctccaaataaattatacccccaaaggtgagaagcaattaaaagtcaattcccaaataaagatattaaaacatcatcctgtcctgaaagtcataactaaatagcagatgaaagacaaactaaaccaaaatcctgcagtttttaccacgaaacgcatctcaagactattcaaagtgcataggcttaaggagaaagagaaatgaccacaatggatccaaaatcaacatgacagagtatgatctcctcacgacgccaagaaacagtaacacatttatgcaaagttgataaagctaggtataaacacaaaccatccaataagtcgaagaaaaaaaaattctggaattcacaaactcgaatccgtgtgatgtgatgctaacaatggtggagcatacacttctcatcatacaaatttgttattcaataatccagataatataaactatgctgaccacctccagcccaaaaagattgtgagcctcagcttaaaagtaattgctggagtaatttcgatgttttttttttttgctattagctgtactctcaatttatatctacattcttgagtgtagactcaatgactcatagtggtgttttggttggaaattgttgagggaatcaaatgcatgtaactactaaaaatatgtctcaaactagtgtgcaagttcgttttcaaatgataatctcactgaatcacttcatttgcatactgcagcatgaatctttctaacacctaaccacacaaagaaagagactgaaacataaatagaattaacgcacctcagtttcctttagattttgcttggcctgggacaaagtttgctctacatctaaaaccttctctttttcattgttaatatcctcttgcagcttggctttttgtttttcccaaaccaaaagcctcttcaaacactttttctccttctttgtgagctccaaacaagcagtaactgattctgcagcacttaatttggaagcctccatctctgctcttatttctgcattctgagtctcaagacgtttcacatcagcatttgctcggtctacttgaccactagctttcctcagagcattctccatctctgaaagtctcttcattgttgtgtcctcaagagtttgttttcctttctttaatctctgagtctcctccctttccattcttaacagcttaagttctctgagatcattacttagctttcttgcagcttgcatagccttttggtgagcccactccttcctctccttcacttgtttctcaagatccttgacctgatgaagcagattaactatcagctcatccttctgatcctcagccactaactctgaatactcatcaagtttgagatcacggaatttacttaatactgagttaacagcttcctggtttttcgtattatgaggctcctcacactgcttggcagaaacttcagcacctgatccaaccaaagcattcccacttgccactgtattcaagcaagcttcggcttgtggttgacactgttttgagtttgcgcggaatccagctgcaaacaatgcaacattccttttcaacaacgacttcattgcaggagaaaggttaagcctttttggacactcaatttctctatgcaaagtggcatccccaccatgagaaaaaaagccatgaattggagactcagggcctccaccatttccgaaaccccaaccactatggaacctacaaagtgcgggtgtcacagcaccagctgaattgctaccattattaacattgtcagcagcaccagaagcagcagcagcagaagtagcagcaccaccaccattaccagaagacgaagtaagaaccggaatttccatagtactcgcacgacctacatgaagatcactcattagcaaacaccacattgcatctcctttactaaaatgaggcctaacctgttgcaacaaagacaccatacccgcaagagaatacttctccaactgcctcaaatcagcacaacgttgttcagattcatcagaagaattctcattactactaccacaactactattcaaataagccagcgagttatgtaatatattggtcaaaacatccatgcctccataacaatgcccattactcaaaatagctttatgcgcaatttcctcatcataacccaacgcaacaagcctagaaatagcttcattatacaaaaaatccaaattcttcaacaaaatttcctccaattgttcctctgtacagtacccccacccactatcatcattactagatatgtggctatcattaggaatgggaattttagggcttaggctggtagaatcaatcgaacccatattgttattattcttattattactcaatggtttaattagacccgattcaagtatcgatttcgaaatggattctttatctaataaacaacaaggatcagtttccagtttcacagatcttgacctccggttcgcacgaacatgcttctctctcacagtacaacccatgtatatcaatggcgaataccaagaaacacaattaagtaattcaagaaatgaaaaaagaaaaaaaaaaacaataacaataatcaacaacaacaacagcaacaatgaaattgattgaagaagattcaatctgaagagaaggaaagaagaagaaaagaaactcacagagagaaatagatgatgatgatcggcgtttcgttgctgaaacttagagagagaaagagagaggagagagagagagagagaagtgaattgtgatgagttggtatttatatatatgggaactgggaggaagtaagtagtaagaggaggcgggtgttggtggtgatatttgtccacgtgtctacatctccctttggaccgtttccagtaattttattgggctgaatccctaactagcccaactttcggcccattgcttggttttgtcaacaataccatatttcatgggctatttacaaaacaaaaaaagggaattacactttataccctttttatattgtcttcttttatttttaccctcttttttaaaatctat

SEQ ID NO: 112082 - DNA, 3331 bp, Cannabis sativa
tcaagttgctttatattaagtaaatattagttttcaagtcgctgttagctagttcaaaatatagtatatctatcttttcaatttacatgggctagcgtaccctgtatgctgattggtgtaaaagtatgcactccatccattcttatcatgaccaatataagagaatggtttaattgcttgggtctcagaggcctcacaagttaatgttttaagtacctctggatttcaccattggatctgctacgctaagcaagcttgtaaattcatcagcataaatcagattgttgaattttattttttcagataactgtgagtttaacttgacattttactcaagatcaggttattcaaacgtttaagcataacctattaacatttattctacatttgcttttcgtctagttctcatttaaaaattatgagaaagtaagatgtataattaattgatcatttgattgttactttttctttcggtgttttcaaattctaatgggtgtattgttctgatgttagattcacccacgaatgactcaacactggccccgttggctcatcgaactgtcttgtctaatcagatggtatttctatattttttttacttattatctagtatatcttttctcttttaaatactacctaacatgagcaatctctccattgtccagattttgagaaaattcaaagttcaatattcagaaatcaaatggtcaggcaatgcttggatctgtgccaaacagctcaagcactacccagctttttccaggaatggaaatactatagcagtaagttacaacctcatttccattgccacactagctaaattgttctattgtttctagatgtaatggtggtcttctcttttatctgtacaatacatcactgtgttccttttgttatttatgaagattattatttctaactataataatattggacttctctgtgctctgtacgttgctttgttttatttgcatttctatttatcacgatttcaattaatatttatgttcctctgattatcaggtccattcctttgtatttataatggcttcagactaccctcactaccttggttacttggaagatatgtatgaagataggaaagggcagaaaaaggtaaaggtacggtggtttcaccattatcaggaagtcaaggatttaatcccccacttaaatccacatcctagagaagtcttcatcacacctcatgtccaagtgatcagtgcagagtgtgttgatggtcctgcaactgttttgacacctaagcattatgagaaatgtgtagatattgtcacagaggatttactatctggacttcgaatgtgctttagacagttgaaaaaccaaattcttagaccttttgctcttgctaaattacacgggtactctaatcaagcaattctttcctccctagatatcgatactgttcccaagaagaaaatcaagttctctaagttgtgtggtggagatcaggatgaatttccccatgatgatcatgtgagggttggttccaagaggagtagaaattacaaacctgagcaaggactggaaaatggtactcttggttctaaaagttctggtcccaggaatcagacaacaaactgtgaaccaaaatacccaaagttgaaatttaggttgaagaagccaacaggtgtgaaaactgttggatttgaagttcagcctcctacatccttttcggttgatgagagaatagaggtgctctgtcaagatagtggcttacgaggctgctggttccagtgtaagatattgcagatatctcagaaacttctgaaagttcagtatgatgatgttaaggatgcagatggcataggcaaattagaggtattgctgtcatttgaatatatatgtgattgtgcatttgtatgatttgcatcctttaataggaaacgaaaattactaatatgcatagttttattgttgtaggagtgggtaaatgcatatagagtggcttctcttgataaactgggcatgagatgcagagggcgcttgacaattcgaccgtgccctcccaaggattcaacagagattatgtttgaagttggaacaccagtggatgcatgttggagtgatggttggtgggaaggtgttgttactggagttgatgtttttggacccgatacggtgcaagtttttcttcctggtaagccctactattgcattatatttttgcaaatttaaagcatatataatccttcttgtggtattttttgggtgctgatatttatctaccatggctctctttgtgatctaaggtgaagggaagcttttgactatccagaaaaagaagattagggcttccaaagattgggatggatgcagttgggttagtataaagccaaggcctgacatactcttatgtatacctgaaaatatcagtcccagtattactacaaaggtctcaaagggtacaacagagttatctgggtctgaaattcattgcattcctaagcatgaagcttttgatggtccagatggaaaaggattgcatgacttaaccgagtctgttgagcttgtaaaaagtttcgccgattccaattcaataagttgtcctttgggaaatgataagattgatactaatcattttagtgctaataaccatgctgattttgggaatgaaggtgaatcaggtttggggaaagttctttgtcatcctatttttgagaaaagtgaagcaggtgtagcagaaaatatggaagtggtctcttcttagtcttagttggtgctggctgaagatcttagaaaaggcagggttcgttgtttttgtagatagacttgaaatgtgggcatgggaaaatgcaagataatgttctaatttcctaacatcaaaagaatttggctgtggtgtacaggaattgatgtatgtggtaagtgtgttggggtagaaagaaaggtgtagtcatagttaattcaggggcgatggtagtattattagttgtagctcattgctatttgagtgaagtgagaatatgtttatatgcacgttattatagtattttctttgctgagtaaaatagttctatacttagacggctttttgggtttaattgtaaagctttaggagttttgtttgggttaataaaactagagtgtttcatattttattagctatataaagatatagctgtttgcttcctatattatacggtaattggttgctaagcttccatgtttctcctacattagtgtttggccgtgtgagacaagggttaagaaaatgtcaccataatataggaacagaactaatttctattctataaatctatttttatataaagtgtacttatataacagaatttttgatttatgaaaa

SEQ ID NO: 112083 - DNA, 7924 bp, Cannabis sativa
  modified_base (45)..(46): a, c, t, g, unknown or other
  modified_base (7878)..(7887): a, c, t, g, unknown or other
tttgttgttaattttttgttacatgtatgttattttttgttgttnntttcatgttacttttatgttattttcgtgttatttttctgaaataccgtaaaaatataaaaaaaaatattatttgaacctaaaaatataaatattttacaaaaaataattatttcaatttacaagcacattattcactattaaagactctagtcctctcttagtaacaagtctcttattaaagaagaaaccctcttctcttcagtcttcacaatccaacttctcactcctcttcagtcggctgttctaaccgctactgtaagtatcaacgcttcttctgtttttcttattttattcatttctatctatatatataaacagaacagcgcaattccttggaaaatttcaactctagtattatatattatctgaatcaaaaggaaattaattgatgatctctttctctgggttttttcttttcaattctcatttgctgtaacagtccataatccctgcatttggttgaaccaagaatatatgttatgaacgattcttgttgaactgacagaaagatgggatttttggttgttgtatttgcagccactgaaaccatttctgcaatcaattctaaaaataacttaaatccttgaaaattttaaaatctagcattctatggatcaaaggaaattaatgattacttctctgttttttggtttgaatccttttttgttacttgttacagctgaattatggataataaaaaacctagaacaacatcatcaatggtggacagaatttcaaaactacctgattcagtcattctacacatactgtcgtttcttcccattgaggatgttgtttcaacttgtctcatttcgaagcgttggaaactcatgtggtataaagtccccaaactctctttctctaataaaactactcgttttagattgagagggggacagaaaacgttctgcaattatgtggacaattgtttggaacaccgcaagagagttatgcactctatccccaattcagtcattactcgttttgagcttcacatggattgctataaaagaagtaaggctgcccacattgataaatggttagcttttgttgttgagaatagtgttgaggaaataaatcttttcttgtctagagctaatgatgatgatgatggtcagctttactactattgcttacctaaaacagtagtagtcaatgcaagttgtttgactgttttggagttgagtatggtcgagttggattctcgttactcgtttagttttccatctttgaagtctttgtcattgacccttgttcggtttgcagataaggatgtggtagatggattgttgttgggttccccttcccttgagaaattgtggttgatttcttgtagtttgagtaatgatcatcagctccacataagtagtttaagcctcaagttcttgaaaattagacttgctaatatagtggagcaaatcgaagctgtaaatcttgaatctttggatctatactgtgtttcctttagcaaaaatctatctgtaagcaaggcaattagaaatctctctttaacttgcgattggcgaatggaaaagtcatcgatagaatatctcatctcaagccttcctctccttgagaatttgactttaagcaactgtcaatacttgggattgaagcagattaaaatctctagtcaatccttgaaaagtttcaatttgaataactcttatgatgttgaaatgaacgttataattgaatcagctccaaaattagcatcattctgttatgtaggtaatatcaaatttagtatatcaatggagtcacctaatttggtaaatggaacattcataattatcgagcgtcgcgagaactataatggagattggtttatcgaaatgataaattttcttttgaatctcaattgttcttggaatagtgtaagcctacatgttgattcagctaaggtatgtttattacttttcttattttatattttgctgttttacattatatttgatatttacattttcttaattttatgcatgaagggtctcatcttaccagaaaacttgaagaggttatctcattctcctttggttaattgggaacatcttagagtttttacagattatgaaccagaaaataaatcagatttgagagatgctctgatgtggatttctccttctttgaagacattgtctatagcaaaaaagggcatcttcttaaaaactttttaacattttaaactatgattatgggtatagatcactgtctgtgtttcttttggagattgtatttactttataggtagttcaagtgacaagactaatgaatcctgctttgcttaagaatgggatttttattctttcttatttttgcttgtgaatgagtatgaggagtacacttattcacagatcgattaacaaaattaacagaaacacattgaaaatcagccaataaagttttacaatcagaaattattgagccaaaagaggaaaccataacaagagaactgaggcaattaaaccattactcttgattcaactaagcacttctttcactccagttgcttcagcttcaagtgtacgaaaacccaagtcgcaacatttacattagccttgagttgattctcttggggtttaagccaatgttcttggttattaatacttgaagtatcagtaaccaaacaaaatcatctggttcttgagaatttttttcattgttcaaggcttcgtttagcaaataccgccacttccgagactgattgaatggctctgcttctaatatcgttcattcaacactttccacactacaacagcaagctccacaatctccctactgctttgttccaacagtttttggaaccatgcatcatgattgttagagctgaatgttcctctcttcagctccaacgagcatgattcaccgagaagctaattggaatactcgatattaaagcacgatctctttcattaaacaaatcagcatggatctcagtatctcaactttgttggtcactttgcaaatctgcagaacatggcctcacactagtagaactgtgaagaagctatttattctcttttcttttcgcaatgtgtttaatgaaaactttaaacttcataacaactttttgaaaatttatcttaaattaatggtattttgagtgaaatttcatagctttgttttgagcgtagagatagtaaccttctcgttcatagtttagctaagtatggtttgaacatttaaatatcagccatttgctgttcgccatcgtattctattgtagttgtttctctggtttagtgaaattcctttacaaaaaaaataaaaataaataagctttaaaaacttcaacaatttttagttttcaattcttacttctcaattaaaattccaagacaaatttgagggatcaaagcataggcccgggaaattcttcagatttttttagtaaaaagaaaacagtattcctgattattcaatatttaatcgaattatgaggattattagaatctaatattctcttctgttctctataaaaaaattctaatttatgactgagtgtgagccaatatacttagctgccaacttttaccaatacttggtcagtaagcttgtacacacattgctaattgaagcaatatatactaacaataattacaaatacaattttaataattaattagcaatgtttactaacagcaaaatatatagccgactatactaagattctgttttgtacatcaaaaagaattaaagagctacaaattaattaaactaacagattcttattgggaacttaaattaattaaactcaaatctagatcgataagcatttttagtgtaccttagaagaaattatgtatctactgctagagcttggaaaaatacacagcagaacatcttgaaaccaccattaacttgtaagtatgggatcatattaatcttgattgattgtattttatgtttctgaaccagtcaaatcacacagcacaaacttcacaaggaaatctaagggaagaaaaagttgctttattaaaacaaataatggccagaaacaaatttgggtgatatgtattattcactatctttggtcttagctttggagggttagacagcgtacatgaatgaattgggggttattttttctgatattaaaatttgattgtctagctttcttggggcaactctctctcatgtgagccgcaactttaatgttgaggttcagaaattggctaagcatgtttttagaatagacaatgaacttttttggatggaaataacccccacctcttgtgtaacttttgttacttttgttattttaacctcggttacccaaagaaacaaaaggcctctagccttcaaatttgtaaattatgattagaaaagattgtaacaacaaaagcatagaagagaaaataaataaatcaatagagaaacctaagcagccaggtttgtaatatccaactccaagagtaattcataaaatttcttgtgaagtttaaagtttccatacaaagtgaactaatctagtattccaacctacaaccttggataccaaaagcagcaagagatgaccgtttaagtatagataatgtttttaaagaaggtgacatccacaacagagcatctctcaattctgattctttctctagtcgtgtagcaaaaactgtaagatgcttccaattaagcaaagaagaacgacatgccctcctcaatttttttggaaagatgagagccttcaagtagagaattcaaaaaaaaaaatgaattaaatatcaaatataggtacaaagaataataacatgaacttgaaagaagaccacaaaatcaaatcaaatgagaaataaacataccttaagtgtgtcaacatgcaaagttaccttattccaacaacaattgagattcaaaagaagattcaacaaattgataaaccaatctccatcaaatttctcccaaggccatgcaagaattatgaatgttccattcaaggaattggatgactccattgttatactaaatttgtgtttacctttataacgaaacgattctagtttcggagctgattcaactacaacattcatttcagtattttcaccagagttttctacactgaaacttttcaaactttcactcgaaattttaatacgcttcaatcccaagcattgatcattgctcaaagtcaaatcctcaagtagaggaagatttgaaatgagatattctaatgatgacaactcattcatattaaaatcacaacctaaccatagagttctaattctcttgcataccattagatttattttctcaaagggaacaccagctagtgtcatagactcaagatttaccacttcaattgactccactattatattgtcactcactacaacttccaagaacttcaaggctaaactatcactatgaatgtggagcttatgatcactacttaaattacttaactccaatctctcaagggaaggagaacccaacaacagattatccaacacatctttttccgcaaaccgaacaacacacaatttcaaagatttcaagtaaggaaaactaaatgtgtaactacaatccaaatccaccctaaccaaattcaaaatagtcaaatattttgcattgagtaatggtttaggtaagctagtgtagtacatgataccgttctcacgatcatacttttcttcccacaacacaagatgaatttctttgactttattctcaactaccaaacctaaccatctatctatgtggtgagatgcatgagcattgtcccagtcatattgatctatgtaaagtttaaagctagttatgacagaatcatgatgatcatcattatccatacctctcttgcggttttccaagaaattattcacaaaattgtagaacatttcttggccatctaaatgtccaatttttttagtttggaggaaattgagtgtagggactgaacaccacaagaatctccaacgctttgaaatgagggaagttggaaggagatcttcagtggggagaaaggagagtatgtgtatgagaatttcatcatgtagtttcgaaattctgtcaaccttttcttcttcaaacaccatcaattttgatgtcgttttaactcttttttcagacattgaaatgaactgtaacaaagaaacaaaaatagaatttaattgatttgaaaatattcatggatttaagttttatgactagttgatacttacttgtgttggtgctgaaatttgcaaaatactcaaaaattaagaacttttggtatggttttgaatacttctggtgctcccagtttttttatatattgaattatttttatttttgttaaaaatggcaagtcaataacaccataaaattcgggaccattactcacactaattgacacgattttttttttgctgaataatactaattgacagttattgacactaccctaaagtttatttagtaactcattatatagtaactatgggataatagtagggatgtgtcatttttgctcggataacttccttatctataaaaaaattttagtctaaattttttcataagcgtatacattataatgattttctacgttggttgagaatcatggggttccatctcaaaaccaattggcaatgagtggagtaacccatgttcttatatatggctcaattttctaccatttattctatgtgggacattgtccacaatacaatcggtagtagaacctcctcgaaccaggttaacctattgtctaaccgaagggtatattttgccaaactatgagttgtagaattcttaatgccagccacatgagacaaaactaccctaaaaaatttagacaataaagttataacgtctttaaacagtaccctgtcacaatgaaaagtaccttcccattataataattatcaccatagctagcgaaactaaaaaacataacaaccaccaaactaaaaaatacaattatattagaatgacaatcttcaaaataaaaattaatatacaaacttaaaatttaacacataacccaaagcacaagctcaacattactaaaaaaactaaaaaaacaacaaatttccaagtataactagccaaaggtattacctttgtctagtaacaacaaactagcaccctaatttaaaactgctgaaaaataataacaaatagattatatttaaaattaatcttatcgaacaaatttctataattgtaggtcctctacaaaataatctacaaaataacaaaaaataaaactctattaccacacaataaaatgaataaagataatgtgaacaaacgatggtaaaccaaaccataataactataaggacttagaaagacttaaataattatctattaaaactgaaaaagtcgttgaagtagaaattatgagcacaaaatgaatcacttttcttgtccattgcccatacctttaaaactctgaatgtcatcttttgcatagaaactacttcattattggcatttcagcatacacttatctattgttttggacttgtctccaagctatttagttttattaatcagcttcataacaacttgcaggctaagcattatcatttgttgatgacacaataagaaaacattatttgatttttcttatataactcaacactgaatgtttgaaaatggaagagttgtcgctttgagttctcattaaggatgtgaggagagctgcaggttgcgttggaccaactaccttaggccagaccataaactcggcctattgttttaggcagaaaagcaaaacattttcaagcttcactccattgttggcaataggtatgtgttcttggctagttcatttatttttctattttttcgtcattttgattgctttaatgcattcatttgaaatgaccaggcccggccctgggcatnnnnnnnnnnggcctgtgcctagggcccacccagtccaggggcccaa

SEQ ID NO: 112084 - DNA, 5770 bp, Cannabis sativa
  modified_base (5742)..(5744): a, c, t, g, unknown or other
gtgctttcaatagagtgttctagtttgtgtgttattttctttcttcttgaaactctttggagctgaactctttcctgggtctttagtctgctgtttaggttttttcaacactatttgcacaatctgatagatgagtattgatttgagattatcctgctaaattactttatttttagtttagttgtaattttctatctgtaaattaatttgaacatctttaagaatctccagatgtcattgaatctacatgttatttgttgacagtaaatgaagccttagatgagtattgatttgagattatcctggaaattactttatgtttagtttagttataatacccgatctataaattaatttgagcatctttaagaatctcccaatgacattgaatctacatgtttttgttggcagtaaataaagccttataatttggttctgctgatataatgaatatgctttatcacataggagtctagaactaacgcaagcaaatttttttgtagtaatgcatgcaaactttgggacctttaaatattgaaaattacattaaactctgttattaacttccttgtagtgatacaaactaatagaaagatatggatacatgtatatagtgtgatgagtaaaagtcaatttttttttaattgatccactttatgtgcacctgtgttgcagtgcatgttgtaaccctcagttcaaaaagttccaagtaatgatatacgtgcacacgcaatatgcaccagaattttacacacctatatgttaattttttcaactaattacatatatttaaggttagtgtcattaagttgaaaagacttgtcacataggtttgtggaatggtttggtgtatagtgtgtgtgctcatattattacacgttccaaggcttttgttgagaatcgttattttagatccattaccatatttaacattcatcatgcaatacaaaccataatgaaatatggttatgatacttgaatatttcttcataattgataaatctctcgtactgttttttctgttttttggttgttcagaaggatgagtctgcagatgatgaagacgaggcaaaactagcaaggagcttaaacaagcagaggaaacactcgatatcagcggtccatatgggacgacataaaactgtcttgagaaattcctacaaagacaagggtggtaagaccacttacaactccaaaatccataaacaaatgtgtgtctggtaactataagagtaacattaaggattagatggctcctgttttggctacaaaaacatcgtgagtaacccctcttacgtacaatttgatgctcttctacccatatcttgttatgctagtgatgttttaagacatattattggtacacgtggtattgtataggaatgcctctttgtagtttttacatctgcaattgtcgcaatataatactgcccttgcctaaaaagtaaaaaaaaaatgttgtttcatgcgagttttcgtagagttcaatcagctgatggtgctgtggcacgatgtttgtaggtgggtctcctgatcaagagtctacagaatctggaacgagaaggtcaagtgtatctggcagtaggtttgggaattgcaaggagttccttcgtaaatttgtggacagtgaggggctaactgcataccttgaagactggtttgaatcaacatcctccaagaagccagcttttgatgttccttttgagctgatagacctgcaaaaattcgattatgcattggaaggaatttcatttcaacagctgattaggatgcccaatgctgtctatgcttcaacatctgagactgcggaagcaactgcttattttgctgttgaagattttttacatgctagcgtaaagggcttgtgggaagcattttggggtcaggaggagcccatgcctttctctgttgcttgtctgtacaatgaaaacatgaaattttatcaggctgagaaggcaattactaatggaaaactcggaggtctttgtggtaccggtatactgctgaggaatcccagacatccacatggtaagtgggatcatattcttgaattggctctgcttaggcctggtattaaaaacattcctacaaacaatgatgggcagcctgtgctcgctgtcttaggtgaggctcttttttatgctatccgagtgttattatcaagaagcttgagtagattgaatttctctgagacttcaaactctgtgtatattattcttgttgattctcaatatggcggggttgtcaaggttgaaggagatctgaataagttggagttcaatctcaataatgtttatgaatgtgctgctgaatgggttaaaaaacattttagaatagcagtgtctccaattgataggatctggaacaagctaggaaatgccaattggggagatattggtgctttacaggtactctttgctaccttccactccattattcaatttgctggacttcccaatcactcagtcgaggatttagctgctgatcacggttctcgcctgcagacaagaagggctgagaggcagttgggtgatgccaatggaaatggtctttttaggttacagcagtgcagtatctcaccagaaattgttgaagtccaggaagaatctgtaaaaattgagtcagaagaattgatgaaattagaagtaggatctgtattatggttggaggactcaaattggcaaaagggttaccagatcaatgaagtttttattacaggagaacatccatactatgttgcctcacctgcggacgaaccgggaaaataccgttttctatatgtcggttcacatccttctaagctggaaccagcgtgggaaggtatggatttgtggtatcaagttcagaggcatactaaaatattgactgtcatgaaacagaaaggtttatctagcaagtatcttcctgacttgagtgcatctggcaggattatccatcctggtcagtgtcagaggtctagctcaggtggaaactgtgaacacccttggtgtggcacaccaattctagttacaagcccggttggagaaacagtgaacaatatgataagcggaggtcggtttggtagtgatgaggctatcaggtgttgtcatgactgcctctctgcactttcaactgctgcttctgcaggaattcggcatggagacatcaaacctcaaaatgtgatttgtgtgagaaatggagtgaggcatccttattttgtccttattggttggggacatgctgttttagaggaaagggaccgtcctgcaatgaatctccacttctcttcaacttttgctctgcaggagggtaagctttgttctgcttcagatgcagagagccttgtttatatgctatatttttgctgtggtggtgagctacctgaacttgattcagttgagggggccttgcagtggagagagactgtttggtcaaggagactgattcagcagaaattaggtgatgtctccactgtcctaaaagcatttgcagattatgtggacagtctatgtggcacaccatatccaatggactatgctatatggttgaaaaggttaaaaagaaatattcaagtagaagactatggaaaggaagctgatacatcaggctagaacttttgccaccatgtctgaatatggatttttatctttccctcattgccattgatgttgatttttgcgggatgtttttaccatgccatgatctggagtctgctttgctttgaacttggtaattaattaaattgacaggttctggcgagtattcctgtagaagctcaagcatcatttcattcatgatggtgtggtttgtctcaactgtttttattttatggacatcaattttagctgcttcatggtttcgagtatagttattcctgtttccagtgtatgcaaagatgttcttctgattacaacaagttcaagagggttgggtttcgtgcagttctgtttctaatttctgggatcaaaagatcattgctctctgcactcgtgataagtttgttattggtattttctctgtaaagatctaaatcataagtttcctactgtaattattatgtatgaaagtaaacttacttgccctactgtatcttagggcatccattgtaaatgtgtggttttctagaaggcccttgttatcaacgtgtcaaatattgtcaagtgtcaacccattttatactttgttataattgcatgggcaaattcctttgttttattttcccatctacctttgtaaacgaggaaagcttttattttatttaattttgatgaaaatatgtttataaataaagtgatctcaacaggtagaaaattcatgtataatatatagagtatgtttataaataaagtgatctcaacaggtagaaaattcatgtataatatagagtaatttgtggtgtaaataattaagtttaacacgctattgcagataagtatttaagtatattttttgacgataaaaatactttttgtcatactttttaaatttttgtagatacatgttaattaacaagttaattcctatgtggcagcacctaattagtgcatgattatgcccaaacttttctttgtcaatgttttgatccctatatatttttattcaaaatataaaactcaattgaaatattcacatctcaatatttcaattggaaaataatcttgaaaaatgataataaaatgtatttgactaatacaaaaatccgacaaactctcacacaacagtagcctcaagcgtagaaagagaacaaagtttgactagacagagctaaccatagacgaagaagtgtcttcaaaacaaaggcatacctccgctaaacaacagtttagtggcaagcccaacacatttatgtcggacgatccccctccgaatcaatggagatcatgctttcaagaatgttaggcatggacccttttagaagtagaaaaacaaagggctgaaattagagacatcttgctatatctagcatcaagattcacaagaattctacgaaattggtggaaaagcctaagagagtacatgcaacttaaatttctacaggcaaaattcattaaagttgcactaaatcacttgtatgtcaaattttgcggacaagactctcaagtggttgaacaatttagggccaaatttttaaaaatgaaatgctgctcaataaagaaagaagatctaggattacacttccaatggatgactaagaggttctatcttatcggtggcgttgacgatccaaacctcaaataagcgttccttgcatctataccagaatcattaagagaagaaacattcaaactcctttcaacaaacaataaagcgctgcagaatacatcctttggagagctctttcaaatggtaatgagaaccttagattaatgtgctcttaaaacaagttctttcaagaatacatgaagcaaacaaaacaacttgacaaagcatgcatccaaaaaggtcttacaatcagatgttcaactaaagacacctactcgtgctcaaaatagaaggacgaaaaaagaaaaagcttcaagaatagatctccaaaaaatagaactccttggaagttcatttagaaaaagaaacatcctgaaagatcctcaaatcgatattttttgtgtggaaggaagggaaactttgcaaagcaatgccctatagggaagactgccaagatgataacacacatagaagatggcaatgggatatctctctctcaaacaacgacgttgagtcaatttttcaatcaaagataaaatattgttggattttatgccctannnaaaactctatttcaatgtaatccaga

SEQ ID NO: 112085 - DNA, 3152 bp, Cannabis sativa
  modified_base (3008)..(3029): a, c, t, g, unknown or other
  modified_base (3078)..(3084): a, c, t, g, unknown or other
aaatattataactaacaatattcataaagtgaatgcttattatgagacatccagtgacgagtttccgatatagaaaatgacagcacttaaggaaagacaaattaaatggtgctattggaaagataatccttcgatttcacatttctaaataataaatatgtctagttccataaacataaagattgtcaattttctcactttaataacaaatgtttgaaaggatcccctcgtaaattttttttttattggattaaaaaatattttactcatacaccaaaaccaatcttaaaccacttttgaagttgtaacttaagatgaaaaagattaccaaaaaatatatataattttttcgatatactatttttgactcttttgtaaggtttgtaggcatgtatctctaagatactccatacacagcatgccacgaagggaagaaagcaccatcgtaacgcctccttatcccaaatcctcagcattacttccccaatgaacaaaatgcttctctaagatactcaattcaataaattgtatggcagggaagaggataccccacaaagctgagcaaaatttcctccatataatccgtgctgagaaaaattattttgtcttcttctataagtcgtcctagcaaccaacttatcactttctttgtctagtgggaccaagtgatatttcctatttatatccaaccgaaatagccattttcttaaaccaatacaacacaaaaatctaaatactttactgctctgtttcttactccctgttttgaagcagagtaatctgcttttctcttttattacaacaaacaaaaataatccatctcaactttcttccctgttcatggctcctcttttttccttactcttattctctctcatattctcctcaagccaagctcagcgtccaccatctcctgggtacagcccaagttcaaaatttggttcaattacctttgctcaaggctttaagaacctttggggtcctaagcatcaaagccttaaccatgactcgttgaccatctggcttgatagtagctcaggtgtcacttcgtaacatcttacccattttcgtgctcttctcttttaattatgtctaacaaaagaaatatgaatcaaattgagctagctcgtactgattttgctcttctaaaatcagtgttgaatagtgctattttgtttttctactaatttattggactgcattttgctctcacaaacaggaagtggtttcaagtcacttcatccatatcgatccgggtacttcagtactgctgtcaaactccaacctggttatactgctggagttatcacttcatattatgtatgcatgttttgtcttagaactaaagtcttcttactcaaaactaatatatatataatatgttcaaaagtgatatctgttattacttttgtggtgcgataactaattagagaataaattgacagctttccaacaatcaacagcatcctgggaaccatgacgaaatcgatattgagttcttagggacaaccccagataagccgtacacgttacagacaaatgtttacgtaagaggaagtggagatggaaacatcataggtagagagatgaagttccatctctggtttgatccaacccaagatttccataactatgccatactgtgggaccctagtgaaatcatgtaactacttttaaccactcttattatctactaagaagtaatatttttgtgtaatttgctttatttttcttttatgatagcagatgctttaaattgaagatatacgcgtaaatatataggtattggatgtgtatatatataggttccggatgtcaaaactttataatactgttaaaatacggaaaacatattacaggaaatatataatttggtaataacattgaatcgtagattactctagaagggagccagccgtatacatataatcattttaatgtgtcagatacaaaaaatgtatgcagattctttgtggatgatgtaccaataagaagttatccaagaaagagcgatgcaacattcccagtgaggcccatgtgggtgtacggatcaatatgggatgcatcctcatgggccactgagaatggcaaatacaaagccgattacaagtaccaaccctttgttggtaagtacatggatttcaagctcatcggctgcaaatcagatggacccacttcatgccgctcgccctccgtcacaccctccggcactactggcctaacttcccaacagtcctcagccttggcttgggttcagaacaattacttggtctatgattattgccatgaccccaagagggaccatacacaaacacccgagtgttaaaaagttaaataacctggcttcaatttggttcttgtcattggtgtgtgctccaaaatatagtgtgctttggcgtttttttagcattattatggtgtcaacaccataccgatgtgacgcaattgattagcggcttcatatattatttactaaatcaaattataaggtgcctttttttatactgtaatttgtaatttgggattaaagaaaaatattcaagtgtgaccgtgtgatagattaggagagtcttgagatggcccccttgctaaaatagttgcaagagtagttgaccgtccgaggccccccgctctatatgatttgcaaatgatcattggccttatttaactatattgtaagtatatattttcgtttgttattgttgaaaaatacgtccagttctattttttttgaataaactaccacatcattatctcttacttcagttacatgtttgttataagcagaacagaaataaagaaaaagaaatagagaaatgggttttgattacttagggattttattggtgctcattttgactttgtgaaaataaaatgaaaagactatatagtgttaggaagtattataacaaatcaaaatataactcaaagcaaaataatacaattataaaaacaaagaattattatgttataatttttaaccaaatatatgttgggttttgtgcccnnnnnnnnnnnnnnnnnnnnnnaatcagatttattaattaataaagttcagaaatcattttatgttgcatnnnnnnnatgatttatttcatgattatctttaatgtataaattcttttaatcccagaacatatgtatttgttcat

SEQ ID NO: 112086 - DNA, 1615 bp, Cannabis sativa
ggccgaaaaagtgttgctgggcctatttttttttttaaaggcattatatggctggttttgggccctaggttggagtgggccctaggcacgggcctagtccgcctagacccagggccggccctgaccatcattattctgatgtatgtggatgatattatcatcatcactagaagtgatcctcaggctatctcttctctcattcagaagctgcataaagagttttcactcaaaaatcttggtcatcttagttacttttttggtattgaagttcaacacacttcaacaggcttgattctcactcaaactaatatggcaaaggatttactttacaaagcaaaaatatagggagcaaaacctaattctacacctttgactagtggtcaacacctctcagtttttggctatgatcctgtggaggatgtgcatctctacaaatctattgtgggagttctacagtatctcacgccaaaaaaattatttagtgtaatattaggattaggcttatattggatttattttattttgggctttgtttaggttcttaccactttgtataaataccactttttcccattttattggataatgagaaatataccaatttccctaatatgtaagcaaagtgttctaatttatgcataattcgcttcaagctcactggcttgctattaagcatattttgagatacaatagtggcactttagagttttgtttacacttacaaagaccctctgatcttggactaaaattcttttgtgatgctgattggatcacaaatcctgataataggcaatcaacctctggatttgcaatctttcttgatcccaatctcatcacctgataatgtaagaagcagcataccatctctcgttcaagtatagaggttgaataccggagcttgacaagtgtggttgctgaaatatcctggttacgctctttgttttcagaattacacattacattacctcggtcaccaacagtctagtgtgataatcttagcaccattatgctcactcacaatcttgttcttcatgccagaaccaagcatattaaactccatctttattttgttcaagaaaatgtgctacatgagcaggttgaggtcaagcatgttcctgcttttgaccaattgacagatggtcttaccaaggccatttcaaactccaattatcagcttgtgggaggatgttagaacagtttaagttgttaattgcttagttgtccaagttagttaaagagtcaattatgtttgttacctttcggttaaactcttggcacttttggttcctttgggtactgatagtaatgtttatacttgtactaccaaagttcttcccatgatgattttttatgtaattttttttattgaagaaaaatatgttttattccctttatatggagggataaaaaaaattaatcctgaaaataatataattttaatcaaataagaaattttctataattttatttacaatttaaagataggttaattagcaatttttcttctcaaactttgacatatactaaatcttgctccctgaactttttttgtcattaaaaatttttcctgaactattgagattgttagatttaagaaattttgtctaatttcatt

SEQ ID NO: 112087 - DNA, 10690 bp, Cannabis sativa
  modified_base (10380)..(10383): a, c, t, g, unknown or other
gttcggtttcaattttttgaacccgaaactcgtgaacccgaaaccggccaactcgaaacccggtaaacccgcccgatgttcagccctaactaaaggtatttcggtagatctcttgttttggtatccaagaaaattttttagtctaatttttttataatcgtgtatgttgtagttatttaagactatttgtaaattttaaaaaaaaattaaataatttacaatgtcgaaaaataaaatttatatattttattatacgcgcgactattttttcttatatgcatggtaaataattatttaaatcttatttttagtattgtaaattattcagaattatttaaaaatttacaagtaatcttaaatgactataatgtacgcaattataaaaaaaaatagataaaaaatgtttttagatgctaaaatagataggaagtctgtcaaaacgattctttaaatgggtctaaaagaatttcaaaattgtttaatggttcttgtgcatcattggtgtttttatcaatcttaactattcaaaaaaaaaaaaaattgtcttttctatatcataaaaataacatatgaagtaaaacatattaattagcaaatgtgttagtattactctaatttttaaaggggaaaaaaattagcaaaggtaagttgaacaaatttggtaatgaaattattttagggtaaatattattttagaatttctattttgcaaaagttatagatgtagaaaatttaatcaattttatcataatacctctaagttagattattatttagttttattttgacaaaaaatcagtttaaggtcttatttgtaccattttaaaaaatacatgatttattttatcatttaacaaaatagaaaatctcatctataattttcatctataattttgtaaaatacagaatacaaaataatatctaccttattttattttgaaattgaattgatccattttaataataatttataataataataatatgatgatgaaaataggtgtagttgtgtgtagagagttgaagagaagagcccaccaactatgcactttttgcccttttctttgatatgtcatttttcttcttaggtatctctgattcatatctaaacaaacccttaccccttctacatcaactcatcaactcatgaacatcaacatctaatcttcttcttcttccttcctttccccaaatctatttcccttttctctctttcccctttacccaatacccacctcttttcttcttcttcttattgttattattatcccaattttcctacctgccaaaagaagaaggaaaaaaaaagtcaattctccatttgggcatatctaatttctggcttttcagctttagaagaacttgggttgcttcaagatctgatttttattttttattgggtgtttgagatttgaatctttacaagttttgtttttttttttcttttagtgggattgattccaatcaattatagatttatgagataagggtgtttgtttgtgtgtttggattgtatttgagattaagagatgaagagaggaaaagatgatgacaaaagtatgggacctatgttcccaagattacatgtaaatgatacagagaaaggagggcctagagctcctccaaggaataagatggctctttatgaacagctcactataccatcccacagatttggttctggaaataatcttcctttgaattccaaatccccaaccaatatggttccttcagcttcctcaagtcaggtaataattattcacaactcactttaatttcttttcttttcttttcttttctttttggtattcatgagatgggattcccatggctttcaaattagtgatggaaaaaatggttatttctcttatgtgaattcatatttttattaagatgtatgatttatatggttttgttgaaattagctagtgaagaaaagaaatgcaacttttgagattgattgggtactattttggtcagacaaaaactactcaactggaaagttgtgtaaatgaatgaatggtacaatgaatgttgttagaagctccttacttgttttgagctctaattatacggttttcaatagatttagtatattatgattgagtttccaattgttaggaactttttaaattctcattctggttaagggttcaaatgagctttatgctttgtaagcaactcactctttccttgacaattttgttttagcactagattgtaaagttgatcaaaatagtagtgtttgtgggcaagagattattatgccattccttattggatggtttttattgttgctttattttttctatttattctttggtttagggaagtggtgttgaaagaaataaagtgtttactcgtaacggagctccttcaactcctactcattggtctgaaaatctccagcctcgtggggaagtaaaaatcaggaatgctcctgcggccacgacacaacttgagcagagaaagaaggtcggagatgacaatgatgattttatggttcctgtgtttgttcaagcaacgaatggtcggtgccagggcggagaagcattttcttctgtaagctctactcgtactagacagcctgtggaaagacaaaatgtctatgaaaagaatccaaagcaacataatttgatggctgccacttttatacaagatgcagaaagtgagagaagagagaatgtgagagcaaatttccaaagtgggaatcatattgtaacatcaaatagagagaagagtgaagggcctctaaagaaaatcaaagaatcttcaaatatggaaagcatcgagcatgctttgtctaattttagcaggtcatgtggcagtgaggctggcttacatcaagagtctagagtaggggggccacaactggagagcggtggacagcatgatcatctcagcaaatcagcaagggatgcggagggagggaatgagttccagccaagaagcgagccccattgttgggtggaacgtagcaggtccaatgaacctgagaatgatagtgaccacaacagcaatagtaacagaacttcacattgtgaaattgaaactgtagataaattcgatgatggctctgagacatcaatggtggattcaatatcaatcacagatatttctccggatgatgttgttggcataataggtcaaaaacatttctggaaagcgagaagagcaattgccaagtacgtactttcgctctttactttttaataagatatttttgctctttgtggtaaaaatatttggaggaattatgcgttacacgttggaaatatgaatgtactttgcatatgcctttattattggctcttgagatcgactttttcctcttcaaggagagtaatcaatacctaggaaagtatcaaacgtcttgtgactagctttagctttttctattatgtcaagttatattttagattgttgtattttctatggaattataactattaaggagtacaaattaactgctaatatcaagatggcttggaggatggtgaaacatttaccttgggaattctgagatccgttttaaagttgaagttttttgtgctgaaaggccctcgataacattttaactgtggatactgaatcatcttacaacagggagacgtcaaggcgaccccgagacagtttatcatctcattattttgcccaatggcatctggttttgggtgtaatcctgtctcggtttggtagtgcttggtttttccctttgactactggaggtttcttttttttttcatggaactcaagggcctggagccgtgaggaaaacaactggaggaatgtaattttggcggggtggatatctgaaactaccagttttgttaattagtggtggctttgtttggaggaagatagtctctcgtataaatatctgactctgctcatttgacattcttaactttgtgatgtattttcgttttttaactattataagaaacgtattctttttggggttgcttgttatgattgagttcatctgtgtttgttgctataatgtatatgcagaattcaaataacaagatctgccttgcatttctcttctgacttgggtttaattttatttagttaataatgaaaaggcacatgtaattgcttttatttgcatcaagatttccattttatgtgttgctttgaattgttccatatgtattttggtcaaataagtgagcaaattaagaaatcagttactagtgagtacctaggctaggtgggtttggcataagatagatatcgaaaatgcagtagtctatacttgtgttaccttgtgttggttttaatctttgccaatgttcatttgtggtaacaacactatggaaatatgttcttgattcaaactcatgttactctctacagtcagcaaagagtatttgcagttcaagtatttgagttgcatagattgataaaggtatgcctctctatataattcttctatcgaaaggtagtattattgcaattgcagttgctgcacaaagtcttttatattgcttagaaataacttgtctttttattttccaattaataggtccaacggttgatcgctggatcaccaaatctcatggttgaaaatggagacatcttagagaaatcgcctttaaagggctgttatccagcgaagaaacttcaacaagagtacgttgttgtaaagccgctacctgttattgcttgttccaaagatgattcagacaagccaaaccgaaaaagggagttctccgcagaaaatgcagttgggaaagaatcatttttctctgtcgaaacaactagtcattttatgaactacggaccctacttaggatatccgcagccagtggcgaacatgactgataatggaatgggtccttggggtttccatcaatcagcaggccctcagtggttggttcccgtaatgtctccttccgaaggccttgtatacaagccatatactggacctggaatgatgggagcaggttttggagggcacggacctccttttggcccatgtcctgttccaaccaatttcgcaaactcagcctacggaattcaacatcatcaaggagtcggggttttccccggtaactatccagttggtcatccgtactatcccccatatggcatgccaatctctaattcagggaagtcaggttcggcagttgaagaagggagccagttatccgaacctggttcgaacggtgaaactggtcaggtacctagagcggaagtccattcaaacaccgaacaacaggggtcctgtaatctgccaaccaagaaaaatgtatccattcccaaacccagaaacagtaatgattttcaaggaagtacagctagtagtcctagaggaggaagaggtgggagaacacaagaaaacgggtcgagtcacaatgctcctcgtccgcctcctcctatagctcccgtcgttccagaggttgcttcttttcagcctcgtcttcatcatcaccatcaccatgataccaaccagccaatccgagtgatcaaagtcgtgccacacaacgctcggacggcaactgaatcagctgctcggatattccgatttatacaacaagagagagaacaatttgaatcaatctagatagatagacagatgagttgtatcctatttgttgtgtttgtattcaccttccctatctttgtttttgacctagttgtactactatagcatagctgtaaaagatgagtagtgtaatgctgttagttgagtgagtgtaatatgatgaatacatgtataaatttggtctctcttacaagtatcctaagcttctagagacattgagttttggaatgagagaactaaactattacttttacttggcttgcttcaaagttgatttgaaacttgccaaccattctattattatttctttagatattaatttgtacaacaaaaagaacttcttgtccttgtggtggattatggagtaactccattgattccattttgcaactgatagtaaatatgagtggtaattatgcaacaacaatagaataattctttatcactcatcagattctttgaaaaagatttgcttgctgagagttggagtaagaaaagaagttcattatctccatgatcaatttaggcctaagaatttaggaaatatttgtattcaaagtttgatgccttacactttatccatcaaactcttatatagcatctctattaggaaattacttttaaaacttttttataaaaatatgccacttttaggtttggccactttttatgacatattttagcgtttaaattattttatgatattttctgtacatatatgtgtaaatttaatttttaaagtacatatttgatttaagataaattatttcaaaaaaaaaaaaaatcaaagttatttcttctcctcccatttaagtatcctacatgtctcaccccctcaacaatctacctgctgacttttgttcaccagcgaccaacggctcaaacggaccttagatatgagatctccaccaccaaaacttcaaagaatcgaatggattctgccgcaattagagatctagaaactaatttctcaataaacaaatcttatatgagttttgttattcgtaactggtttcttcattaaaaaattagatttgactacataaaagtaattgatttcttaattcattatcttaaaaaaattatttttaactagcttcttttcttcatcaagaaataggaaactgatgttaattatatagaagtaaaatttatataagtttttaagttttttttttgtattcctttttatctatgatgatttatcttatatttattttttttaaaaaaaatatattatatttagtgcaattaaatttacatgtcatatatattaatatttttttctcatatttttataaatagcctatttcaattgagggaatcttcaaccatttttcatgtggaatttatatagaagctaaactaacttttacatgttagtcttttatataaaattgttcatctaattcaattttcacataatattaaataatttatgttattaatatatatatatattcatatcggttaaatattaaatatacaatattttttttaaaaaaattctcaatcaataaaataaagcaaattattttgatatctacaacaataaattaaaataataaaacaaatttttatataaaagaaaaaaaattatatgtagaaaataaattggattagttttagattataattttttgtatatatattaagttttaaaaaatatatgcagaatgtatttattttttttttaaaattattgattcgtttaactttaaaatattaaatatgtaaatttgattcaatggttatttttatatgtaaattaatatggagtttatagtttttcaattcaatttgcacaagtaattagattagattagattatttgttttaatattgcaaatatatttacattttatttgttattatacagtatccacaatcacattggagagtataggcattgaagtttaagaataagaggatataggtggagccatgagtttcattatgaaagggattaagttgttacaccattcatacacatagtcaataaagtaagaaactaaggacaaagtggattttggcctgggccaccaaaataaaaggtgggctcaagcccatacttaacctcattgaaggcagagtagcagtattcctcatcggcccaagtaccaacccactgagggtacttgaatgacattgaatagtccataatcctaacatttttgacataagaagcaaagccatggccagcagaggctgcctcaccactccccatggcagtggtcgtgtgaggctttttccttacgtttgggctgtacacttccccaccccattgaaccattattgcactttgtttcaaatacctgaacagacttcctggccaataccctactgccacgttctgacccaatttaagccaccaattccctgtgttctcatcctaagtataaacataataataattaatcaatcattaataccaaataattgaatctaaattatatttatatatattacctgtgtaatggtaattgggagttcgtattggggtcctctttctttggaccaaggctcaagggttccacccaacactacttttggattggtttgaataaaacctgagcaagtcaggtcaaagcaacctgttgattcgtattgatccttctaatatttataataataattaataattaattagctacaccaatatatttatattgaaaattaatgagaggggtcgagtttagtagtagttacagtccaatatacgaaaagtcgtgtggctttatcaccatataactttgggtttacgacccacccagcttcaatgctttcaaagagatctgaaaccccagctttaagccatatttgaccacttgagtattcatcttctaaaacaaaagggttccaaagattcaaatttgcttgagcccccatataattgtatccaagtgtcaccagcatagccacctgttacattatatataatttaaaaaaataacttttaaaaaatatcgctaactcataatattcaaatttgcttacagaacgattgactataggttcttgattgaaagtggtgttgtttgggaaaacaacatttggttttggtgtagtggtagtgatggagtgatgatgataaggattcttttggccaaaacgttggagattattattgtttaataataagtgttttctttggattcttcgaatgggaatggttcgttgtgggcagaaacttccgtttctttgccatatttgagaaacaacgacacttttaaaagtgtcgttgttttgttgttcggccatctgaatagtatggttgaccaacgctgaatgatcaaaagctggttgtttgtatatgtcaatacaatctataatatctccatcactactctgcaaaacaataataatattatttatattattgatttttcaactcaacatgaaaaaataatatttatatatatagtaattgattgatgcatgtataccttgatagtcttaagaggaggtttattgagaagcttcaacttcaaatcaacttcatcctcataatccacatgactatgagtagtgttgaatggtactactctacctgtgtttgcatgttcaaccaaattcaataatattattgcaaatgacaaaatcattataatattcatcttcatttctaaattatccaattaaattaattatatataagaacccacaacaaacattacttatatatatagctaaagagaaattattaagatatataaaaggaatattctttgtaattaatataatgagctgtggctgtaaaggatgaatatgaatcatcctaattaacatattaaacacttattattaacaacactcaaattttaattattatgaatatgattatggaatcttaaattataacaaattaaatttcttcctctctgttatatataattaatttatatccaaaattttgtcaaaaaaataaaaataaattttatatccaaaataggaaaagtattttgaataacgtacggacacatgaaaattacatattaatacataatagtattctagtcaaagtcaaataattcttattttgatcaggtatttattatttcaaattaaaatattatcatatacaatacagcaagaagttaatttctgtgaaatgtacagttttcctttcctaattcagaaatatttgaaccttaattttatgtaattaaatatatattatttccattacataaacatatgcacagtactacagctatacatgatgcatgcatatatattcctataataattaggtttcatggtttgcacaataataatgaccttaacatagatatgtgagaagtttcagaggcatactatatgctcagtagctttacttcataaccgatgctaatgcttcgacatttatcgaatagaatcagatagaactgacgctatataagagtcggtttaaaatgatactaaatgtgggtgtcgtagtagtggattgacataatttacatattggatgaaagtatagtgtaattatagtatagtttttctaaatgaaaaagttttcagaagttattattttccttagaaagttgttaactcgcggaagcagcacctggaaggctttcttggaaaactagtcctcttccggaaaagagtttcgaatggctagctgttcctcctaattaatgtagtcttgaataggccactccagcttactctttcctatccggaaaggcctgtagcgagtgccttcaaccgtgactccagaagccctcttacttgttctccgatacactcttacttaggctgacatatggagacatcgctcataggagaattggttaagttaggtgttgcccctgattttgccnnnnatacgtggaccaaccggatggtgacacgtggatggaaagagtttagcatttgaataaaatagctaagtcttcctagagcgcatgattaccttagacatgcctcctagagaaggcatgtaaatctcgcatgctcccggagagcaagatggcaaccaagcatctctgggaggtgtcaggtttcatctgaacagtcatttcacaattaatgccgcatgggaggaggcgtattgaaactgccatacgcagtaaagtctgacgagacaacccccaatctgtacctacaaggctatgatcaataaagtctagt

SEQ ID NO: 112088 - DNA, 9361 bp, Cannabis sativa
aatcatagtgtggaagattgtgaagaattccatcactaaaggaaatcttggttcagatcttggcaatactctgcgacagaaaggaacaaaggttagagatctaaacgaaaggacccataatattcctctgccaccaatgtaaggttttctacaactttatatatgtttatttcattgttttaggaaattcatgtttaggatgttatattatagattataatcaatcacacatgttagtaaatctagatcctggtaaaacacgttccaacaatttaaacatgcatttactcaactaaaatgtaactaatatgctacctatcacgtttttctaatcatgcttaccaaattaaaacatataaagacttactgaactgtgagtcgagcttatctttgatgatgattgtacatatctttattgtctttggtaaacaacctagcggatctgataccaaaattataacatccatctagattaggcatcctatagttgtttctcaattactatgcaacctttgctaatcaaagggtttattgaaaaagcattattaatttaaacttttacaataatatcaactgtatcatagctttacaaaatataggatcccgggtttaattattcaaacattatgaaacataaatgccacctagcgactaacaaaataagagtcctagctatcccaaagatccaactccctaggtcaaactatcttgatatgtaaaatcttaatcgagctctagactcactattgctcaactgcagtcttaccaatatctgcacataacatagcatttgtgagctgacagacccaataagaaaagcataaaatatgaatatataaccaacttactactaagagcccatacacctatcaacaagtcataatgaataaacatagaacgttctttcatttgctacgcgtgaccatgatattagccattactagcactatggtcacgttggggagccgacactatgattgtactgctatgatagcatcaatctatacttaaaagtacaattgaccataatatcactcttatctggtataatgtttgtactactgactcgatactatgctcgtaatgttgtgataatgtcaattaatactttatggaactaaatattagttaaaaccaatactatgctcgtactactgacccggtgcaataattacaccgctattgtatcaattcatatttcttagagttggatatcagccactgcccacattatgaccatagtggggacccaacacgatgattgcaccgctacgatatcaacccattcattatggagttgccaaacatatatatatatcaacgatatctagatacaatcttacgtacaccaactatcgttctaaacgatatgtcatgtaaaggcaaacacaaaactatacatatgtatgtgtgttatgctagtgcaacctcatttttatatttaggtgcgtcggtcaacatgagtggaatatcacttactgaacagagaccctatgtcacatttacataaaataggtgagtaacttgctaactcacttttgggatcttaaactcaaaactagaggtttccctatcaataaatagtgtgacaaaaccctaaatatcgagaaaacacaaaaaaatgagacttcaaaaaaaatcccaaaaaatggtaggtcgtttctataaaaataacagaccgactttttgggtgacctccagtaaaaaatggtagaccagtctactattttctactatagaatttccaaaaatctcattctcaaccaaaataaacccaaatcagacacaaacttccagaacacctatttacaccatatacaacatattccaatagataaaaacacaattaaatcacaaaatcaaaacttgccattattgagcaaactttgagctcaaaaactctagcttgctcaacactcgccacatcagccaaatctcaactaaaatcatcaaaacaaatttaattaagctcccaaaatagattctaaacaacctaaatcctaacaacaacaaacctaggattacacaacctgaaacctagctttaaactaaaatttaaagaatgaaaaagaaactagagtcttactttttccttccaactacttgctcttcaaaaccagttgtaaatcgtcaaggaaagaggtttgattgctctagtttctttagttctcctagaaccgaatagagagagaaaaaggataggttggataaagttgattttctatttcctttacttaagataaaacctaactttatttccatttacttaattaatcaatctttaaaaaccaactaataaaactagctaaagacaaacaaggagaaataaaccaaaccatggaaatttactaaattgccccttcacgtaacacttaagcaaaacaagtgcctaggattaaaatggtcaaaaaccataccccgcagaaccccaacattccaaatgtctaccaatcttgccttgccaaaaaaaaataataaccaataccatgtgagtctaatggcaaaattgtttcctttacactgttaccatgtaaacaacacaaaaatataaaatttcacatattgtatatataatacatttagaatttaattaaatctccaaaattaagaaattataattcaattacctatttcttgagaatatgacccacatcaaatattatgcacacataatcatataatacaattaatcgatgctaaatgtctactattccatatcttaagtatgcggtcattacacttggtgagtccaaaaacgtgttggggatgtattttttgatgcctaatgatattttgacatcaattagtcaatttctttgctctggtgaagttgttcaccaattctcaaagatgttgctgtttcacaaaagtaggagactcgaaactacccaatttgttcctaaatcactttggaaaaaaatttgaaatatgaagttatgaatttgaatattttgagttcatagctatcatgtactatgaaaaactagatgaacgctcgagacagaattagaatcagattagcaaaacccagtacacccggtcatatgtcaacctgggcgttgggtgctttttttttttgctgattttgagatgtcgctttgatacttccaaggtctttgaattcgaggtcaaggtgccctaccctgcttttgaccatgcaggagcaaatttggcatttagtgaccgaaactagtgcaccaagttaattgttaacttgggcactagtctcagtattttagccctttaagattctcgttttctctccaagtttacttgtatctttgttatttctaattatagaaaaagtgcatggaacacttttttggaagaatgactgaaagtagcgcaggttgacaaaatatcaactagagcattgggtccattttttggccaccaaatggccacgtttgattctcaaaaatactcgtatcttaatccttcacaaaaatagagaacatacccaaaatacttcttagaaaacttcttggaaatggcataggttgacaaggtgttaacgtaggggatgggtcccaattatgaccccagatagctctatttctctcccaaaagcacttgtttcctcattttggatgaagatgaagaaaatgattgagatagttctttagtatggtggttggaagcaccccaggttgataagcactcggtgcttggggcacctggtgctctaggtgctcaaaaatgaaagtgctctaaatctaattcgtatgccttaaatatgttcgtgacatgtctaattcatttctaagtgctaagtttgggtcattttcagtaagacggtcacaaaaattgaaacccttgccagattttcaaccgaagcactggtgaaaccctaggcgcctaggttggctcttggggttcttgggtcaactcctttcagtttctaggcttcgaaattggattcttcttgacttcattactcagaatactaaaggatggttacttggaaacaacttagtaggatccaaatacacattctggagactcaaagttaacctagtcgtagggttagggaccttttccaaagttgactgctatgactagagttccttcactctaaaaatattttccttcctacctcgtgtcaaacattgatatccacgtcattagggctacttctcgggtaaataactgtctccttttttcatcagtctaaggtgaattatccttaaatagcttaaagggttgagccaaaggcgtgacaactggtttgacttcattcatctcaaatttaagtaataccttctataaataactcttgtgagtttgcaagatcttcttagatctttttccctttatttatatcccgaggatcttcttttttgcccccatgtctttcatatcaaattcactcttcaatttactcatcacctcatttatcttgagattgttcttcccaaaattaagatatatctacatatagtagtagatagatattttcaacatagtagacacaggattcataggaacttttagtgaatttgatttttgtcataaattcatcaattcagatgttccattgtctaggttcctatttaaggccatataaagatttttgtgggaggcatacctaatttgtgttacaatcgtcaaaccctttaggttgtttcatgtagatctttacttctagatttccatgtaagaaagtttttctaatatccatttgatctatttcaaggtcctagtctatagctttagccataatggtcctgatggagggttgtttcactaaaggcgagaatatatcattaaaatctataccttccttttgagtgaggccttttgtagcaagtcttgtcttatatcatatcttctctttgtctaacatcccttccttaatcatgaataggtattaactattaatcaatcactagaatggtggtttattaacagctgaccaagttttgttcttcttaaggacatcttttcttcttatgttgcctaaagccaatgtctcttacattactttcaagttattttgagtaagtagctggatctaaattttaatctcattagctgtagctaaggaaaaggctaagaagtaaacaaaaccaagtctttcaagatgtcttagtcttttatctctagccatgagatagtaatttaattcttcctagacttcctgagtttcatagcttgatcttgatgtccatctgtgttgatactctcatccaccttaatattgttctactctaaattttcatcttatttgagtgcatgcttaggtaaaggtttcattgccatttcttcctctcagaaatgacatctctacttattattcacttcttgaaacctggctcaagataccaaagtgttaaggtaccaaaggaacatgcacgtgatttctctaggctttagtttatcttgcttcacatgttcataggttttgcatccaaaaacccttagatgatcattgtttggagtttttccagtccacttttcttgaggtgtcatgaattttagagaaattgaaggatacctaattatcaagtagcaggctatagacaaggcttctccccaaaaaaattttctaacccatcaactttatgcaagaatcttaccctttctaaaagattcttgttcatcctttctctgaacccattctgttggagtgtgcctctgatagtaaacttcttcgctattccttctttataacaaaattctttgaacattttagagaaaaattctaatccattttctatcgtcaacttctgaagcttcttaccaatttgaatttcaagcaattgcgtccatttgacaaatgtgttgaagactttatctttggtttttaaaagatatacccacatttttcttgaggaatcgtcaatgatgcttagaaaatagtaagcaccaccaagggttggtattcttgaaggcccccaaagatctgaatggacataggctaactggtcctttgtgttgtatataccaggggaaaatttagtctacaacttttatctgtatgcattcttcacaaaatttgagtttgtatgttatctttcctttaagaatcccttgtttcttaaattcaaggcctttctcactcgcatggcctagtctcaaatgccacaatcttgtcatgtcgtcatcacatgcacttgtgatatttgaaactaaactagtaactagtttcccatttagaaaatacaacccattctatatttacctttcattacagttagtgagcctttaatgactctaagtgagttttcatcaattttaatagagtatccttttgaagttaaaacaccaataaacaagagatttaattgacctcacttttaaccaaggactgtgagtcaattaataagcgataagaaatgtaattaagatagagcaaaaagtaataagtaataaagaacacaagattttaaagaggttcggccccttttagttgggtaatagcctactccccttagattgtattgacttgagaacaaagaatacagtgtttcctctctaaaagctctcacaatgaaatctctgagtattttctcttagatctctctaaagcaattctttcgacccccttttacagtgaggatggatcactatttctagggctaaatgcatgagggaaggtttgccgtttgcttacaatatctataattggtaagaacatacattaaatatttagaatacataaaatgggagattcagacagcttgccatatccctttgatacgatcccataattgtaaggattgttcttgagcttcacgatatcaatccttgagtagttcagtcttgatgcacagctcggaggaatgacttcatttgttgttcggatcatctgcccttgcttggctcgatcaggaagattttgtccgtgccgatgtatcactcaaagtctgttcgaaatatttctcctgtcaagcataagaaataacagacacgtgtcactagtacgcattgccacgtcatggtgcaaaaaatggataacatttaccctctaagtctgcacgggacttccgaagttgcgcgttgacttcacttagtttaaatttgtgtctgaatgggcggcacgtgttcgatgcgcctgttggtgatctgatgtgattctgaccaaaggtctcttcaatattcagctcataaaggctgattaattcgtacctcgaaacaccccaacaattcgcatgctttgacgactgctcttcttcaagtacttgattaattgatttcccaacgtttacttttggtggggaaatcgagccatttaaatttcaaaatgattacaactctttactaatttgcttataaatagggcaaaaagtcctcataaacaacttttagcattttattgtttagtgattttcagagcaagaacacctttctctctcaaatccttcgaggaatttctaaaaagtgccgattagcgtcatccgagaaatctcaaagcttcgcacagtgagtaagtttctcatctttttcttctttaacgtttgaatctctaatttttggggtttccattgtagaaaattcaatagtcttggacttgttctaagaaaagtgtagagaatctggtttaaaaatgtaaaactttgcttgtaattgaccatgtaatatgactgttgtggtattctcaccttattttcacgatattcggttctcacttttcccattcggggttaagtgaagattaacccttaatctgaggttttgaaattctgggttatgaacctaaatcatgcaaaattccccttttttaatcccttgattggacctggtcggtatactttgtttgttttttttttcgatacctcggccaaatactcatcttgtgtcttatcttttgtagatgaaccctggtgagttttggggaggagaacatcatatcgaccaggatcttctctaacttttttacgaggaccaacctcgtctttgcgctagttcttcctcatcaagtgataggctttctaattaaagttttgaggactgggaagtaagcattgaaggtacaccttcccctgaacccaaggtgcatcatcatttctatcctgaccaaatcacgggtgaagactacggacgcttcatttgggaactcaggaaggggtggagacactacttgccattcagttggacattcatcgtctggcaagacatagttgatactatccccgtgggccgtccaactatcggtgcctttgtcattcctatcgccacctttgtcgtaaccgttgctaggcatactaaccaaacaccgttcagggataggatgatgtcctgcacaaaacaaacaatgtagagaattgttgcaacttatccttacgtggcatggcttaccacgatgatgagcgttgaataggcccggtctgctgatgaggaggaggatagtgaaggggacgttgaagtccaagagatggaggatcagggcaaggtttgtctaaatagtccatctaaagtcgaggaagagggagctactcgaccattacgcttcggaggttacaatgaagtaggggaactagtgtctgaggtcggtgatgtcttggtagagggtgatgactacggtactaaggaatacactgaggcagttcctcaaagaaggcaggatgccttaggagctcggtgggtgtctcctccatatatggtaacccaagccaagtgaaggagtttggagaaggacgaatacctgagaggtgtcaagtgctttttcccttctccaaaccattgggatactagtccaagatagggatactgtgagtggtcgggtacccatagcaagtagggtgcaatgctgcccttgctttcgtacttcaagaggattacggactactataatctttgcccgacccaattcacaccaaagggcatcatatacttatctgccttgttcatcctctatgcttctcaaggatggggtgtaccgtctccacatgacatcaacaggctcttcgacctgaagtcaactcctaagcagagcaggtcggggtacttctacttctcctaattggatgagaaatggctaaagggtattgtggactttgatgtcagggaaatagggcattttatggataggtactactttatgcagggcatggataccgtccacactcggttctagtagattcccttgtactgccatcctcctttcacattgggactcagggagggggcacaacaaattcttcaactgccagaagctgctcaaaatatcactttgttgaccactaaggccaactttgtgaagtacaagctattctcaaaggattttgtgccaaagcccgtgaaggaaaagaagaagaaggccaagccgaaccgagctaatgatttcgagcaagagaaagagctcatttaactaaagcatgaggctaagttgaaggtgttggttttgtgccctaaataa

SEQ ID NO: 112089 - DNA, 7758 bp, Cannabis sativa
  modified_base (66)..(74): a, c, t, g, unknown or other
  modified_base (329)..(336): a, c, t, g, unknown or other
  modified_base (385)..(401): a, c, t, g, unknown or other
  modified_base (750)..(752): a, c, t, g, unknown or other
attagacaaaagtctttaaatttaacaatctcaatagttcgaggagaatttctaacggccaaaaannnnnnnnnggcacgatttagtacatgtcaaagctcgggggaaaaattactaactagcctatttaaatctatctagtatattattatttaaatggctaattaagattttttactcctcgaattcttacatgtaccaaattatgtcatctgaatttttaaggttgttaaaaatacccctgaactattaagattgttgaatttaaggactttgttcctactttaataaaaaaagtctaacgtggatgaaagttcagggagcatgannnnnnnnatgtcaaagttcgagaggcataatttgatagatatcaaagtctggggannnnnnnnnnnnnnnnnaacaatcactaaaatagtaaaattaaatgaaattagacaaaagttcttaaatctaacaatctcaatagtttagggagaatttttaatggtcagaaaagtcatgatttagtatatgttaaagtttaagggacaaaaatcctaattatcctatttaaattgtaattgagataatatttttggtaagagaatttttagagtattttgtgagtataattagtaaaattgtaggatgtatcttaaaataatatatgtgtatgtatgaatttactcaattcatattttcattatttaaattctataaattgtaaatatttgaaatattctataaaatataaaaaaaaaatatatnnntatatatatataaattttaaatattataagtgtatttgttttattataggataaatattattttaaaaattatcaattaaattatttgttttgttgaatgataactcaaatctaaattttgtgttttcaaaagtaatacaaaataaatcatgaattcaatatttattaatttttttaatataactaatttgaattaaaaaccaacctaactgagtttttactttttagcataataaaattcaaattttttaatatttattttatactattttaaaaaacataaaatataaattgctatttaacaaaataaataataaagctaatattttttacaaaattaataatttaaaatactatttaccttttataatattatttgaattatttcaattttttaaagaatttaagatatattttaaatatatattatattgttatgtataatcatgaaaattaaaaattattacaatataaaaatgtatttattctttccaaaaataaaaagacgtatttatacacctattttaatattgtaaaattaactaaaatgttttaacaatagaaatacaaaatgataataaataattgttagtaggggtgaaggaagctaaaatgcgcggagcgttaaggatagcccacatggaaaagtggactagttgatagaagtgagagtgaaggagtgagttgaggtggtcgaggctgagacatttatttcatgacggagagtgggacccacctcagtacaacccacccaccttgggaattgtatttctttctaagcctattcacacaaattacaaatacatttcaaaaaatccctttaaactacccaaaattatctaatttttactgaatggtagtatacttaaatttaatcacataatttttttttattttgggaattacttatatactatttttttttatttttttaaaaaaagtagtttttatatggattattatactaattttaattgcgatttaaattattccataattgctatatagatttttgtgtaaaatttcataaaaatacaaaaaaaaaattattactttaaagtgtaaaaatgaaaaaatctcaattttttttttcaaaatctttaaaattttggttccattttaattcttagtaggcttatttgtagtgaaggtttctaaattgtataaatattagtaaattgatccttgaattttattttttttggtaaattagtccctaaactatataaagtttaactaactagtcctcaaactttatttttttgataaattagtttccaaaattttattttcttaaaaatataaagttttcactcataaataatggtattttatttatttagttttgtattaatttttaaattattaatatacgttatcaaattaaaaaaaaatacttattttttaaatattcaaagaaaaaaaaaataaatcaagatagtttttaaaatatgccgaaataagaagtaaaaaataattttttaattaaattaagatattttaaatattacaaaactattaatacatgtgaatcaataatttatctttttatgaataatacttacacaaaatatttctgctactgaataattcctctacactttcaagtaaatatttcttctcattaaataattatgtgcatgcactaaaaaaaataactatatacaaggtttttttatagatcaattatatacaagtcaataaaagtttttaaattctctaattatttttcctaccattagatatcatttcttaaagatataaaagaacttaatatgaaatctaatcatatatgtagttaaatattatttgggcatatacttttttataaactacctaagtatattatattacaattttttttaacttatactcagcggcgaactcatgaaattttaccaacgttgatgtaaaatttaaataattaataaatatatatacaattaaaaaattataatactacatatttatatatcactaataaaatatcctataaatactaaaatgtaaaaatgtgaggggctaaatttcttctagacattatatgagtccgccggtgtttatgctttgttttattaatagtatatataaataaattatattttgaatattttggtaaaaaaataaaatattatatgaatacttaaaaaataaataaataaataaaatatattaatataattgttttatcaaagtactaaaataaaaaagattttttttttaatttaacacaaaaaataaattaaaaaaataaaaatatcaacttctaaaattagggacttaatgttgttaataaaataaatgtttgaggactaatttattaaaaaataaagtttggagatgaacttatcataacgtatatagtttggtgataaatttgccaaacaataaagttttgggaccaacttaccaaaacctatatagtttaaagatatgcggtacaaaataagcattttactcttccattaacttgtactattaatgtgtacacaaatgtacatgtgacatactttcactagtttacatcgtttattggtatttttttccctaaattttttacactactaaattgtgtcctatagtatacatctcgttaataatattccttaaaatataatttttataataacatggttctttcatcatattatattcatttttgttatgaaatgggtaacacgacgaattataattgataatgaatgtaaataaaatactttgattatccattaatataaaaatagtgaaaggtttttaatttgtcttcatttatcaactatcatacaccacttctttcatttcataataaaattgaataaaatgtgatggaaaaattatattactataaaagttatatttctaggggtattataggaagcacaacttggtagtgtaaattgtaaaaatttcaagagacaaaaatgttaattcttctttaattatttaaatattataagaaataatttaaaaaattataaaaaaaaagatatatattacaaaaaatgtttagaaatcattctcgtttttttttttttttttgaaaaaatatcataagaaaaaaaactaaaatctatatgtatatttaaaaaaaaaaaatctaaaaaagtgtttcactttataacttaaaaaataattttactttttcagaaaaaatgatttataaaaaataataggaggtattttgccaaaaattttaaaaataattttctgaaaactaagttgaaaaaaaaaaatcaaaaaatatcaaaatgttattttctatttcaaaaataatctttatttttttgtaaactgtattatttcttatattttctctcacatatttgggtccgagtttaggttcaggtttgggtctggagcctagggccaaggcagatccgatctgatgttttttagtttatctaaattcgatctaattatatattggatgatagattttactatctgagtcgatctaataaatttcagtcatccaatcgatccatcatcctttggatgtagtattttttaaattagatcgaatccatctaatattttaggtcgagtatgtattagattggattggatccatccaatccaagaaaaaaagagtaaaattttaatgttaattttcatatatacatatgtattttacgtataacaatataaaatctaatcactcattcaaactaaatgaaaatactaattagttcaattggatattggatgtattagattttcatacacctatctaacatatgatccgatccaattggatattacatataacatccaatccagtcagatcacaattggatattcaatgtttggtaatcggttgtaattggatcagtcagttgttattggattggatcgatttatgcacacccgtacgactaaccctaaggaacttttgatatcagtagccgacttaggtcgtggctaatctcgaactgcttcaatctttatcgaatcgaccagaatcctatacttcaagcaacttaagcttctcattataccagctgcaattttttaatttacatatttattttatctaatctaatttagataaaaaatatggatgcatataaaaataattgacaaggctaccacataccaaagttcattttttatttaattcgtaaattggtgagctcaatgtgtgtttatttttacatgattatttagtcagtctactatgatatttttatattcacaattaggtgagtttaaaaactcactttttgcatgataaaataacaagtttatggcaagaatgcgatagtgctcgttattttctaacgcattagcacattgtatatatggtcaatcaaagcctcatttattcacgaaaagacaccactccttccaattaggcaccactccttccaatcaagcatcacaaatcttgaaagattttgttggcatgacgtcttaaaaaaaataaataatagtgatgtcaatatagaaccttgataaggtaaacccaaaagtcactcgcaatgtgacaactcaactgttcctcacgatagttttaccgtttgatatacaactgtcatcgcgaaactaaaatcatgtgttattagatgatttttttctcatctagcgagtacagtctcgcataagagtgacacgtaggtacctgatttcccataaattaagaaaaggatgacatgtcaagggtaccaaaaccctatggacacctcgcgtaataaaaaatgcgataaggtgtgattgagacaaggtgtaatcacacactatgcatcacatatgaagatagagtaaaagcaggatgtaaagagttaagcacagtcacgacgtatactgagtatacgtgatgacctaatatttctccctagcttgcgcctaaatgacagttgcactttcactacgaatggcctgaagatccaatatatacacgacgactcgtatgaaccctgcgagtgcatgtcgcctatatatgaatgtccaacatgtgacctagatatttacgctcgttccatcaattaatataaatggtcaagaaccctgagaggttcatgcaccaacaagaatcccaagaggttcacgtacgatgcattgatacgaatcccgagaggttcatgcgtctatacaaatcatgagaagttcatgcgtcgataaaaatcatgagaggttcatgcacttataagaatcccgtgaagttcgtgcattgaaacgaaccctaaaaggttcacacatccataaggaccccgagaggttcatgcatcaataagaaccccatgaggttaacataattattattatacgatggtcttataagaaacccacagagttagaaaacaacaaacgcgagctcgtgctactttttagttcttcagcatagaacaatttctatagaagaactatgggcatgtgttattgggataactttcccctctcccatgagaaggactacacaaaagagaactcgcggtattaaaagggacctcgagtaaaactgtgatatcaactgaagaggtgcgaccaaaaaataatgataagagtcaaatattcaagtgccattaaagtgagcgttacatttactttataattgatttaatcaatataatcgatacacctattattatttgtaacgatctcattatgaccattttctttgtaatttctatttactacctataagtaggtgcctccctctctattcaaaggggactaagctcaccagaatgaaaaaaaaaaaaacaaagtgtatatgagatcactttttaacaatagactagataggctttttgctaaaccactatattttttgtgtcttttttattatttatattgtgtgtcttttttattatttatatactgatcacatataattttatactatattctttgagtacaagtgagtacttgcatgtttcaatctttattaaatttctcacacaacagaaacaaaacgaaaggttgaatttcccatggtttattattgatgtttgtttgtctgaagagtatccagagaacatcagcttcgactgaagaaattcaggtcaaatttaaatagggaaatttgcggcaaaagtccccaaaatatttactttgatgcagattagtccttaacttcgagaaatagcggtaatagtccccaacgtcacgttttttaactgcttcgttagtccttttttaactgctccgtttactaaatgaaaaccaccacgtgttgaaatatcattggcccattatttaatttttttttaaataaattattaaaactaaataaattatttagctatcttattactaaaaaaaataaaaaaaataaaaaaaaaagtaaaagagaagagaaaagaaagatggcaggtcgtgagcccctctgtcgcaacacctcccccatcatctccggttcaatgagatcccaccatcgatatcttcgtcttctccatcttcggccacaccccacccccagctcagccgaacgacacccattcacatccaccctccttcagtttctattttactttccatcaataaccctcaatccaaaacctcgaatcaaaacccaaatttgtaacctcactgtgatttggaccacgccggtggagagcctagccacgactggatcgcggagggtctcgctgtgactggaatgccaagatcggggtctcgctgtgattggaccgcggagtcgctggccacgactggaccgcggagggtctcgcggaggctggttagtttttggtggccggttgacaagatcggggtttttgggtgcttgtaggtttaaaaattgtgatgaagacacttgggatatggttgaggtgcaactggtggctcggagtgagttttggcgaaggagatggatgtttaagatcgaaatgatgcggctgagagatcaagagggtgggtggtgagttttggtggttggttgacaagatgagggctgggagtggggtcaggttgggggtgaaacggtgctggagtggagatgaagaagacgaagaagaataaagaagaaaagaaaaaaaagaaaaaaaaatcatttttaaataat

SEQ ID NO: 112090 - DNA, 4464 bp, Cannabis sativa
atacagtcatccaattggattgaaagttgagcactcaagattcattccctgctcagtttaatgataccgatcatttaaaaaatacatgtaaaagtaaaaataacctgcaaatttggccgtctagcagataaacgtccagtttctgtgttgatgttcagtgaacaatgaatacgcttatccttgcctgatatgttactaccctggtacaaagaaaaacaatattccaattgagttcaaaaccttgatgggacgtttggtatgagagttagacttagtgagaatgggcgttcggtaaattaaattttaatgaacaaggggtttgtgtttctaagtaacaaacgccccatgattgttaccacacaatgctacatgagtaaaaaattactatggtgttctgaattataattacaaattaattatttgaacattataagtatagcctttgccactcgagaatcgataaactggtccatagggacaaaaagctagcaaccaatattccacatagatggccaaaaaccactgtttaatggaagcagaaatcacctgcaaagggaggatgaagtttgaaatcagtgaatcaatggcacaaacttcacagagagcagcaatggcatggcaagcttctttcccctctgcctcatcttcaaatgcggcaaatgctgttccataagcagatttgttcacatctagcttttcttgctcttgtttttcagcaacgtcatctgtaatgacttcaacatcgtcttcagaatcatcaccggctaatgagcgttccgcataatccatgaaatcaaattctgcagagaccttcccagctaaaattttcaacgcacttatactaactgatggccaaccacttgctgtgaacacctcagccggaagatcagcatcaattttatttagtgtaatattacggaattttgttggagcctttttcccttcttcaattattttatcgatatttggaattttaagagtcttctgcactggaagactgacatcggggtccttgctgcaaaaagtaacaatcgagttaaattggaatccaagcagactggcagtatcaatatagactagaatatgacacaagtaaacttcttatgcaagcagttgagagttcaacgccactactcgcacttctttctcccatctccttaaacactatcacgatcttcagagataatttaattttttatccatcgatgacttccattttctttaaaattatgcatggccgccttgaggatcccagacatatcaagaatcaattcaaaaataaattagaaggaaagtcgaattgctctcaacctagcgaataattggttatgctttccatgtatatattttgtgttctgacaaaaagaaacctaaaaataatctaatcaccacgaactcactcattgcattccactaagcaaaacttttctggtcctagacacaatcttcagttagaaaaactcaattaagaaaaatgccatataatttcataaaaataaaatcaaaagatgagaccaggattctatcatgtcctcattccaacacatcaaagaaaggatactccatactccatgttttagtcaaacatgcttaatatgtattgagatgcaacaaaaagccagttgaacaaacacctaaaattcttctttatagtttacctattctggattccgccgaaaaggagctggcgcaactgagtatcacttccaacattcatgtacttagcatctggacagtacctggaagcccacttgcgaaacctgttaacagcaacctcttgctctcttttcgctatcttttccacctcagcaagataagcacgatcaaccaacatcccctcagtttccattttgactagaagctcaccaaatggtttccagtacttctgatagaaatcaaacatagatccacgttcttgttttccatcaattgcccaagccttgtctgttagctgttttctcaaactctcatagagcttaagtgtagttattgcatctaaggcagaataacaaatccatggtatccgctcttctctttgaagcacgtcaacaggtgcaatggtagttattttgccctcagatccgtctttttttaactttttcttgccaaatatggttttcattgatactttaccgatcaactctttttcgttatacagctgagccccagacatgacctttgagtcacttgtaagtgcctcgagagaataaccaccttttgcacgccttgaggaatcccaaagacgagccatgtgcattgtatcagcatgaaaacccgcaaccttgagcccatagttctcaacaatatggtggtcaaagctataattgtgccaaacctacatagtagacaagtaactttcatgattcttcttttttatttttaacgaaactagggggctaacacatgcaccccaagaccaatttagtctggtgaaacaaaatgatggccaacaaaattaagtcagaccaatttactggaacttagtgtcactaggttcaaaaaaaggagatgaattacctttttaatggagggatcttcaaaaaagggggcaaacacagctagaatttccttgccaccaccatcaagaacatcaacccagatacaagacttcccatttccaaaatctgcttccggtccacaataaatactaaaacaaataatctctccatgatcaactggtgtttcttgcttcacatcaatattcgctacctgttgttgacatcttgttagaaattatgcaatgccacaaaggccgagcaatatatttgagattgcaattagatactattcctatcattagactcaaatttgtgtaaataaagggggaaataaaagtgcaactcaaagttgagtttcgtacctctgtatcacaagcatgtacaagatgcctataccaggttgtaagcatccaaacaactttctttgcaacagggacactatccacaataaaaactttgctataaaggctagtaaggttttcctgaagatttgaaatcctttttggcttcaccttctgcgagctttgtgtaagtggcgaatccaaccgtcgtggagtatcagtttcgtgagcattcttcttctccagtagaagggaaggaatagcttcagtggtagtaacagcattccctccactttgagcaaatgccttatcctgattgagtttatgtaccacttccagctgtgaaaccccattctcaatatcaagcagagaccttctactaccctcttctgtaaaattaggctgcatcatcacagtgtttcttgaattttgtatgactacctcatttgtcgccgccgcaaggtgcatctgaatttttcccttgttaaaatcattgctatacgaaaaaactgaaaaatgttgttgattatcttcttttttagcacttgttcttcttccatctgtacagtttgtggtagggctgcctcccactctacctctcttaattgtttcagcttgttcttgccattgtaaattaccaggctttctttcaatcaatgaactgctggtgaacaacgtatcctttctaatatgaagggaattactactactactactgctgctacacatagaagtcccagaacaactctggattttgcatatctttcccctgcaatttatcataatcccaataaataataataataatacacaaaaatgttacaaataataacccctcaacctatcatgtagtttgaaaatcttatcagtaagcaaagaatagattaaagagaaaaagaatgaagctttaccggtggaaggaggagttggaagaagcccagaagtagcgagcagaggatgaagccattagagaagaaaaataaagagaagaagaggagtgtcttagtcttagaggtgtggtgttgatggatgagacaacagtagtagccatggctgcttctgcaactcttcccatcagcttactcctacaattggtcaaacaaggaggagccagtgtgtcaacagactacagtcccagtcccagtcccaccatcatcatcatcatcactgtaaaagcatatttcttttctataagttatttcaacaaacacttagaaggcattccattattatgttttcatacaataaacttgttatacatatatatgtatgaacatataatagaaagcagaagtgaatagaagattactgaccttgaaatatggaaggaaggaggttggaggtgtagggtttatgtgtttgactctagtactggccatggcagaggaggcaaagcttgggttgggttgtggtaagggtatattcggtaataacacactttataaaaatgggtagatagattccatttaatggattttcatatgaagaggtacttttcctcaaaccctaaatacatcatttttggtgatatatcaatctatatatctatatataaatataaaggaatgtgaggtggcattctaagaattcatttctctatgttttcttttttgttatttttttat

SEQ ID NO: 112091 - DNA, 4660 bp, Cannabis sativa
tgtgcagcagggtacatcaattggtatcagagcagattgtcctggtgaatgactaatactcggagctcgaagaaggtcatggagtcggtacagtcgggagatgaagaatctccgactccagtttcgggggaatggaattcgatgaaggagaagatcgattctcatgaacggggcattgctgttattagtgagaagttagatttgctcctccgaggacaggcgaggatggcaacagagcttacagatggtcctcggagtccggttgggagatctgtgcaacctccaatcgggtctagtggatcgggaatacagaatcgggaggaaattaatggctacgggggaaggagatctgaattccgtccaagaaacattgaattacctgtgttttcgggatcagaccccgacgattggacgtttcgggcggagaggtactttgggttgcagaggctcacggcggaggaacagttagaggcggcaattctgtgtttggaggggccggctcttcgctggtttagatgggagaatcggaggcgggaaattcgtggttgggcggagttgaaggacctccttctccgacggtttttaccagcccatgaaggaagtgtttacgaccggtttttggcgctgcaacaaaccaccaccgttcaagaatatcgacaacagttcgaggcgttggcaacctcactaggaacggtggctgaaccgttgttggaatcggcattcatgaaagggctgagtgaagacatccagggaacactgcgactccttgaacccatcggattggagaagacgatggagatggctgaaatggttgaagccaatccaaaagtgactagggccttctatgctgggccgaaagggggtggaggcccaattaaaggagtggggaccccaattgctaatgggttcaatagtaacaatgctaatggaccacgaattgggccgaataccaaagggtcaggtgtgaccacgggctcaccaaatgggtatcgtaacccacatttttttggtcaatacagtcggccttcttcaacaacgacggccagagaacccaacaacatgtatcggcggctgaccgagactgaaatccaggaaaaaagagctcgcggggtgtgctacaagtgtgatggcccttggtctcgaagtcaccgatgcaaatcgccggagttgcaaatcattttggttcaagaaggagttggggaagaagatgaaaacatggttacagaggagtgtttggaaacggaaatggaggaattgactgaagctcaaatggtggaggtgtctctaaattcagtagtggggttgacttcacctaagaccatgaaattaaatggtcacgtacatgggcaggaagttacggttctcattgatagtggtgccacccataacttcatcgcttcttcgctggtgacaaagttcggcctccgcatctctgccaccgacccgtatggagtccaaatgggtactgggcaagctgtcaagggtgagggaatttgtttaggggtgcccaattacactacagaccgtggaaattgtggaggatttcttacccttggcgttgggcagtacagatgttatcttggggattcaatggctggagacattgggggagactcaccataattggaaggaagggatgatgagattcaaggtgggaggaagaagtgtcgagcttcggggaaacccagcccttcacaagacccgggtgtcactcaaaaccatgattaaggcccttcacgaagagcacgagggcatgtgggtggagcttggccatacgactgttatggaggatgacgttgctcttccagatgctatttctggtttattacagcagtacgcggaagtgtttaacatgcccaactaactaccaccgccaagacaccgtgaccacgccatttgtcttcgtcctggggtcgctcccattagcatacgaccctaccgttaccctcatgtacaaaaggatgagatcgagaaattggtgttcgagatgctaaaagggggtatatgccagccaagtactagccctttttcaagcccggtgctactagtgaagaaaaaagatgggagttggcgcttttgtgtggactatcgggcgttgaaaaaggaaaccattgctgataaatttcctatcccggtcatcgatgaactcttggatgagttacatggagctaaggtcttctcgaagcttgatttgaagtccggatatcaccagattcgagttcggccggaagatattcccaaaaccgcctttcggactcacgatggtcactatgagttcttggtcatgccattcggactcactaatgcacccgccacattccaagccaacatgaatgctatcttcaaaccataccttcgtcgatttgtgcttgtcttcttcgatgatatattggtttacagcccgaccatggaagcacatttttctcacttacaggtagtcttggaaaccttggctaaataccaattttatgctaacaaaaagaagtgttgttttgctcagcagaaattggagtacttgggtcacattatttctgaccaaggggtttctgtggactctagcaaagtccaagccatgttagattggccgctgcccaccaacttgaaacacctccgtgggtttttgggtcttacggggtactatcgaaagttcgttaaggggtatggttccatagcccgaccccttaccgagcaattaaagaaggatcgtttttgctggaatgacgaagctacagctgcatttgaagctcttaaacgagctatggttactgttccggtgttggctctccccgatttttctaaacagttcatgattgaggcggatgcttcgggttatgggttaggggctgttctcatgcaagaaggtcggcccttggcttactttagccaagtattgaagactcgggcccaattgaagtccatctacgaaaaggagctcatggccatagtgttggcgattcttaaatggaggccatatttgttgggtcggaaatttctggtgagaaccgaccaacagagcttgaaatatctgttggaacaacgattggtgtctacggagcaccaaaaatggttggtgaagttgttgggttacgattttgagatccaatatcggccgggcatagctaataaagccgctgacgctctgtcacgtgttctaccagcagcttgtgccatgcttactacttcttcttggttggattggcaattggtccaacaggaagttcaggctgatcccgtgttggccaaaatttgcacggatttggaacacaacaaggagataactgggttctcccttgatcacgggcagctccggtataaaggaagagtggttcttgctgccaactcgtcacttctaccccaattcttgaaagagtatcatgagactccaattggtgggcactccggagagacccgcacttaccaaaggcttcgggcagatgttttttggacgggtatgaagcagcaggtggtcgagtttgtgcggcattgtgaggtgtgtcaacgcaataaatccatggccatgtctccggctggcttattgcaacctctaccgctgcccgccaaggtttgggatgatattaccatggatttcattgaaggattgccacgctccgaaggggtggatacgatacttgtggttgttgatcgtttgagcaagtatggccatttcattcccctccgacacccattctccgcaaaaacagtagctgaagcattcattgctcatgttgtcaagctccatggcattccttgctccattgtgtccgacagggatcgtattttccttagccacttttgggccgagctcttcaagcaacaaggcaccatcttgaagcatagcacagcgtatcatccccaaaccgatggccaaactgaggtcgttaatcgctgccttgagacttacttgcgctgttttgcttccgagaagcctcgggtttgggctaaatggttgtcatgggctgaatactggtataacaccagctttcattcatctttggggtgcacacctttcaaggtgttatacggacgagatcccccaacccttgtgcgctatcacttgggtggttcagcagtcatggcagtggaccaaatgttggaagaccgtgactccttccttgatgacctcaaaatgcatctcctccgtgctcaacaccgaatgaagacaactgctgatttacaccgtcgggaggttcgctttgaagttggagacttagtcttcgtcaagctccgcccctaccgacagaaaacgctggcgattcgtcgtaacgagaagctggcagctcgtttttatgggccatttcgagttttgagtcgtgttggtgaagtggcctataagcttgatcttcctcctatggctgcggttcacccagtctttcatgtctcccaacttcgagctgttatcggagccgcttcttcatcctcaactttccctccccaacttacccctgagttggagttgcaagttgagcccgaggaagtgttgaatgtgcgccatggccccgctggcccgggtgatgaagtggaagtcttgattcgttggaaaaatctgcccttgtttgaagcatcttgggaaaagtttgagaccatccgtcaccaatttccttctttcaaccttgaggacaaggttcgagatattgggggggggtaatgttaggactaaggt

SEQ ID NO: 112092 - DNA, 7936 bp, Cannabis sativa
aaacacaattacacaatatagacattaattgctccacaattcacattaaattcaagcttaaagatatgaaaataactctaattcttagagttattaattggcctctattaagtatcctcaattttgtttctcatcaaatccaaaaactatttctagctaaagttattctcagcttccacaattgcaaaagcaattggataaaagttaagatttacatcaagctccactgcagttagtaggatacccttgtatggcccttttagatgacaaccatctaacccaaaaaatggtctagatgctactaagaaaccagtttttacacatccaaaagataccaagtatcaaacgcaggaaacaaacttcttttttgaacgtttctctacatatcaagagtgatatgagccaaattgacaacgaactccacccgattttttctacccttccacaagagttgattttgtgcgaatcaaattgcccaaaccaacatcactgcctaaacacgttgttcctcacccagtcgtgagaacaaatgaaaaaactagtctccaaacgaccttgaatcaactggaatcatagccaaacccgctacccacaaacaattttgtacaaaatcacaggcaaataaagaatgtaaaattgattcacctgccccatgacaaattggacaaaacaaagagacatccacatgtttagtcttcaactaaactctcataggaagacacccactaaccgccttccagacacaattttttgcctttagaggaagctttaattgccaaaacttcttctaaaatgccacaacctccttgcccacactaccctcatggttttcctgtaataattcaaacacactcttaactatatactcgccaaaagattcaaacccctaataccaataatctttagtaactgaattagaaagtagaataccaaggatattgaccaccacttcctcatcaaacaaatctttgacaacatcaacatccctagctttctcacccaccacaaaaagactactaatcttttcattagccaaatcaggatccaaactatcttgactcagaattgacctactcagaagccacggaacatcacataaaagagtctcatctccattaccgattcccttctgcgctccttacgaatcaaatctttaactgcaacaagacttctccaaatataacttgaattattaccaagtactgctcaaagaaagttctcattattaaagtaccgagctttgtacactctagaaactaacgaataaggcttggtcaggaatttccaagcttgtttacctaacatagtcaaattaaaatcatgaagagaacggaactccaatcccccaacctccttactaatactatgcgccatcctctctcaactcatctacgaaatttcttgacggggattcgtaaacgacttccaccaaaaattagccattagttgttccaaatcatgacacattcccccaggcaaatggaaaacgctcatagcaaaagttagaagactttgcgccaccaagacctccttaccagcacgtgacaagagtttaccatcccaactttgtatacgattcctcatcttctctttcaaaaaacccaatacaataaatttatttcgatcgattgtacttgggagacctaagtacatactattctcatcagcttcatttatattcaaaatagcacaaataatctcccgaatagctccactcacatacccattaaagaaagtaatatttttaccaaattaattttttgtcctgacatcctctcagaactatgtagaatctctatcactctttgagtccttcttgtgttagcttagacaaaaaaatagctatcatcagcaaacaatatataaaaattgatggagtactcttagccacacgacactcttttattaattgattccgctcgtaccgacaaagtaatgtcgaaaagctttcagcacaaataaaaaaactagactgacaagactagactagaaacgaggtgacgcaattagtgaccttgcaaatatgaaaaaacattgatgttgtattattaaaattagttatcaattaaggtcaaattattaaggttttctcaatacgacaaaaaatcccaaaagtgggtatagctcttaattttgattaatatttctaaaataaaaatccaactttcaaactttccaataattaaatgtatttattatttgttatgtaacccattacgtaacaactatataatattatccttacataaaaaaaaaacctatatatatgtagtataattattaattaatgctttatatatattttataaaggtttcttgtctctttattttttattattacatgcatcttcgggttttcccataatagtttaatggtttaaatattatagcaagattcttcaataatttgtaattaggtgtattgttctgattttaattttatgtttaaatttattattgatgagattattttttttagttgaagttgatagtggttgttaatgtgttatttcgtgtgttatgaatagtataactcatgcactagttaagtcggtttctcgttcgataggagtccatacatgtttaaattgatatttctcttaaatttttaattgctcttgtaacagttaattttgatttaatatattttatacttgttttcaaaaaaataaataaatattttagaaagatacacgtgaaaatgaaactatatttttattatgtctcaaaaaaaaaaaaaaaaaaccgtgcatttttattaactcaaatattataagttaattctcaaaattatatattactttttttagaaaacaaaagtgattttttagaggaaaaattcatggtgattttttagggaaaactcaaaggtgattcatgatccttatcttgaatagttcattcctaatagtcacatcatattaagatgactttatacaaagtcaaaaatataaaataataaataaactttgattaattttagaatttttaaactcttatatatgtgtcatgtgatatggttattatcttttacattttactatttcctaaaaataaataaaagaaaaaccttataagttggaattggaataaataattaaataagaaaacaatgctctttactttttctaaattcttgtaaaataaaaaaaaaattatagtgaaaaaaaaagactattaactttaagtaattattaatacaactttttttgtgaaattcatttttcctttttcacttaaggcttaatctatacctaatgatacattaaacaattagtattgataatactaaaatatataaaaagatcttctttatcattatgaaggaagaagaagattctttattttatttatttaattagattttttttgagggaatttatttaattagtttattacattatctttatcatgaagaaaagaatataataaaaaagaatattctatgaggtttgttattgaagatcagtgatgtctagtattactagacatgtcgtcttgtgattgactaacgatactctctaaaaattatacattaaaatactttaatataataacttttaggcacaagtagtgcccaacaccttctataggtagtgctacacgattagttagcgatatttcctaaaaattattttcttaagttatataagatgtgatacttaattacaccaataataatttgacaccgagaagagtgctaggcatcagtggtaccttttagcaattcttttaaactacataaaactcgatatttagtttgaccaatagtgatattgacatgtaggaaggtattgagcaccactactggtgccttttaatatttctcattactattctaccattttaactcatttttttttagaaagaatacaattttagacactgtattttataaaaattaatgattggaccatctattttgttaaataacaaaaaaaaaatattgtattttctaaaatagtacaaataggatcctaaactcaattttcgataattttttttaatacagccaacttaaaaataatttttagtacgaataaatataaaaaatataaacaattttgttataacacttctatattaaattaatattaaattttattttaacaaaaaattaagattccaatttattattttataaaatagggagtcaaatcaccaaattttgtaaaatatttatccttttaaaaataaaataattaataatgataataataaaaactaatatataagtgggctaaagatcaaatttttatgtcatttccattttccacatcttcttctctaaaactttcatctaagaatcaagattcaaaaggtactcttctctctctccacacaaaatctatatatataaatatatttatagtatcatctgtcattctctgagctattgtccatgaaagttctagtggtgagagctcaaccattattactatttaaaaagaggaccttttttctctcaaccccaaataaccacaaaaaagatttcctcactttctcgacgattttcccacttgccaaacaccccaattccaacttcatggccacttgcatcgacatggctccaacaggctcatcaacccaaccaaacccacgttcccaccaatccaaagaacccaacaacaacaacaacaacaacagctcaaaccacttaaagttcgtatctttttgccggagaagcttttcctccgataacacagtttcctgcgccgccacgacgatttgtccgacccgtacggtcgccaccacctccgaatctcgtaaggtaatcgattatggcgaagacccagatgaggataagatcgatctgtggctgaaaatgcaaggtgaggctcgtacggacattgaagaagaacccattttaacaagcttttatttaagttctattttgtctcagaattcatttgagagtgctcttgctaatcatctctcgttgaaattaagcaatccaagtcttcctagcaatacccttttcgatattttcattggggttctaacagaagatgaagaaatcatcaaagctgttaaagatgatcttagagctgttaaagaaagagacccagcttgtataagttatgttcattgttttttaaatttcaaaggctttttagcttgtcaagctcatagggttgctcataaattatggtcacaaagaagaaaggtgttagctttattaattcagaacagagtttctgaggtttttgctgttgatattcatccaggtgctaaaattggacatgggattttacttgatcatgctactggtgttgttgttggtgaaactgctgtgattggtaataatgtttcaattttgcataatgtgactttaggtgggacaggtaaggcttgtggtgatagacatcctaagattggtgatggggttttgattggtgctgggacttgtatacttggtaatattagaattggtgaaggtgctaagattggtgctggttctgttgtgattaaagatgttcctgcaagaactactgcagttggtaatccagctagattggttggtgggaaacaaaatccaattaagcttgataagattcctagcttaactatggatcatacttctcatatttctgagtggtctgattatgttatctgaagtgaaatgaaatgactactataatatgatatgataatggggtgtttcttgttggtggtttaagtgagaattgattctcctattggcaaacaagaagaatagatagatagatagatagatatattaattgttagattaaggtgaaaatgttgagcagcagctgtgatttttttctttatttttctttgttcttcttgtctttgtatggaacactaaaaggagaatagaagttctcttattgaaggtgacaaaatatgttgtagcagctggctggtatggtagtactgttgttgtgtaagacaattttctgctatgctaatatagtcttgttccttttatacaatattatatttatttattattttcttctgacaatttcaaggctttggtagttaatagctatgtagtttagaaagataaatataaaactcaatagttctattattttttaaagagaaatgttgccactgagtgtgtggtgtagttggttggatgattttaccttaaggttcttatttggttgccttttagagtttaaatccccatggtagcacttatcatgggctttaaaagttgcgctcttttgggagtaacgggtgattgtgcgccctattaggccatggtattcctgcgtgggaggatcttggctggcaaccatcttaggaacaatgtgtaaatttcaattgactactcggtcgtatttggggcagtgtataagccccagttgactactcggtagtctttgggatgctactaagtcgaaggagaaaaatgttaaaagacactcgcagtgtctagcaccttttaaaatataatatcgctattagtataattaaatatcatgtcttatataatttgttgtaataatttttatagagtattgtttagcaatgttttttttttaataatatgcttattggataaaactttaattagacttattctgcattagtatattttaaattaaaatcaaatgtcttcagcataaattatgccattgtttaagacagtaaaagtcaaaagaatgtgacagagtttgtattactgtattagaaaacaaaggaaagagataataaagaatattcatttcattttcaccaaaatgtaacctttgaaggtcaccaaataatatatgatcatagctcttggtctaattcaaaagataaagaaagcaaataagaacacacatatatacatacttccaatgcatttagtatcacatattctcatgtcaacttctagacaaggaataatcaaagttaaggtgtttgagggttccacgtaggtagtaccaatataattccaatggtgatttttgcaggaatttagagtttaatagggaaaaaaaacaccatatcctaggatggtataagcattatttaagaacaaagattaaggttcaaagtactcttacaaaactaaggatactctatctttctttctgtttagtattttgaatttatagtgttggccaacttcaaaataaccactaggaggatcattaaaattgttgatcatcattactactgaaatttaggttgtgttgttgtttccacaagggttagtgttggtacaaggtcggtcctgagattggacaggtcttaagaaaaataaaattattaaactacttattttaaaagtatgcaatattttcgaaaaatactaacctattaataatttaacacacattcacaaatttataattaaaaaaaaagaacatggacaatagtgacttgttggttctataacacattgtttcgatttttccaaagacaaaaaacttgaagaatgccaacccagccataccttgattgcatcaagacatcgtttgttataaaaaaaaattggaaaaaatagaagttggatatcctcaatatacaactctcaaactagacatgtcaattcttggtaaattttgtatctaaaaattctttctatgatatgtagtcgatctaagtcatctaatcctaaaataaatcagtattttggaacattgaattaacctcaaacataatcataccacttcattttctttgtccaagaggacaaaatagagtagccaaaactgattgaatatttgcattgttcagtcaaaaactgcttcattttcttccactttcactacttgtctcaaataccaaatgtcttgaatggatgattcatagtctaaccatcgctgtcatttcaaataaatactaagggaattaccccacttactatttttttaatttttttcaaatttacggtttggatttctaaaatggttgcagcactagttgcaataggggtttctatatgattttttgttgcaatttaagt

SEQ ID NO: 112093 - DNA, 3919 bp, Cannabis sativa
ttttgtagatcaatgagattgagagacagccagagaatgtgaaatggtcaaaccatagttactgaaaaatgttgcaacaaggagcttaatatgccattgacttaaatatgagaagaacttatatgctattttcatgtggcatcatttacgatatacccaaaatattatttagaacaaatcctatctgtatgacacaaaacttcagattactaaataaaaattgaactacaagttccctcctatagatgtttaaaatgaaattgagcaggtcaagactcacttggaagaacattgaagaaatgatagacttcttcctcatccattaccccaacctctgttgagcataccatgcaatgaacttgtttgaatgtttcaccaacagtctgatctacttcactctcatctgtttctcttcgtctcttgccactctttagttgtgaaatgctatcacgcaataagcatttacttccgaccttgcaattaactacgaaaattgctctgtactgcgtcaagtacttttcatgcctggaagaaatcaagttaagttgtattgtaatacatattaaatggtagaatttgcaagcaattaaaaataattcataagcttatttcacaagacattattgtaagacgaaatcaattatgaacatttttaaaatagttgaagtttgccttctatttctgaaacaaaagacatacacagacaaaacatattacaaaatgtagtgaattatgtttagtggcagttgatgttgcaaataacaataattactatagctacaatgtcttcctcatatgtttataacattcattatttttttcaacctacaatgattcttacaccagaatatgtgaacaaagaatctcattccttccaacaagaacacgagtcattactactaacacactgacaccacttaatattcttggccatcgaataagctgacctttccagtggcaaacaagtctttatggtcctgaatcttagattgaccagcgtgatcatgcagttctttcaactttaaaaaattttccatttgtcgaaatttctcgtttttatcgcagaaatatataactgcagttgttagtcatcatttattctccaatcccaaagtgatggtaatggtaataaaggacaattataatatgtctttaatgtattggccactttatgatcaagtattgaaatttcatccagtaatttttgcacattaaaagaattaataaaataggtaaaaataaaattctatcttatgattgatgcattcatatataactagtattccaaatccatttcattacttgtctgggccataaccagaagtgacaggatatatcatgcttgcaagttacatgttaaagaaaactatatcacagtccggtcatcccaatttcactacaaacctataaaacaaaactcatgatttctccattaacttcctttatcattagagcaatctcgatgcttctttcaatgactgtaacaatagcttcctgaccagtcttagtcagccattcttcatttcatccccatcaacgttatacaaacaatttatagaatactatcaacatatctcctctctacctcacttttcaatgcttacgttgttaagatgttgcacagcataaactcaaaacaaatttgaagccgctaccacattcggtacagcataaattattcatagtttcaattgtaatttaatagagagaatcaagctagagaatggtgaatttctaattatcgcattaattcattaaaagccatcaacaccagaaaatatgttattctttcttcctcattcactaggtatatgcttttctacatatagaatagtttgccttaactagctagtccaaggccataagatttcataaaactattaatggaaattagccacacatcgttatcatataattttgagatgattactctagtagatcatccaccacatttatgtcaccttcaaaactcacttgcatcgatttcataacatgtcctaggagccatatcaaaaaatgttttatggtttcatgtttacattacatagtccaaatcgagttaatacaattgtactaaacacaacaaagatcatattcccgagttcactaattgcagcctccaccactagaataatcttgactagagcatctaccatgactgtcaccatagccacttggccttggcccagctctttattttaattttaatgacctagtttatcattcatggccacctattgtattttagctagttaggttttgcttcactcacatagaatgttccatgcataagacaaaaaatatgtacattattaggaacagttgtaagaaatgccgtcctctttatacatccatttccattattaggttaggcaagctaatttcaactaaaatgaagttaaaatggtatatgtttgctgtggttacaaatacaatcatgtgtaagaagtaaaagtactctagttactagtaaagaacaagaaaaagccacactaatttcatttgtttctttagccactaccatgaccaaagaattgcttcctattcactgtgacaatgttgatttgcccctttgtagttatcattttacttgaagtagctaaactaaagctatctcatttcaaaaataatgtattaagagcacacttcacatttactttatatatttctagtccattcttctacttgatcagaaaatgtattgctcgtagttgtaaataaactaacacccattttccagcaaaataaataaataaattcacaccctacacagcatccattttgttgattaaatacctgtacgtcctctaaaaagtaatgatcccttttataactttctaaaatcccagaacacatcgaggtcatcaaccataatgaatttttcccaatgctcaatagcccatcaaaatcccactacacattctactgtgatatgttttcttgaaattttaacacaattcacttgcatccatttgggtaagttttgtgatatctttatgatgggatatcagtatatatgatatatcatcacttgttccataaatggagcttagcttaaaatgtgtctaaccttaacattaacaaccctttataagaaaactcatcttcaaatataaatccagaactggtcgtttctgattacacaaaggagcacaaaagaaaccacatgtaaatttcatactagctagttttatatgaacataaattttgaagcaaaaggaaacaaacagagtaagatgagtgttgtataaacatatatacatttgtaaatacctttgacagacgagagagagagtagtgaaacaagctgggcagctgaggacagcatcagagtgacgacctttccttttcttctgaacccataactcatctttatcatcaagctctggatcatacaactccggcttcacagaatagtcaatttcatcatcatctgaacctaaaataacgatatcaactgaaccttatccaccttttacttcatctgctttcatactaagtactagaaaaaattccaattccaaaaaaaaaaaagaaaaaagaaaaagagaatgaaattacctactttctgagaattggacgggggagtccatcgttgtgtctcttttatcactttccaattccagatctccctgactcttattttctccagtatcactcattgaagagggaagaagaaaatggaagctgccttttgtttttcttctcttttttgattttctttatttcttccgaaaaaacattttggagaaagcaatataaatgaagtatatgaactatgaacgtgggattttcttagtaaaagtgggccaatattgatctactcttatttaacacaattcgaaacagaagccctaattataatttttttttcatttttaaaatagtacaaatttttaattcaattgcaacatacaat

SEQ ID NO: 112094 - DNA, 7806 bp, Cannabis sativa
  modified_base (1571)..(1571): a, c, t, g, unknown or other
acaatattatatataaattttagagattttagagagatcttgatctattctttttttttttttttttaaatagagatcttaaattatccaatcaagtttctagattgaaggtggtaatatgactcggatgctgataacgataccaactttttaatatatgtatatataaatgtatatatacatatatttatgtgcgttaatgtgtcttaggcatatttatgtatagttaaggcacttaataactaagtttcctagggaagaacataattcataagcacagtactatcgaatcattgttgctcctttatgataattaattaattacatttatatatatatatataaataaatacaaatacataataaaatttgttatatttgtatgtatagtacttggatatcccactagaataatattttattttgaaatcactagaataatatttattaattagtaatgtagctatatatatcttacctcgacttgtaggatatgctagattttttctttcttttttttatatatgataaagcaagcaatattatccaacacaactttcttatagcactcggataatataataataattaaaacaaaaaaacaaaacaaaaacctctacgatcactcttcatttaattcagcatatcatgtaccatggatttttgatagctgattaccccacttatttgtagtttgtggcttaaatttgtctcccacatatgagtaataagagagagaaaaaaaataacaataattataatagaacaacttaattgtagtttgtggcttaaagggagagatgatattaatatcacactagactgcaatttttttttaagaaaaatgactagactgcaattcaagaggttacaactaattacatgggtgagagtaacgacatatatataataatattcttcatatattatatatgttatggagcacacataagatttcatattcaataaataaagaatttggataagccccccttcttttttttttttttatcaagtgggtacgtgtactttattatcttctctcactttttctctttctttttttttttttcctttcattatttatttattttttttttttttgcatcttatataaatagaagaccacctcacgtctcttgaaacataccttctcaaacagctctagcaatatagtctatttctatcatataataattatcccttcacacgaaaataagttagaggaactaagaagaaaaaaaaaacatatggctggtaacaatagtagtagtgttaatgtttatgtaaaatcatcaaatgagtttggtgattcattatcatcagctggtgatggtcgccactgggaattattccataagattaagccttatttgctaatggtggggttgcagtttggtgcggctggaatgtacataactagcatggctactctcaatcatggcatgaatcgctacgtacttatcgtctatcgtaatgctgttgcagcgctcgttcttgctccttttgcactcattttcgaaaggtatatatataactgctctctccctctctctctccctctctctctntctctctatatatatatatatagttattttcctgctagtcagtacttatagattctgaaatataaatatagtatgtgtattatgtatttgatcttagtaaaattaaggtgatgcatgaaaaaattgaaattaatcaagaagaaaacacacgccatgacacgaaaactagctaaatttatacatagagtcatagatatagacatagatatagattagtatcttatatatatgtacagtacaaattaaaaagtgtactcagtactatatcatttttacgtacaccaacaattagcactgcatgcatgtacccatgtacgtgtcctacaactaattacttgcgcttgttttacaggaaaataagaccaaagatgacactccccatcttcctccagataatggcactgggattcttagagtaataataaatgatttttatatttattagctggactacatatatatataaatatatgtgttatatataattaatattatcaatttttactggccagtggactaaaaatactttatttatttttatttaaattacttctggtatacaattacaaaatatattcttacattttagattttctttttttgaacttttacgaaaatacagtacatgtcgtttgccaacacaattaattatgcgccgtaaaaaggctagaatttcaaaatttagcccgcaacagcagcatttatttttattggatacaattaatatatatttataatcatcgctattaagctgcctagtactttttcaacatatcgattggctagcgatacttcctaaaagttattatattaaattatatgggactcgatacttagttggactaataacgatattaacacatagaagagtgctagggaccactaataccctttagatttcttatttatattatatgcagttacgattatcaactttttttggccactaagagaatgctaattaaacaaattaaaaagatgtcatatacttttttttttttgctaaataaagatgtcatatactgtccgtacgtatctgtgtacaaaaaacaaaaacaaaaagtaaactatattataaatttaataataatattgatatatattatatttgtgtctcaggccaattattgatcaaggatttgggtaccttggaatgaaatacacatcggcatcatacacatctgcgataatgaatgccgtgccttccgtcacatttctcatagcagtcgttttcaggtatatataataatttagttaaaataaaagaagttttattaataattatttaagttgttaattactatacgaagtagcatactaatgtgctttaaaatataaagttttatacaattaatttaattaaaaaatataaaaaactagtaacaaattccaacgcgacacatcaaaaattctcaataacaatgctcactatttatacatattagttaattattaattaattgatcatgatggatgatcaggatagagagaataaggattaaggagataagaagtcaagcaaaggtgataggaaccatagtgagcttctcaggggctttactaatgacactgtataaaggcccagtggttgacctgttttggaccaggaccacagcccaccaatcaactgatctcacccattcctctgataaaaactgggtcctcggcactatttttattctcattggctgcgttgcctggtcctgtttctacgttttacaagtacgtacctggctagtacttaccttaaaattataatattattaattaattataataattaattgtgaaattaattaaacagtcaattacggtgaagaagtacccggcagaactgtctctgtctacattgatatgcttgtctggtgcattgcaaagcacagcattagccttagttgtggaacatcacccaagtgcttgggccgtaggttgggactccaggctacttgctcctctctatacggtaactaatataattccaatgctcatatctcagcccttcacctcaacaaaatatttagtgattaatatttagttaatattccatagtattagtctcatatttactagttagcacggatctagtagtattaatgtggggctatagctttcactaacaaaaaaaaatattatcttttaaaaaattaaatataatttttttaatttaataattacataataaaatagtaaaaaaattctcataaaattaaatctggtagagtaattataatataagtataaataatttttaataataaattaactcccataaaataaaaattttgagcctactagctagtcatattatataaatgatccacttaataaagtgagagcacttctctcctacaaggccattttgttagattgagttatggccaataactttggtatggagcgaacccactgagtgaacaccaattttgttatacccaattttgttgattttgccttttttcatacattttttaatttttaccgagaaataaaaaaaatatatatttatataaaaactcctatacattgaaagttgcaattattaattatatatttatacatagtaattaagctaattaattagtttgactgatatgtggtcaacagggaattgttagctctggaatcacatactacgtgcaaggcctagtaatgaaaactagaggcccagtattcgtgacagcatttaatcctctttgcatggtcatcgttgccatccttgcatcaatcatccttgctgagaaaattcaccttggaaggtaggttagatataaataaatattgatacgttattattatttcctttcctttttcttttctccaattcataaaataaatatttaataataactgagctttccttatttaaaagaggaaagaatagcttagcttagctttaattaggaaagttttataaagaaaaaaaaaatatttttaatttccctctctttacacaaagatcaaagatattcaccgtgtcatgtaagatcttacaaaaaaaacaaaaccatgtcatgtaggagtgaatatttttaccggatttgacctatgctctgtcaactcgtccagacctaacccggtcaaccccgctatgtgggaaaatacgttatttttttaatttaaaattatatatttttaatacatatagttaaaattgataaaaaataaaaaaaaatataaaattgaggatcatttattaaaattaatatagctgtaaaaaataaaattaaaaaagacaacaaaatcttcctttttggtcgcatctttaattttacttgtggcataaatattaaagttgttcaaaactaaaaattacttttttaaattaaggttatatttgcaataattttaaattataggaatttttgctgcaaatatttcaataggttaagtataaaaataaattaattgttaaaaaaatcttatttagtaataaattgctaaaaaataataattagtaattataattaatttaatttttaataaaattaatcctaattaagttttataaaaaaaataaagtataaagtaagaagttatttattatttatttttatttaattttaaattaattacaatcattcaatacagtgattaaataactaaaaataaatgtaggtataattattggaactcatctatatttatatttatataatatatatatatatatttatatgatgtagttttctttacgaccaaaaaaaaaaaaacttttaaaaggtcttccatgagagatacatgtaacatatccacatatattttcttttttttttttcatagaaactacgtaattttttacaaattaataacaacattacttttttttattccttttttaatttacaaatgatcacaaaataaaatattacttattactgaaaaatgcatagataaacacatacagatatttgtcactatttaatttttattactaattaataacagtgacataattaagtatatatgatgatactgtttcagtaattttaatgataaaacttgttattatgtgagttagatattttgtagtgtgtataacattattataatttttgaatttaagaacagttacctaatatagattaattaataataataatgcagtgtgattggagggattataataacaatagggctatattcggtggtgtggggcaaaaacaaagattattccaagtcacagcagggaagagaggtattgatgatatcgccctcctcagtagtacaagtagtaactcataatgaacagaagctcccactgagtaataatgttgggacaacagttgacattgctgccaacaagagcgaccaacaaactcctacaactcatcatcaaccaaattagtatataatatatatttatagatattccaccaatattagtgcgcaatcttcatcataattatataatgtatatactaagtgctaccttagtcattatatatataaatatatatatatatatatatattctatgtaatccatggcccaccgatctatctctctccattttctttttccaacaaaataaatcggttatgtgataactttttctagctagagagcgacttgtgcaacatatactgctactgctagctagctagtatgatattatttgctagtttctgagttgtatcttcaatctccatattcaaccaattatagttttcatgaaatctagaaaaggaaaaacgttttttttaaatattttaattcagcaaaagaatcaatataattaaataatcttttttttaataaatagcattttgtgataaacttatttggaataatataaaataaataagaagaaaaaaggaaaaaaaaaataaagaaaaactaaataagaatttatcattactttattttaatagaatgatcctctatttatacaaataagtgagtcattgattaggaaattaataaggagagcaatagtgattacataaaccttgccagaaaatttagtaggacaaaaattcggtcaaaagaaaaagagtgcattatgaattagctctctcttatttagatatttgtagagatcttcttattgacgaatttcaatattgtgaatcatcttcttgaatattgatgttagtaatgattttgtgaataagtctgcaaaattgacacttgattgaatatattggacaccaaaatacattctcttgaatattaagaagaatttggtgaaatgtgttttaattctatctgtttcaatgtaccctccttttagtcgagtaatgcaagcagtattatcttgatagagaactgttggtgttgatacttctttattgagtgtaatccatatgttttctaaatatgttatggcatggtctcacccacacacattctctacttgttacataaagtgcaagattaatgttagcatgatttaaagttgtctcgttataaactttgtcagaaaaattcagtgggacaaaatttgagctaagggaaaaagagtacaatatatataattcatatttataattatttacaagttgccttgttaaaaatcttctcaggaaaattcagtgggacaaaacttgagctaagaaaaatgagtgcaacatgaatatgtgtccctctcgtgcacatatgatcataattattttactgataatatatcttataagattattgttatcacttttaaaatatcaccgtatattatctaacttattgataagaggttcctggaacatcaatatttatctaacttattgaatcattcatgcatgtgtatatacaatgttgttcatactaaagtttaaaattttaagtaatatgaacctaacacattaatgataatataaatttttatttgtgatgataatgatactccaagaccatatatttatttcattattgttatatgatcctaatttccatatcaaatgatcatatatctataattcttgatgcatatgaagtacttcaaaacttctctactaatgaacaaactatatacatttaatatttctcaatatataaaaataaataaaagtttgtttttcactcatttataatataatcaaaaactcttcaagagtctatcacaacgtataattataaatttatattgcataaacaatcatatgcattttttaaataataatttattacatgtctttatatcatacaatgattgtttttcatatagtgatcgcaattttgaattcaaatctcttaagacatgtattaaattcttctagaatttttagataaggcttat

SEQ ID NO: 112095 - DNA, 4252 bp, Cannabis sativa
  modified_base (3156)..(3158): a, c, t, g, unknown or other
aattaagtttgacatgataatattatagaactcaggccttcacatttggccgcacgaagttgaatattggagctcttaagcaaaaacagaacagttcttgatttatgaaccctgttgacaaagtttaacatcattttaaaggacactgattatttaccatgacaaaattcagaaggttttgtattttggtttatgatgagattatacaagctaacaagataggcatgtggctcacaactttagcaaaaccatcgtgaaatcgatcgttccgatgaaacaaacaaggcgttatcaatatcttccctgtaaaaacaaaaaatcagtgtcatctaatgttccatgaaaaaattgattttacttttagacattaaacgtttcaatcaaagtattgtaagagataaaagcactatatttaaatttggtaagagataaaaactagcaaaattactcctaaactactgtgaatgcttcaatcaaagtattgttttccccatgtatctatgtctatctcaacaattgaaaaagatttcaaccaaagaaaatgaagaactaaggtatgtgattgtggccaactgtttaatgtttagtttgcaagtggcattagtaatcagcaggcctacccaaatcattgatatcattttgtcttagaatagaggttgtctatccttcaaactagaagaggggtgtaagtgtttccaggaacttgatagtcgacggaaaatataacttaaaagattatataactcaggaaaaagcaatatgataacaaattcttaatccagcttatccatctaacttccagcaaaacataaataaataaaagatcatctacaggatggtaagaaactagttgtcccccatcaaatgaaaattaatatttattatttaacatagatactcttacttgattaggtcctgtttgtcctatcggtggatagttcccttgctgccctggcacattcctttgctcctcttgtgggaaaccttgtccttgtccttgattctgcccaggataattttgcccataacctggggttccttgaccaacaggtccagagtttgatccttgccaataagaatcgcgtggtccctggccttgatatccaccaactccttgtccagaaggtggaccttgagttgggccatagttattatagtcttccctaaagccaccctgctgcctaggaggtgcatagttcctctgatctccctgttggaattccctctgttgttgaggatgaaaattacctgaacccccctgattgtagtttccctgatatgaaggggttgaggctccacttccttgttcgtatggattcctcccaccaggagcattgattggcatacgatctcgttgttccccatgtccaggaggtccataattctgttgggttggataactttgtggaggcccatagttccttccgcctccttgcataggaccttgttgaccatatgagggatttacctgctgatttggcactggtcctcccggccgatcttgtcttggttggtttggaccacgattgcggtcaccatatcttccagtctgcctaccatactgaattggtggtggccttggaatgattgttccatcaatgtatttatctcctgataattaaagagttagtttcaggtttttctatttgcatcttttttaatcctacagcagttgaataattgctacaagggtcaaactatactccatgatagaatctagttttcaagaaatcattggagataaatacaactgagtgcacaataaatagaccttgtaacattaaacaaaagttcatggcgaaatacctccatactccttgttttgtggatcaatgtaagaatcagggaggacaaagataactccaggtagacctgtttaaaccaaaaagttaagattatgacatttgacctttccattgatcatctacaataaaacttttgtgccacaaaaaactaccattaaacttctctgactcttcttcggtcattacagcttgaaagcctgtgtaagttgttgtgctacacgcatacattttcttttttgcctcttccatactgtatacatagaaagcagtcattacaagactaaattatttccaacacaaatctaatctggggtacaaagctaataacaagtctgagacactaaagaatttaaataattttaaaaatgaaatacaacacaaacccggaatcatactcaaactatgccaatggatagtcccatttatgaacaaaagccatcgaaaaccaaaatttgatatgattccgtctgcgaactagctcttccaaatttccagtgctaaattaaagcatgtagtaatatcataaaagatgcaaacattttaaatgtaatcccaatcaagcgaccccaacgagggaaaaaaagctaaacttaaacaaaatcatcatgataaaactataaaataacacatacattcaatgattcaaatagttcatatatatatatatatgtacagagagagggaaagagagagagagctaagacctgatgttcaagcccctggcacaggtttcctcatacgtacgaaccatttcttcaggggaaggtttacagtccttagggaaatccatgacgataagccagtggttgtagtcacatccctcaaacagtatcgtgtccggcccaatttcatcgttctggttgttgctattgccgtatgctgatcgggcagacaagagcgagagagacgacgatctgaattgacgagaatgacggagcagagaccgtgaatgctctgccaaagctggggaatctaccgaaatgaagccctggagtggaggcgatgaggaagagggagcaaaaattgcagaagtagcggcgagagagcggccgagtgtggatatggtgctgctgagagttcggcggaggtggagagaggtcagcgccatggctggttcttggggtagtgatgcagtggttgagagtttgaggaacaccagcttttagggttttacagagatttaagaaatgcactaagtaatcaaggaaggtttgtttgcctgaaaaaaaaaagaagtttgtaagggggtacttttgtaattttattaaaattttatttgcatttcataaaataataaataaatacaccttattattaaaaaaaaatattaacttaaataatttttaaaaannnctcttaatattttttttaaaaaaatttcctcacattatttcatgttaattttaattttaatatttattttgattttatttttataattttttttaataaactagcaatcgttaataataatagaacgcacttcgttggaataattctccaattgaagcacatgacctggagagaaaaaagaatcctggctaaaacatgagccagcttgtttgcagatcgtttgataaaacgcaactcaacattatttaaagataaaagaggagtacgaacatcatgaactaaaagaccaaaagagaatgacaaaataatttggctttgcacgacttgaacacaaactaaactatcagtttccaaaatcaattgtccgtcaatccagcttaaagcttcttttataccaacaaatacatctatttcaggttgcacctgccatttcggcataaaaatccctgccattttctccgctgcctccattcactgataactactcgacgccatggacacccgaacgaacccaaaataagaaccagtaactaacgccagaaaccaataaaccaaaaccaatgagacaaactatagaaccatatcaaaaaacaagactaatgggaaaacctaattagtttcaacacatgaaactaaaaattctaaccctataaaaatactaataggaattaacctaataacagtaaaaaaatggagacaaaaagaaatttgaactgacgaacaaaaagaaagattaaagaataatattccaaacccataagaatgaaaggccgcagttaatcgaaacaaccaatacaattatcattcatggtgatggatcagttggattgtgagccttgatatcaaaatgtcgtatacccagatattagatctccttctctaacctatcaacttcgcttcctcacctgaaatatgcctcctccttcttcttctactgaatcaactcgattgagaattgaaatcagtctaagcttttggaataacaaagaaatttggggtttcataattttttttaattgagtatatagatatttttatttttttttaagaaaatttcatataattttttatttaattattttgtcataatattt

SEQ ID NO: 112096 - DNA, 4328 bp, Cannabis sativa
  modified_base (4285)..(4303): a, c, t, g, unknown or other
gaactatacatatgaatttttgctactaaaaatttacttaaagatttaagtacgtgcaacaaaataaactagatagataattacctggaagaagccccagtccttgcaagctgagtggaggttagagagttcagattgatcatcagcaagaaacagattttggaaattgataactgggatttgatcatcaagagaaacagaattggtgataacattatttgattgactattttgatgatgttgaatgtatcttgatgggatgctcaccatgtttggatcctttgccagttcttgaacacttggcacaaccaaacgagagctgttaaattccattattaattaattaactaataattcaaatcttaattagctctagatgtacgtatgattttgaagatctcgagctacttaattagtgtaataatatacaataacatctccaatatcatccttatatatacataatattgtacattatcgatctagggcacattattattatattaataaaattatattaacactaacacgtgtaactaatctatataaatatatattatgcaccacatgctattgcttaagcttgtattatatgttattattattatttatttttgccaaatcactttatttaattaggaaataaaactatattaatatctacatcctaattaaaaataagcttaaccaattaatgagtcctaacaataaaattacaactaacatgaaataaatacttaaaaattctaaataaaacaccgagctcattttaattctaccaacaaagcaagaacttttgtttgaaaagctgataccagaaaaccacgtaccaaatagattagttagtaatttcataaaaatattttagagagtaattttaaaattatgacatataaaataataatacaataaattttaaaaaagagaattgtaaaaaaatttatattgttaaagttcttgtatccttgaatataagtgaatgatataaaaatacacataaatatataaaatttaattaacacattatttaaagataatattaaatgaaaataggaatttttatttaaatgctaaaaactttctaaaatattattttgtcatgaagaaaaaattatctttgatatctctccttcaaaccatttttacatagcaaaacaccatatatagtactaaacaaatcacatgaacacttaaacaaactaccacatacatggtataataaacacaagtaatatatatgatacaaaacaatattaccataaaaatttaaattaaaaaacaattaaaacttttttaaaattacttaaatttaaaaattaattatagaaaaaaattaatcgttaactttaatatatatatatatatatgaaacatttctcaatcagtattaattttaaaaataacaaattattacattttgatccaattacgaataataaaagaagaatttgaaaatctatgattaatttacctacttaattaaaaaaaaaaacataaaagaatatattttttttacactatatcaaagtcaaaactatgtttagataaaaatatttaagtcaaactcaatttttttttatctttgctgaaaaaaaaaattaatatttttttttccagctgatgaaataatcccaacacatataatgtaaaaatacgaatatttttctaattagatagaaaaattaagtttaaaaactcatattttcttaatactacatattcatgagtaatacctattaaaagtgcatcaatatatatatttatattaagaaaaaaaatatatcaaaattaataatatataaactatacaaatgtaaaattttaattaaaaaggatattaattcactatactgtataaatgcagatttaaaacaatcaatacagtaggaaaccaaattaataatattgggaaatttacaatgtatattgacttttccaattttattatatttttactgtgtcacagaataatttataattttactatcttttataatattgtgtaccaacttttttaaaaaattttgttttgtcaattttattcctatatatgtatcttttaagagagattattattcatttttattgtataaaaaagtgtaaaagaaaagcttttgtctaaatgatgattaaagctaagacccatgataactgttccctcattcatacacataatataagatatcatcgccacattttttctttttttgattttttttaaatttagacaacaaccccgtgatctcctcctccctaaacttctaattcttcccacagtactctactcaagaaaatatatatgtatgtatatatatacatatatattcttcttgagctaaatacacatatatatattttcagcaaagcaaaccaatgaatgatgaatatatttatgtttttcagttgttttaagattttattttttgttgtagatattttggttttttttttttctaatctatgtctcttgctcattttttttttgttattgttatctatttcgtatttttgtttcttattatatgcatattttttatgtttttaacagttattgttatgttgttctagtttgttcttttgagtcattttttttttaaaaaaaaaggctgagtacacgtttctccaaactcaatacttattgctcttcttatcttcatcatcttcaaaatttctacttcttcttaagcttctctttttcattttttttcttcatttatttaaaaaattgatccatgttttttcaatcggggtttccattttttcttgctcttctcatctttaaaaaaaaaattaatttcttaagcttttttttcatttttttttcgcatattcagtgtcagatattacattgggattttgttcatcactccctaatttttttaaattttatatatattgttgttttgtatgtgctattcggtgttaattaagtattatatatttcatttttatattttttaacggttattttttttattgttctagattgttttttaatgtattagtgtaagaggaaatttttcaaggtgaaagttccctttcgtgatattatagaagtcctcactggcaaaagagatatagtattttttgtgattttatttggttattttgttttgtagttttactgttgttttacaattattttattttattttttatgttattgttctaggattggatcttaaatacttacattttgattagaataatagttatttttcagctattttggtgttactctggtagtttaaaccgtaggtattgaaaatgaaggcttcttatctgttttggagtgtgtacagtgtaaaaaaaattaaggttataaggaccgtaattttgtaaaaatttctgtgacagtattaatgtattcctaaaatatagtattatagtatttttataagtttccttttaaatgtaattaaatatatataatgtaattttaaattaagaaaaataagatgtgaaaagaggaggaggatctgctgtcacatgtatatatattgtttattataaattaatttcccaaaaaatatatttattattgatatgcatgtgtttataggtaggaaaaatacacgaggataatgtggtcatgagtaatattgatattattttactacaaactagaacatggatccaattaattgataagatcatgttattatatatatatacagatttaattaattaattatgtaattaggtcataggcttgcaattaattaactgcaaagatcccttggcttaaggaatatgctaagaaatttgagagacatcaatatataatagtatatatttaataatatattgtaattaataagaacttcttaaacgagcttaattatataatttaattaattaatatgcttctacatgctagctgtcactttcttataaattactgattgagatatgatattttcgaggaattgtattatattgataatattatttcaagatagtcaattagtatatcaattagatgaaagttaagtggcaagccacgtaaatattagttttattttaagttttagtagtttttgtttaaaaatttagtgactaattataaattatgttataaatgatatgttttataaaactaattgttaagaatgttatgattgtatataaacctatataagaatgttataattgtgtatattaatatttgttaattttttatttatttgttaacgtttaactaacaaaaaaatatcaaaaattgggatataccgtttgttatgttaaagagatatgtggctaagatgatttttttttttaattnnnnnnnnnnnnnnnnnnntttttgggtttaattattaggttta

SEQ ID NO: 112097 - DNA, 5191 bp, Cannabis sativa
aaaaaaaaaaaaaaaagaagtgagcaatcgtaaaaaatggaggtaaattggcgggagaagggacacgtcatgtcatgtcatgtgaagaaagaaaaagtaaataggtaataaaagatggttgctactataatggagagggttgaatggacggttgagaattgagatgaacgatgagatctatgagcacggggaggccaggccactctgtctccgacttttgactttaaacgttcaaagcactctccatatttctctcttctctatttaataattcccatctcttgccaaagaaaggcagcattattagtgattacattactggtaccaataagtaataacctctttttttttctttaagagaaaaaccacaacactttcaaaagaaaatatacagccaaagaaaatgtcgtggcaaacttatgtggatgagcatctgatgtgcgacatcgatgggcaagggcagcatctgaccgccgctgccatcatcggccacgacggcagcatttgggcccagagctcttccttccctcaggtcttcatattgtttacattacaatatttcttctcctataataaacattggtattggttatattgatcatgttgtttgtcttttcagttaaaggctcaggagattactgatatcactaaggattttgaggaaccaggccatcttgctcctacaggcttacacctttctggcaccaagtacatggtcatccaaggagagcctggagctgtcatccgtggaaaaaaggtaataacaattaattggttgattggctctgtctgtttagatggttgactgtgggaaattatgaattttgattggcaggggtctgggggtgtgaccataaagaaaactggtcaagcactaatttttgggatttatgaagaaccagtaactccaggacagtgcaacatggttgttgagaggttgggtgattaccttgttgatcagggcctctaagctataatgaaatctctattattatcatcatcatcatcatcattattcaagttatctcttttttcgttataatttttgggatttttttctttttttctttctggtttgggtttctgagtttgcatctctttcatttgaaaaagcttttcaaatgggtatgaagttgttgtagacaataaccatccaagaacacataaaacgcttgtttggtctgtattttgtattttttattttttaaattgaattatctcatttatatgatttcttcttattattacgtaacgtttttgcaattttctttcactaaattaatgagttgaaacgtatcttaattatgacattgtaatttcgttaatattgagctggttttcctatatatagtttttgtaaaacagaaagttaaatgtattctttaagaaacttaatatcaaatattatatttgcatttgtttataaatacatatatatttagtatttacacaacaacattgtgctggttttcctatatatggtttttgcaaaacaagaaattattgttgtaacattttaaagagaaaagtttaatatactttttaagaaacttggaatcaaataatatatttacatttgtatatgcacataaacagtatatttacacaccaatatttagctggttttcctatacatggtttttgtaaaacaagaaattattagtgtaacttttcaaaacaaaaagttgaatatattgtttaggaaacttaaaaatcaagtaggatatttacatttgtaatatgaatatataatcaaacattaaaatttgcataaatggaatatccagccagaattatttattactttattattatttttcttctggaaaaacatattcagccaacttggcattacaaaggtttttattttgccagctaaagaaagtcaaaaaagcaataaagattattctccaagcttttttttatttttatttttttagaaaaagattataattaattataacttttaaatatgaggccctcccagacaaagactgctaatctagctatatgactcgaggataagatgcttgagctgctttgtttgccttcccattatatttatacatttacaaagatatattttgccttttctttttcattttctgaaaaagaaaagaaaagaaaattttccttgttcacaaaaaagaaaaagaaaatgaaaaatttatgtaatatgagacgattggaccagactaatttctgaggaataataacaataataataaaaaattggagtggagagaataaataaataggacaagaaaaagatgtttctaattttttatctcagaaaaagatgtttcttttttctttcttttttttttttttttttttgaaagtagaaaaagatgtttctaatttgaataatttgattttgttttggagaatttaggggatatgcttgtatcattttccttcatacatcttcattggtgaaatgctagttttttcttttttcttatatataattcattcaattaattaaaaaatgaatcactttatatattattttttaatttttttataatttagattatttcaataattgctgtataaatttaagttattccgtttgctgttatgtaaatttttataaaaatacaaaaaaaaaaaaaaaaaaaaacttactttaaaaggtaaaaataaaaaaatctctaattaaaaatgtatgaagaaaaaatatatttttttgcaatgagaaaaaaaaaatatatttttaatatatgtttttcatcaaataaaattatgttttttcatataaataaataagataattggtattggaataaattgtgtccaaataatatttgtacactaatttgtcaaatacattgtattattttgataataactaaatgaaaaaggtataaaatctgcactcaagcaaataaaaagataataaatatgtaaaataagattttttgtttggtttagttttttttttattattttgtttaaggaaagtaaaataagatattgttttatgtttctatgttagttttttctcatatatatcttttttttaaataaatgtcttgtttttttattcaattatattctctatttgtagtttatgatatgtatatatattttattttgattgaataggtaatttatgatatttggtggttgttgcaacttttttcttttttctttttttgatgaatgtttggctgtgtttcccaccttacttttttcatcataatattttctctaattatatttctttcaccattttatcttgcattatatttcaacaaatcactttatcttatacaaatttctttttttcaaccttatatttctttttaattcaatatgtatttattatcatcaaatttttttttatcaatttttctatattcacgtttctttcttctcgtgatattatgttgtttcatcaatttgtttctaatttttttaccctaatctaactttaacctattagcctcattttcaatcccaattttaatgttttctttgtttttaagaaaaaaactctaaatataaacgaattatattataagaattagatttgattcgactagattagattgtgtgtaaattctacacagtgtttatagcctagattaaataggcttttaaaatgtatatttttaaaataattaaaatttatcaaataatttatttttttcaaaatttaaataaatggaataagtaaatatatctaaaaattgttattttatagtttgcctatctaatgtcttgacagttaatataggtagttagttagcctaggtgttatgttctaataggttagtgacggtcagttcttcactaaccgttatagttagttaatactcttgtctttgtatctctcttgctatatataagggtatgtaattcaactatagactactgttgtaatcgacaccatttgtacataataaaataacatagcattgctcttttctctactgtgtctgtgtgtgtattaagtgttatggtttgattaatacatcttaggttcattcttgcatggtgaattgatgctgaaccgaagtgaacttgtgtaacaactggtatcagagcttgggagttcgaagttggatcttggatcgactatcaagagcctagtgaactggacaagaagaaatggggagcacaaagttcgatcttgagaaatttacagggaagatcaattttggattatggcgagttaagatgcgagcattgctggtgcagcagggattacaaggtgccatttcaggggagaaagaactatttgcaagttggtctgagaaagaaaggtctgagattcttgagaaggctcacattgccatcattttgagtcttggagacaaggttctcatggaagtttcaaaggagacgactgcaacagggctttagttaaaattggaaagcttgtacatgaccaaatctttggctaatcgattgttcttgaagcaagaactgtattctttcaagatggcatcggggaaaagtattgaagattatttggatgatttcaataaaattatccttgatcttgagaacattgacatcaagatcgaggatgaggatcaagcaattatagttctgaattcacttcctagtaaaaactatgagcattttgtggatacaatgatgtatgggaaagatttccttacattagaagaagtgaaaaatgccttgatgtcaaaggaaatgaaaagaaatctgagctctaagaaagtggttcaggggaaggattattggttcgagggaaattttcaaagaaagagaataaagatggaagtaatcagaacaagggtaagtcttcttcttcttcaaagaataaaagaaaatgctttatctgcagctcaacttcacatcttaagaaagactaccattgtaaaagaaattcaacaacagcaactttggaagtgtgggcttagcctctgatgaagaaggatatgacagtgcaagggttctagttgtctccacatttgccctgatcaatcccaattcaatgaatacaatgcaatcaagggaggttcagccagacttggtgacaacagatcctacaacattactggcataggaactgtcagattgaaattaaatgatggtggagttgctgagttgagacaagttaggcatgttcttgagatcaagagaaatcttatctcagtagctatgcttgaccaagaaggatgttcagttaagatagagaatggggtcatga

SEQ ID NO: 112098 - DNA, 5877 bp, Cannabis sativa
cacgaacaagcctcccaccccacacccaaccaaccaccccagcccccagccaccagcgtccagcagcagacctcagccacgccacgaccgacgacgacccaggggagggatcggcggctcctcctcctccacgactccgtccgctcgagtcgcccacatcccacgtcgtcgcaccactccgtcagtccgtcatcgcccacaaccccaccacacaccaccacggcaccacgataatctatctctttcagcttattttttattttttataaaattattttctattaaataatataaactaaatatatttttatatataattttttattaaaaatttatatatattatataaaataatttatattcagaaaaatataataattttttaataatatataaattttattttaatttattgttatttttattagttttaaatagaaaattaatttttttaaagagatgaccgagttgactgggtcaacccgccaacccggtcaacccggccaactgaaacccaccaacccgtgccatattcgggtccgggttcggtttcattttttttaacccgaaacccgtgaacccaaaacctgcaaacccaaaacccggtaaactcgcccgatgttcagccccaggtgtgcaagccggtgtgcctttgtgcgagaaagtgtgcttgtgtgcgagtcggtgtgcctttgtgcgagtcggtgtgcctttgtgcaagtcgggaagcatttttgcaagctggggagcatttgtgtgagtcgtggagcctttgtgcaagtggtggagcattcgtccaagtcgtgatgcatacgagacatccatgcgagttgtggtacgagacgtccatgtgagaaccacatgcaaggtgtgagggtctcacacgcgagttgtgtgtggtgtgtgaagggctcgaatgcgagacgtgtgtggtgtgtgcgaggcttgcgtgtagagctagtaagactaacttactaagttgcaattgttggaggattttcatactgatacgtttagaattagatctttttataaacataaaattcatagattgtctttccaacgcattttaaatcgtcttccgacatatatcgagaaagttatggccaaaatactaagaccactgaaatgtgatagtggggtgtgcaagccggtgtgcttttgtgcaagttggggagcattcgtgcaagtcggggaggatttgtgcaagtcagggagcatttgtgcaagctaggaagtatttgtgtgagtcgtggagcctttgtgcaagtggtggagcattcacgcacgtcgtgatgcatgcgagacgtccatgcaagtcgtgatgcaaaatgtctgtgggagacccgcatgcgagccgtggcatgcgaggtgtgagaggctcgaatgtgagctgtgtgtggtgtgtgaagggctcgcatgcgagcggtgtgtgcgaggctcacgtgcgagctgtgttgtacgaaagccgtgttgtgcgagacccgtgaatgagtttgagaaatgtgaagagaagtgagaatttgaatacgtgttgaagaggaaattattaaggaaggaatcaaaggacaaggcttgcacgtagagaggtacgagactgagtacggccacatcctcatcgtggcctactggtgagatggaacaagtagcccatgacgtccctacaacaagtactctacaaccactactccttcaactcgggactacttgacacgcgacaatggtacaaggcgcaagaccacctcatgcacctgttactcgcagcaacataagaccaacttgtgccttgaggaccacaagtgtatctcaggccattaaaacctataaataccccattcccaggtgagagaagggttggaaaatcattgtaatacttgacctagagaaatatattttttcatatttccagatcttcatctttgtcctaagtcttacatccaagtttcaattttctagctacaattcaattggcaagtttttactattgttattatggaattcaaatgaagagagttatatataataaatatacatatcttttcatttattaattgtaattactatcttattttcttaattttctaatctatgatcgaatttaaaataatttatattatttttattatgtgaatataaatgcatagtacatataaacaactcatattgacagttagctgtgtcaaataattttactaccaaaatttaaatttagaaaattaagtacaaataaaatgataattagaaagatttggcaccaaaaactctaattaaaatttggttatattatactttgtatgacaaatgagagtaataaatttctatattgtgtatggagatttctatgttgagtgtagagatgtaaatttcccctaattttagctatgtatttttacttctcattattgtgtactattacatttttttttctgctgaaagtgtactattacatttccatgacagaatgagctacacacaactattatgtcacattaccatatggcattgtgtgattgcatagaagactgaaacattattggtgcctttaacttttctttctttaagaatatttcccacccatattaagataataatccaaaatataatcacgatccaaccaacctggcaaatatattcctctctcccttattaagatgataaactaagaaaatgcaatagcaaatccggaaagaaagacaagattctctctttcaggtgcccacataataatcagtgaattcaagatatatgttaagaatagttcacaactccaccaccaccaaccaatcatcacaaattcacaattgccctctttcatttcaacccccttcatgatatagttcaaccaatcatatgaatataacaatatttatttaatcttggcttttagttcttttggtggacagcaatgtggtgaatgtccatatcttttaacatgacagagcgaccacatgaatcacatggagcagttcttgacccacaaacgccttcatgctcacacaatcctctcattctgtctcgagcatcggcagcagagcttccagcttgaaccatgtccccacaaaatctacatacaattagacgcaaggggcaagccgaagcttggtgttgcacctgcaaaacgtaacaataagaacagtgttgagtttcttttcgcaagatgccacaagtttcaggcatacattatgcgactagtttagaagaatcaagtcaattgcaattgagccttgtcatctcaacagaagtttccaactatcaaagtaacaatactaacaaagtccggccaaatccatatttaaagtaacaatactaacaaatatcttttcatattgatttttgatagttctgatggtttatgctgtcctatcagaatgcaaaatgacaactaaaatttgaatctgacacaggcattggcatgaagaagaatgaccttgaactcaagtcaaatgcatgaaattaacttaatgcaacaaaattggaatgtgcaaataaaaatatgaaatgaagtcttgaagaaaatgcaaagataagaatagaaagttcacggcagaaaacttgaaactaatattgcttaccatttgttctttctcaaggactataccgcaggggcagcgaactggctcgtggaagactttcatgtgcttttccatttctccctgctgaaaagcttgcccacatttgtcacaatgaacatgattcttggcctcctcaactctaagaacaactccacatcctgcatgctgacaaacaacattgtgtctgctacagtaggcttcatgcagtgatatagttcgacttggtatgtgacgcttgcagttcctacactctacagtatccatctccgtagatgaagaggaagacacagcttgttgacctactgtacgattacagtcatcctgaacactcactgacacatggtacttagtttttcccttaaagccataaatgccaatgctataagtaccagctgtgaagttcttatctgtagaagcaatgatcaaggccttcgaaccaatatcataggaagaccattcatgctggtgctgggtaggaaatatgagaggatgcctggatacataaagatcggtatctccaccatcagtctctgcgtctatcctaacctcaactcgagcagccccagaagaaactatctcccaaatattattgtctactgagaacttgtaatacatgtaatttccttcatcaacaatgccagaatctggctctccaaatgtgagtggttttaatacattcttctctgattgctcagcagctgaatcagggctaattatatctacttcaatatcagtttctaggacagatacacttgtagaaggtttcaactcaaggactcgtaacttgtatgtaagctccccatagttgacagtgaacaagtcatcctgagaaagggtggcatgctgccgaaggctggtctctaggatagccttgtggttgggcaaatcagaaaagccaaccctatcaggttgaagtttagcataagtaccttttggtagccacgcataacgaatttcaatcatatgactagtcaatgtgtctgttgcaaataaattctgccaaacgtgaggaggaagcccaacaaaaccttcttctgcagtgaactccaaaacacctgaatgagtggtccgatgactttcctgatcagcagcattggtgtttaacgaaccctcttctttaactggggacagctggaagtacagaggtcccttgtcaaaagctccttgatcagacaattcgttgaagcaagatggtggaagttttatcttatctccattaccctgaaaaggtacagcttccagtagacgataaaacatgattcccctcccagcaagtaaactttcttccgttagttgatcagcctgaaaaaatttgagaaggcattgagttaaggtgcaagacaagtaaataagacaaatcactacaaaagtcatacaatacatcaacaaataaatatacatcaagaccgttgcatatgtatttaaatattaattctaattccagctttctactttttcttctgccccttttatttgtagaattatagctatgtaaacaaagtctcttctagaattttctttcaattttatcttcattgttacaaaacgctctttaatttatcaaatgaaaaattatgagattaatgtgtgcctatctatttgttctaattctcatgaattttattcaagaaaatgaaaataaagtaacaagaattataattccccttcttctaaaaattctataagtaaccaaataattcatcaaacaaggaaaataaaaatgggtgaaatatttcaaacccaatttattttatctgaacataagaagagggagaaataagaaccttgagttgggcttcagcagcatcaaggcgtctggatctctgagcagcttcaatggcttccctttgcttctgggcctgttctttagccttcttctccctatcggctttcagcttggccttatccttccgctccttctgctccttctgcaacttctctctcgctcttctcagctcaaaatccatctctctctctctgttcgatcgtacggaatgagatattttgtttcagatgaatgagaaaccaaaactcagaactccaaacttttataacttgttggttaagagactcaagtattcaattttcaatcgaagtagacaaacatcaaataagacaggacttttaaaagtcactctctcgaaggttctgggtcaatcactgaacgaaaatatgggccctaactaatagcccactttccttttaaatgagcccagtttaacaatattctaatagaaacagggaaatttacacagattactgttttttcccaatttttttcttttatactgttacacgctcaaat

SEQ ID NO: 112099 - DNA, 2720 bp, Cannabis sativa
  modified_base (2018)..(2023): a, c, t, g, unknown or other
aattagataaaagtccttaaattctacaatctcaataattcagggggtatttttaacgactttaaaattttagagagcataatttggtacatatcaaaattccggggataaaaatcttagttagccttcattttaaaaatcgttagaacaacatggaatttctcttcttaattaactttttactacaacaacagggagtttgtcaatagcgtctggtgcattaagatactttcaccgcaagaagtgcaacagatgggcaaacgaggcttggaacttctccactcagtctcgatgcagaggctttccaacaacagttgcgacgattacccgagctgtcaagattcaagaaacttgagctcagggataacgtcggtggggtcactcgaatactgaacattttaaccggttaaaaaaataccctttctctttctgtaatataagcatctatttccaaaccccttccaagggtgggaagtcatagatagcctaatcctctctctaagtagcttactttacaagttaaaaatactgtaagtaaaggatatatacaacattatattttttgttatcttttgctattggattcatgtcatatatatttttatataaatatatatatatgtattgtaatatgttaaaagatcagtgcttctgaagaaagctgatcttttctttttctttttttctttcattatctcatcaatttattcatgatgaaagaaaagcctttattatatattaaaaaagataccaagtaagatgtacttttgatttagtttggtttctttatatattttttagtatttagttacttttgaactcatcaactgttttgtttggtggtttaaatgtttttgaaaacaacccataaaattaaatttataaaaggattccacatttgtattgactttcattgcattcactactttgttgtgtaaaagtctcctttcattctcacacgcaatgtgtaataaattttattgacattgatggtttcatattaccatgtgaagttttctaactcttatctttaaatttcacaaatacaaattgtagtgaccaatatttttttaattattattgttatattttatatacaattatttaattttgtgatgcctttaaattggattggatcggatgaataccaatgaatttgaatcaacacgcgtatgggcactatgcccattatttgtaggcttgacactttgtatttggcctttaaagaatgggaccaagggatgtcggtaggcacatgggatttgaattttcttggaatttttcattattatttataaatttcaatgaaagaaggaatgaaagaaggaagagaggcaatggtttttggttttgtgatgtcttttctttttttattgaattattataatgtatgtgtggggttagtatggtttgggtggccaatgtaaaaaggtgaagttaaaaaggccttaagaccctttggttttgtggctatgtgactatgtatgtgagtgggggctatgctattttgagtacatgaattatgcaatttcttccttcgctttattattttttttgtttaaattttttttatattttttttttcacttttttgagggatggaatggtggtgaggatgacacctttttgtcactaccaaacaaacaaaatctagtaccattcaaaggtaggtttggccaatcctattcctaccttcccaaacaaacctacatttaagaaaataggaaaattaaagtgggatggtatgggggaattgggactcttctcctccattactttccattctatttcaacattttttttctttttctttttgatgtatgcttttctagctcatagcatatgaccaaatttcaaaccatatctatatttatttcatcttcgtgtaaaattcaccgtcctcctgtttacatgtatttatttttagacaaattagaatttttttccctcaaactttgacatctaccaaatcatgccccctgaatttttaagatcgttaaaaatgccccctgaactannnnnnttgttaaatttaaggatttttgtccaattttagtaaaaaaaatctaacatagatgaaagtttaagggacgtgatttagtacatatcaaattttgaggggcataatttagtagatatcaaagtctagggagcatagtttagcacataaataatcactgaaacggtaaaactgaatgaaattaggcaaaagtccttaaatctaacaatctcaatagtttacggggaatttttaacagccaaaaaagttcaagaggcatgatttggtacatgtcaaagtttggtggaaaaaaatcctaattaaccttattttatatctcaccaagtgactgttataatattatactagtttgtcaattaaagattagttcttcagttgataaacttattattattgttgatattaaatttctttttatcaatttgtcaaattgattcttgtctttttgttatgatgtattctataatcagttagatattatatgtctatagttacaagtttacaattatatgtctaaataatctaatattaaagatagagactattaactaatgttttactggttttaactgtcttttattttctattaacagttagttaatttcagttagtttctttaactaacttctgttttgctttgtaatctttgagtataaataaagtgcttactgctcatttttagagctaagctttcagctaa

SEQ ID NO: 112100 - DNA, 7107 bp, Cannabis sativa
  modified_base (6695)..(6698): a, c, t, g, unknown or other
ccaaacaacttaatcctattcctactcttattccattccattaccattcttattcttattcctattcctattccattgttttcattaccttcaaccaaacgggcccttaattgctcaaaagaattgcatagagttcagaagggatatcacttttcttaaacatacaatcaacataacatcaaaaatcacaagaaaatgcacaactcaataacaggcggtcaaaaatgagtttgttatcgaactgtgtgttgttgtttgacactatcttttgtgaaagtccatagcaacagttgttattcttcactaccaagtcaaggactttctttaatattaaggtagccaagggctctgcttcagcccatttggtgaagtaatctatgaccactatcgcatattggacaccgccttttcctttaggcaaggagcctatgagattgattcctctgacagaaaatggacatgtgacacaatccattgaatattcgatcattgttggtcaaaagtatccttgccttaatatcttttttgagaggctttacccctcagtgtggtagccacaaaaaccctcatgtacctcgagcatgagtagtagtgcttcttctttcgcgacacacattagaaggggcattgagtagctttttctatacatttgtcaatccatgatgataaagcgatgtacttttattaacagtttctaagcttcatttcggtttgttgggagaataccttgttctaagtattgggcaatcgaggtcatccatgatggactattgttgattgagaatagattttgagtcttcagtgatgcttggatgagagagatattcaacaggaactacacttaaagcgtcagagtccgttgtactagctagcgtagctaaggaatctacatttgcattctgctggcgtgcatacttgttggatggagtagtgcttcagctaggctaatagatctttagcttttctcaagtacgctatcatcttcagcgctcaagcttggtattctctaaggatttgattggcaacaaattgagaatcactatatatctctagtgattcatctttgatggctagtgctaatctatgtccctgtaggagttccttatactttgcttctatatttgtagcggtaaatccaaaatgaaacgcacagtgagcaagaaatccttcaagaattacttggatgagacccactcctgagccatgctcattggaggacccatctacatagagctttcaagtaggtctagaacccgctgcagtctcaagcatgtggttctggtcttcatagaccatgggtcgtgttcttcaaggcgaatgcattcaaaaatgaaatcaattaatgtttggcctttgattactgtgcgaggctaataagagatttcaaattgaccgagctctacttccaatttgtgtagacgtcatgatgcttctggcttcatcagaacttccctgagtggttggtcagtcaacactctgattggatgggcttgaaagtatgtccttatcttcctagaggccaatactagacagtaagccaacttctcaatggggggttacatagacttggccctgatgagtttcttactaacacaatacactggatgttgtgtcccttcatcttcatgcaccagaacaacactggttgcatgctcagtgatacccaagtagatgaataattttttgctatctactggttttgacaagattagtggtttggacagatgatttttagagctgggaaggcttacttgcaatcatcagtccattcaaatattttgttacttcctcttagtagattgaaaaagggaacacacttgtcagtggacttggaggaaaattgacttagtgcatcgattcgtccagtgaggctttgcacgtcttttactcgcaacggtgacttcatgtcttacaatgccttgatctattttggatttgcctcaatttttcttgaattgactatgaacccgagaaactttgttgattgacgctaaaagcacattttaggggattaagcttcatctaataagcttgttgaagaattaatcaaaataattaatttgattttaaaatttcttcaaattaaccaacatgtcatcgacatagacttccacactgttcccgattaggtcatggaacatacggttgactagtatttgatatgtagcaaaaacatttttgagtccgaagggcatcactttatagaaattgaggcagatgttttttttttgtaagctagggtgctcttcgtcaagtggacacatgttgatttggttgtagccagattaagcatgcatgaatgtgaggagttcaaagtcgagtgttttgtccaccagttgatcaattcagggaagctgaaaacaatccttacggatagctttgctatggtcagtgaagtcgatgcatgtccactaatttccatttgatttggacactagaaaagggttggatatccagatcgggtaaaaatcttctctaatgaagttgttttcctgcaacatttcaacatcttccttgagagcttatgaatgctctttgtcaaaaagcttgcatttctgttgtacaggcttgaccttttctttctcgatgttgagggcatgacagataaccttggggtcgatcccattcattttctcatgtgtccaaataaagatgtcttgatttctcttgaggcaagccataagtgtctcacttaggcctcccgctaagtttgttccaatcttttacaaccttaattgggtccattgtgttaacccaagatatgtttctaagaggggggtgaattagaaatttaaacttgtttcggtaaattaaatcttttagcacaaaactatgtaattaatctcttaatcaaataaatgcaagcaataatgtatagcaaataattaatcttgtaaagtaaagagtttaagggtaagaaattgcaaactctcaatttttacatcattggtcttcaaagctatggacctagcttcgagttccattaccgagccaagttaactggtttgactaacccttacaactatgaatctttcaccaaggtatttcctaacctctaactatagttttgcacatcaaaggactatcaacctctttcttggattgttgtagtgacaatctcactctaacagagttttttataatatcggtgccaacctcatctcaatcacaatatagaaatgtgtttaaaattgcaagcaaattcactctagaagtatgatcaaacattggaaaacctagagtgaataacaagcacactttaaagaagtaaacacaaattttggctcaaagtgtgtgaaaagtgtttgttagattttagacttgtgagctcattaattaaactcacttgaatatgttaggtgtatgaaataaatgctcagccaacttgaatttttgagtaaaagttgagtttacatagctagtgttcgggtaaatgtagccatttatagctgttagacataaaaatgagattgccactaggcgatccggttcactgtttcccaaatggtaaaccgatttctgggagaactggttaaatgtttaggaacttgtgaaccatattcctagaatttgcaaaaagctcatttttttgtactaaaacaaccataactcgctacttgattatttgattttagaaattctaattttgttctctaagttaaatgatatgtgatttaaaaagtcaattgaacttttttatatcatttggtaagaaaagttgtcacacaagttagtgggctaaaatttgtacttaaacctttctttgtatagacttgaaaattactatacaagactaggaaatgtaaataaacatttatatagtcttgtcttgagttccttgagtcttggaatccacttcgagtcacttttaagaatttttgtaaaattactattttttccttagagttaatttggcttagaaaattttattttacctttaattgtggtacaaaatcaacaaatcattagtaacgaataataattaaatatttattaattatcaaaataagattacttaaaagtttgagttagcaatatccccatttttgatgatattaaatatttaattattttaaaaaagaaaaaggaaaaaattgaagcaatatattagattaggtcctctaaatgtgtgcaagggtaaaaaaaaaactttaccttttagttttaccttacatgattttataaactcccactcaattttaaacttatattcaaaagccttagatgtccaaaaaattaagtttgttgccaaaaaaaaaaaaaataatcactatagaatttttctcccttttgattcattaaaaaggatggcaaaggaattctcaaaataaaagacaaataaaaagatagaacaaagcgtactattcaccataaaaaaattcaaatacatattatccaaaataataataaaaaaaataataaactaacacataaaagtcaaaaggcactaagcctttgcaatcatactaaaaaaataaacatgagaaaagatgctaaaaacaaataaaagagagctaatttggtggaggtccaaaacgattcatgtatgccctccatcgtgccatctcctcttgagcatcgacaaatacatgctccatgtaactcctcatagtggcaatgtcacctctcatggtggtcatctcattttgaagagtagaaaaatgagtgttcaccttattaatatttgaagcaatggaggtgtgaaggtgagcaaagcctcttcgatgttgaagtgaggggcttgtggcattggaggaacttcttcttcggctttctttttgccttgagcttgggcttcttggtcttcctcttcactttcacataagaccaaagttgcttcctcatgggcatgtggaccttgttttgtggaaatccacttcttttcaacttcattaaacatgtagcacatagacttgaatgttatctaacccagattgtcagaatccttcagttcattaatgccagtttcattttcaattgggattcctaagagtgggaataagcaactaagaaaataaccatagggtaaggctctttttaggttaggcttatacactttattgattgttttaaggataaggtaacctaggttgatttggttgtctttcatagtgatgttatatagaattatttaatcaagtgcattcactctatcttgagggccttttctaggaatatggttggagcatataaaagcatggatgatttagccttgaagggtaaggaaagttcgtcttggttttgcaagaaagtttttacctacacaaacattattgttgaaaagactatagttgaaggtgtcatcattcttaagatgaagtatatggtcaagcaagaggccatctttgggtttatttagaagatcattaagcttatctaccctattgaggattcccttaacactatttggattcccctttgaggattcccttaacactatatggatcacaatgagtttcaatgcaagtataaaaagctctaacgagcctaggatagatattggtatgaatttatagcaagatttcacatcccatatgttcaaaaagtgaattgaaatcgacatactcaagagctttgagatcacattgcctaccatttagaacaatattcctttgtgagaagtcttcattaaactttcttgcatatttccatgggataagaggtcattccttgtcttggacctttgttccctttgtttcatttaggatctttgcctctttgctcttgaagaagaagcaaccatggttatgatgataaaggggaataggaaagttaggtttagagagtggaattttgagagaaaagggtggaaggcttctaattagggttataatatctgaattggaatgagaaaatgtttaggtatggttttataggaaaaaaggcaagtttgaaatgactaaaaggacatggggatcgctacctactacgaactagttaaccaatttgtcaagtatgcaggaaccagttaactatttcctgcagcaggtttcccaaaaaagcttcaaaacatgtttcatccaaccatttgactttaaattttttctaacaccttaaaaataacaaacaaaaatgctcaaacaagaaaactagaaaaatgttgaaacttaacgatttacggtaaacttttcaaaaattccaagaaaattagaaccttacaaaaaatgagttttatacaaaaaaaaattgaaaaaatttcttttccagtagtttaatgatgtgatatatgaggtttacaaacttaaaaaaatttgaaaatgagaaagtttggccaaaaacactcttttaggcctaaaaacctataaaatcaacaagtagcacaccaaaaatttgttcaattaatgcgtatttttttgctattaatggcagaaaaatttgtattttcccccattgtttcctgcattagttttataattttacctaaattaaaataaaacaactaattaattttgttacaataacaactaactttcaaatatattaaatttatacaataacaaaataaatatatataataaataaaaaattatataaataaataaatatatttatacagagctcgaagagagagaaagagagagggagctggacgggaggtggtggtggtccgacgtatgggacggagatgagagggacaccgacaggaggtagtggtggtccgacgtatgcgacgaagagtagagggagaccgacgnnnngaggggtgggtggagatcgatgggcgagagagacgagaagaaaagtagatcaagagagggaggaagacggcgagagaggagggcgattgtgtggaggcgtacgtggggttttggagagttaagatttttgttttagggtgtgggaaatagaaaagaaataggtgagaagaaatatgtgggcatgtgggaaatagaaaaaaattaggagggcacgtgggaaatgtggcgagaagtaggtgacgatttttaatggacccttataggggcgacggtttaaaatcgtcacctatagcataggcgacgatttcaaaccgtcgggtataagggtccattgaaaaattgtattttattaaaaaacgtcgcctattttgtttactacgattttaaaccatcgggaatactaaatttt

SEQ ID NO: 112101 - DNA, 1208 bp, Cannabis sativa
ctctctctctctctctctaacttggttatttgttttctccaagaaacttcatcaaaaatgcttgacttgttgagttttacaaatcttatatatcccacttctcactcctactttgagataagttccaatcatccatggaggcttaagactagagattttggacaacaatcattagtctttgattcccccaaatttgagttagaactttctaaccctaatctttgtatatttctctatttaattatgttcatacttttatttttcctactgttttaattcatattattgtgatatttcattatacttttttttatttatatcttttaattcattttgtgttccatattttgtttcttgattatcaaggctcatgttcatcccatgaatatgaatcttgaatatcatcttgttcttatttttttttttaaaaaaaacattctcttattgttctaaattgattatgaaataccataaacttctaacaatcaaaatctctagtttcgaaatcattttgtgattttgcataatcaacaatggaggataatgaatttttgtaacttctaagacttgccacttggcctttattttagacgctattagaggatgaatttgaagattgtttcttcatggcttttgtagatctttgaatgaccttttccaacagtataaagtttgcgcgaatttaagttctacaacatcagttatgctcattttactacggatgggtcaaagataacaagattcatctactattacacaaagaaatttttcgttggtcaacatgtctggtcaaatttgttgaccgatgcaaaagtcaacactcacttttttgcttcagttgttaaccgatgctaataataattaatttgcatcagttgttacttcaataataaaataaaagttgacgctaaagatgaaatttttttaaaaaaaattacaggagtcaaattttgtgtcagttttgcttagacgcacctttcagcgttagttacagggtttttgtgttatgttcgcatcaatacaaactttgcatcggtgcacaaccgatggtaaattacttaaaaaaagcataacaaatctcaagcccatttagaataccttaaatgaaaacctaatattaaacctaaataactcacacaatataatcacctctaactaaacctctctctctctctcagatcggaagagcgtcgtgtagggaaagagtg

SEQ ID NO: 112102 - DNA, 3069 bp, Cannabis sativa
atttctcaaaattttgtaggatatcttaaatagctataacgtacataaatatgaaaaaaaaattactaattttttttttgaatgccgaaactattagagggtacatcagtacatcccttttaaggggtatattgtagaattatcccaaaatatttataagttgaagagtgttattgtaatttttattacaattatttagttaatttattaaatatttataatattattaatagttttttttttaatacgtgataaattacgaattctatttttaatattataaatatttcaaaaaaatttaaaaattatagaaatattattttaactataaaaaataatactataaaaaataaattaaaaaaaatattcatgcaattttaaatgtgaaaattgactaaaatattataataaaaaattaatttcagcatatcatttttttttgacatgttcagcatatcattttatttgttagtaaattgtacttatgaaagaactcttcaatttgtttacatttctaattaggctgtttttcatccaagttatttatttgtttcaagataacgcttctttaaattagattggttaggccgttagagaacaaccattttcataatgacaataacgctccatatgaggttatacttagagggttgaatccattgaattcatattcatacaagagaatattagtgacaaatttttagagtagtaatgtgtcattttttatgagtttcattttaatttattttctttttcttatttttaaaattttttatttattttttaaaatattagtaatttcactctttattgagtcattttaaaaaaatattatttagaaatggatgtggtgttcacttaaagacacttcttttactttaatttgtgcaaaattaatgcaacatatattcttaaattttttaatttctatcaaattaaattttcgattattttaatttttatttaaaaaatatctaaaattcttaagtgtataaaataattaaaagatagaagtatggacaataatttataaatatcaataaagcaaaacacaatttatatgagcactattgtgataattattttgttcaatttttgtcattcaattcaaattttatactaaagtgtaatattctgtataaaattaaaaattacaaacatatatcacttataaaaaaatcattatcaatattaaatggtgttaattttaataataataataataataattttttgtaaggataataacaataaaaattaaaacgacgctaatgtatgttgttatccccgttccaagccaaagaaacacgtgccatgagaagagaagtactagttcatacagtcatcaaataagtatcttccatgaagccaaatcacggaaaggctccgcgaatctagaaacagatcaaggccgaagggtacacaaagattcacttagcttcattatgccctcctgaacacggaaggtttgccaccattctaggatttggagtggcctagactcaaagcttgcccaagtgatacccgaacgggtactcaaagggcctatcatagacgctgaccacccaaaagagatgcagacgtctaccttgaggataaacccagatcacccaatgatgattatgctttttctaatacaggattagatcttattccctatggcagaacatggtagtgcgcgcaccccatttgtttttttaccagacggttattctaggtatttatttttcaaggttaaaccttttggtgacatgcctcctctacaaatggtggtcccctattgtctagtttcttcaacacacaagcacaaatccttcgaaggggcccaatagtgaggtctctttgcatgtattttatcccattattgggctttttacagaaaccttaggtgggtcttgggcatgtccatgcctgccctttagcctaaaaatacccttctatttccatacgaagggggataaaaaatgaagatagtcgaagctctggtaatattactctaagctttcctcttcttcaagagaaacaaagagtacatagttagtatttcttgtataattgtaaaaacatcaaatacgcttttaacggctaatagactgactcgtggactagtaatcattaaagcttgatccatgtaaaaatctccatctcctttattattgcattttactatttcttaagctcttattatattaatttttgaaaatgtcggtaaatattttggtgctttcactgagagctgtagaaagacctaaatccatggtcctattgtaacaatggtgtttactcaaaaaatagttactatgaagactcctcaaggtagcctcgaccctatcatggaggatgtaaaccttgtgccactagagcatgctcagtcgagcgatgtgagaggaggagatgcattcaatgctgacaaccgagagagtaacctaaacaagaagcacagctgcatcgaagaagactgagatgctgaaaaatgaggaggaagatgatgggtatatcaaagatgggtactacaaggatggctactattatgaacaagaccatcacgtagtttgagtatctaaagaactacatgtttaccgagatttttggcaactaaatatttttagagcttaagaaagaaataacggaataaataacaaacatgagatttttacgtggttcaggcgttaactattcttagtccccgagtccattttattagacacattggccagtaactgttcatacaagttagtatacaatagactgaaactcagttttcctagtgttcctcttaaagaagaggaagcttggtaggaatttatgaggagtttttctgtataatattattttttattttacaggtgtttttcaaaagtatcctcacaaagtctcttgccctagctcgtattttattggggtatttataggccaatttctttgcacgtgctggcttggattgatcatcttgcccccaaatggtcattttgccccacttatgttttgtcctttagtggacttagtgtaatgtgttatgtgattatgtggcatttgtttggctgaaataaagattcatttatgcattta

SEQ ID NO: 112103 - DNA, 2183 bp, Cannabis sativa
  modified_base (32)..(38): a, c, t, g, unknown or other
  modified_base (110)..(128): a, c, t, g, unknown or other
aaatatttttacgattttttgattttatttannnnnnntacagtctttttatgttgtactcttgttaatttgttgttgatttttggttatttgtatgttattttttgttnnnnnnnnnnnnnnnnnnngatgttattttcatgttgcttttaggtgattttcttgttatttttataaaaaaccgtaaaaatgtaaaaaaaattctgtaaacgtaaaaatgtaatttttttacaaaaaatattgccttatgtaattatccttaattttaaattgacatatttattgcaaatttttaacatgtttataatcttgttattgacacagttacgagcgttttaatatacgttttaatatatttatgtcatatttaattaaacaatataatttaattgtaataaatataataaacttaagtgtgtgtatatagtatacttttacataagttattatcgtgtgtcattttcggattaaacatcgaaaataacttatttaataaatggattaaccgtatcaactcaaaaataatttaaacccatttaatacaaattcaaacccatttatattatgcggattttaaatggtattatcgtgtcttacgctgccaccctagacattttagaagtatgtcccaattaacctaaaacttgactataatcttccatgtttgactaaaaggactacacatccttaccttagccaacatatctacaattaatttggataataattgaatactactatacgaatatgtatataaataatatatgtatagatatacacaaatataaaaaagaaaaaaagaaagagaaaagaggatataatagcataagcagaaaaggtggagaaagtatggtgggactgagaaatgagaatagcttgttgggagggccataacttaattgtcaacctctctcattcattggctatatggttatggttatggtaggcctaataatttgcttatataaatatttataaatagttgtgggttgtggccactactttctctcaaaaacaaccaatacaaaactcgaaactaatgcctttgaactaggcaaagattctttgacaaacttaacataaaaacattattattaattattaataatttctctttctctttatatatatatctccactctaaagctacactttgttgtaccataccatacatactatcatctttttctttctttcttttttctttatatgtttttttaataataatattgtcaagttggcaagttgcacctaatcttaattggcttttggcctactaaaaagggtcgagtcgttttcttaagactttatagaagaagagtgatggggttagtggtcttcacgtggccaagatcataattaattaaacacaaaatagaaaatggaaaacaacagattatttagtatataatctgatatgtgtgatcatgattaagaatcatatcaacctcaaacgaaccatcaatcacatccctttaatcacttgataaattagctaaggtcttaggactaggactaggactaggactaagacgagagagggtttaatttgtcaaaattaaatactttttattagacaaaaaaaataataataatactaataaaaaaagtttacccacctcttttatttcaagcttatttatttttaagggtcaatgagataaagaatatttcacaaacaaaattttacatcttagcagcaccaattatcataggccaactatatttttttaccatttgttcaaaccataccaaatcttgttttacaactttctgtgcataatacttttgattctactttttatatcatatttgattctttaattttaacaattacatcaattgtacaaaatttcatgctctaaagagctttatttctacaccaccatatatgatatattgttgccgtacgtaaatgttgctgaaaaaacttggcctgaacctattgatttttgctctagaaagccatatattgcatgcaatatactagggatattgataaccaataatcaaatgcagccacagtttaatttcagccaccacatgaaaactccaatgagagttaaaaataaatactgctcgatctccttccccaattcacaaatcatacattcttcatctggacatatattgtatttgaataatcttgatttgaatctcaatctatctaataccacaagcta

SEQ ID NO: 112104 - DNA, 2449 bp, Cannabis sativa
ccagataatttcacaggggaatccttgcatcctcgtgcaatagcatccccagagagttgagaataactatggcggttctgaaaataaaaacatgtaaatctcacaaaaacagaaattatgcaacaaaaaagtgaaactttatggttagatatctaaccatataagcattcaacaaattattcaaattcatgctgtacaagtagaagtctagttcattaaaataaacatcccaaagcaactgacttcaaatggaattatcatatcatccaatttataaaatgaaaaaccaatgtctgtaaattcaaacacttgcaaatattacgaaactgaaaaataaataaatcctcatatatataacaagtatattcaaagaaagctacatttgaatgtaatattttgaccaagcatttgaagctactaaatatatacctccctggctaaataagtttaaagctggctgtttcagaaaaatatctaaaactaatggtgaaaccattaacaattgaaaagaatgtgaatgctttcaatacaaatatacatgaatgtgtatatatatttatatacataatatatatatataacatccacttccagataaaacaaaccctaaacaaaattccaaaatccttttcaaataagaaaggaaaaagaattgaggcaattaacatgcaagtcttataaatatacaagtagaatgatatacttgtttggcaattatacttaaccaaaccacatagccaagatatataaagcagtaagcagctgattctcaaaaccaaaaagcattatgattaccaacatttctagttgaaagtattaaaaatccaattgatgtgatgtaataaagaagagcatttaataccttttcaaatgcaacaattaagttttctctcgcagttgagaagggactatccactgcaagactacgaaaatatcgataaacagccaccaattcatcccccgaataagaagccaaaattgcaagctggagtaataagaggattagttagacataaatatgaaacactacataccgtccaactccagagatgtaaacaaacaaatagataaatacaataaaaagaacctgatggtgaggattcccactagatggcaaaagagaagcagcttgcatatagtaactcgaagctgcagcgaactcacgagtctttgagtcaccctctccatacaatcctttgtaacgtgcaaggtcacccaagtatatcaaactacgatggcaggatatcagacctttcttcacttcagcaaacttttttccatctttctccttgaagctttggttatctgaatcctcagagaaataacccagagacaacccatactttgctctgattttcactattaaatcatggtaaaaaccactagcttctgatagaaaagtcttgaactgcagccttatttttgtcactcgatcaggtcttgtggggcccttcacattttgagcagaatttggaccggaagacgaaagggcagcattgaaatgtgctcttagttcctcaattctcttataatgcaactgccacaaggcatattcaatactgtgctgctcagaaaatgcatggtcttcaagaattattgcctcataattctcccgaatctgctgccatgcatttggatctgatggaattcgagcctgggctgacctccgacgcttattctccaactcatttatctataagaaaaatcagttgtgagtataaatatgattcctgatatgttctcagtgaatagcaatctaaaggtaaaagaaatattgcagaacaatgaacataataattttgcccaaattacaataaattaacatataaatcaaggactggcaatcaggaaaaaactcaacatcaatctcacatgtaatttatattaagtaaataccttatcatacagctgctgagcacgctcccttgaagaaggagcagacattttatctacctgtattatcatcatccatcaaatatctctaacaaactttcaagagcactaaatctggagaaaaaacatagcaacaacaacatcagctgaacaaacctattaagaaaaataaaggaatacaaaaaatttaaataaataaagcaatccaaattccatgccaaattaataagcattaataagacaattgcactgcaaagcattcaagttatggcaacttctcacttagcattacgaaatccaccacgagattaaaaataataacaaacctagccagtgttccatgttaacaatgtctccatacgtaaaaccttcaaacctgaacccagaaaataaaagccttagtttccctgatcaatctgctttcttataagtcctccccatgtcgtaatataatagactactaaacttgagcacggaaagtgtaaagttaaaacacccattcatattgccactagttagacaaacttcaactctcctatataagaattagaaaaga

SEQ ID NO: 112105 - DNA, 4736 bp, Cannabis sativa
  modified_base (4307)..(4310): a, c, t, g, unknown or other
gagagagagagagagagtttttaaggagaaagggtatttttgtttttattttgtgaggataaattctaacttaagttaattgttttatccttattaataatcaatttaaaaaatctatgaattaactagaaattccactaaagacaataattaaaaatcttatatcattttgccctttctttctcatgaggcaacctaaatagcctagggataaaatagtccaacatcataactccacaaattccaagatgctcaactttatttaagtgactctaatggtcaaatcgtcacattccacatgttattgggcataaaatataaaaatcataaaaatttatatataacatatataatacacataaaattcagtaaaatcttcataatttagaaattatttgtctaaagtttatttctcacaataggtcatattttctactaataagcatataatcgtaagataataattaaatccataattatctgctaattctcatgtttaaactatgtattcattacacagactgtcgatttacgcaaattaataagctagcttgaagcttcttcataagaaaggaggatattctggaactgtgcacaactcttattatttgcttcaagaaagaagaatctatcatcaacaaaaagtaattgtgagatcttgggtccacgctaaccaatcctcaagcctgaaatattgttcatgctaatttcatgtttgatgagagaagataacccttcagcacaaattaaaaaaagaaaaagggagagcgggtcacattatctcaaaccatgagtaggaaaaatgtttctgataatatcaccattcacatttatggcatatgaaacacttgtgatagattgcattacaagtccaacccaactaggatgaaggcataacctcgtcatcatccctttaagaaaccaccaatcaacacaatcataggccttagccatatttgttttaattataagttaaaaaccattttttacctttcttgtgacacttaatagtattcaaatattcaaacccaatcatagcattgtccaagaaaaggcgtccatgtataaaggcactttgctccacaaaaataatatcattaagaacctctcgaaacctattactgatcatctttacaatgatttaataaatgacattacaaagaatgataggcctaaaatcagtactattgagtgactccttcactttaggactaagaataatgatagtttcattaatactatggttagtacctatctcatcagtgaacgcgatacaagccttacagacatcatcacctacaatgtctcaaaattttttgataaaacccagtgctcatagcatcttttcctagacttttatggggatgcatttagaaaagagcaatctgcacatctgactccaaaaaggaccgcataagagcagcgttatgagcatcaagaacacaagtaggcactgttaaaacccaacccatagccccagagaaaggttggtgtgaagtaaacagattcttaaattaatctccaaacactgttgcaatattatgtatgtcctccacctaaagatgattcgattaaaaattacttttaatgaaattcttccgtttacgatgagaagcactatggggaaaataaaggagttttgcctcctagctttaaccatgcatgaatcttttgcacggaaggcccaatacttctcattcttgtaaagaagcacatccaactctttttccttctaaccgtagagtggccaagaactagcatctaaagctgctaactcaacctttttctttttaatatccattaggtcttcttataaacttgaccattcctaccataaattagctcattagaaacttttttaattttttctccattaccgtgtatactcgtatccctgaagcctgccaatgtttcttgacaatatcttgacaatcactctcctgagccagttgaaaatgaaatatgcttaaattgaggttgaatctgactcttagaagggagaagaacataggtaagcaatggtcggtgattagacccatgcaatttcaagtgagagacatacaaattcggaaacaaagtccaccaatctgagttacacaacatacggtccaatcgtttttgagcaaaggttatcataccatatattaactatatatttaaaataaatcaatttttgattaaaatatttaataaaatctttttagtaattaatatttataaatatattttttaatttataagaaaataaataaaataaagttagttattggtaatttattaattaatttttaaattaattacaaatgtttaacaataatctagcaactaaacataaatataatcattacactaatatgtaattattaaaacttctttcatatattattagcaatagcttttagtttttatttgtacgtaataaatggtatagagatccttaatcatcaattaaccacattttcaccaaaaaaaaattaaccgcgtgatgatgatgatggtggtggtgagtgatgtgcacattcatatagtaaactttatactcgtgggtactcgattatctagtcacgatatatatctgaggtggtaggttgggcctacaccttcatattaaaactagtaaatttaaacttgtacttagattcaatgattttcaacctcactacattatttaaaccaggcagtaaacgatatcttgctctttggatatataataagtaataaattttgaaattgactgtctctttgtgggctaccattaattattggaccacttcctattaaaattacaagttgtacatattcctttataaggcattatggagttacattaacttccttttaggttaactaaagtattaatatattataagctcattcttggtgggtggggtggggatattaattataaatgacgaagctagacttggctatatataataatttattaatttatgtataaaaagaataataataatgtaattaatttccactaatttgtttctcaaaattatacaaaattaacaaaagaagaattaaatggaataacaataaaaaacacacataaatataagaggtagtttttttgttcagttttgatggtgatgatgaaaaagtttagaacggcaaagagggcaagaattatggcgtaaggaccactcagcaatgcaagcttggtgaaacacatggccacaagggacttgcttcccaccttgacctgaccggaaacattccatgcagaccgagcaaacatcggtggcggtggtggcaacatcaacggttgacatttcgactaccgaagtgttcgacgttgcgatccaacggttagaattatcttgtggcggcatcgtgagagcctcgtccaaatcaaagctcatcatgtcaactggatagtttgttgctatgaaggccataattgttgttaattataggactgactaattatatgaaaacctcaaaaagagggttgataaatattaatggtaattggatgagtagtattgtagtagtagagatattggtttctgtttgtttggatttaggttcatatttatggagctgaaaagtactatagtgttgagtttcctcgtaagagcaagggtggcaccttgtgctttgcttgactttgtcatatattgacttgaaaaaacaagtagcctaccttataacgttattggttaacagtatgatttttttttattattatctaaatgaatttctacacttttatgcactttggattttcgcatatatgacacgggaaccggtgggggagtaaattatgatggcacattattttaattaactaataaatatattatgggaaatgctcaaggatagtgtgtctagtcctctcttttttatcaatattactattggtttaattaaatattaggtcccacataatttaatgtaataatttttagagaatattgttagccaatcataagatgacacatctaaaaagtgctaagcaacactagtgcctaataggaatattcatatatcactaaaaaaaatacttttagtgacaatcttgtagtcacaacataaattttttatgactaagtgtaactttcggtcacaacaaaaagttccttgtgactaaaacatagcatttagacacaagttgtcactaatttaagtgtcgtttggtaacacttttattttctaattttttaatcacaaaataaaagtaaaattttatttttgaaaaataaaaatacgttttgtaaccacttttatttttcacttttaaaaacagaaaacaaaagtgtgttctgtaaagttaatttttatttttatttttnnnntttatttaagtcgagtctaggtttagggtcggatttgggttcaggtcagaggtcgtgttcagcgccaggaccgtgagggggatttggatccgagtctactcggagtccaaaatattgattaagaaaaaaaaaactgattaaaaaaaaattgaaattgacttttttttgttttcaaaattttgattctcaattaaaaaataaaaacaattttatagatcatgtttttaaaaaatatttttacttttccaattttaaaaacagaaaactgattaagaaagtattaccaaacgccaacttagttttagtcacagtaagtattatgactaaaaacacatttagtcacaataaattataatttttgtgaccaatacttttagccacggactttttagtcacaacgtggaaataataatttataattaatca

SEQ ID NO: 112106 - DNA, 6985 bp, Cannabis sativa
atatatatatatatatattaccgaataggtgttttatatgtaaagtttttcatttgatattaatattccgacaggagcacagcattctggagattaaaggttaatgataataaacaaccaaaggattcaccaaataatattttcctagggtcctttaactaaagaagatcacatattccttggtgtttttactaacttaactctggaaaacactgctataaactttgaaaaaaaaaactcttaaactcgcgaaagtaaactgtttcggtaataggttactagaatttaaaaaataaaccagaaatttcctatagcaatgcataataaagtattcactgtcacacgaatgaaaacccatttcctgtgaaagaaggtaaaggttctcaatctcatttcaggaaacagaacataagttataagtcatttatattattcttcaagaaatccttacatgactcaaaaaaattttgcgatttttgccacttaaaatttagacataaacaccagaagagagtagtaagaacaaggacccgaaaccctgcataccaggtaaaagaaacaagggagagaaagattaaattcaacaatatcagtaattcagaatcttaataaaattgcaaaaagaaattgtaggcctaccaagaatacagaagctactgctcctgttgtcagctccttggcaagactgcgggttctcctagaagatgttgcttcatagctgcaatcaagaaatacttctagtttagccgtgccacaaagattgtttcacaaaacacttgaaaaatgttcagagtgcagctgaaagtggttaaaaggttccaaacactatcaatttttgtgtgggattccttacaaaataggagaggtttttcatgcacaagtatgttttgttgctcacattgtggccccaagacttttttctacctatcaaaactaaattttacagctgtaagtatatcaagttctgccaagagcaatttaaaaatttcttatagaaactccctctaattttatgtatatacaaagctcaacaagaaactaccaccatgacaagaaatactatgcacaagacgtgtagaagtgtaaaactcatgaggtaaaaacctgtgttgtgtaaatcaatacgcaagtgaagcccatgtttggtcccatgagatatgggtttgattattcacaatgaatggtaatattctcaagattcttgctagcaaagattattattatgattagttaaaaattataaaactagatcctggcctagttctagtattttacaatatttgaagaacacgaaacttagcaatatatgtatgtaccgactacctaggtagactcaaacctcagatattgtgggagtaggagaagtgtgagtacccaatgcccccgatttaactctattcaaagcatgttatataactgattactatcagaaccagagtttgaaagatctccatttcaaacattcaacaaacaattaagcagttctctttcaaatggctgcatgttgatacttaataaagagaaaatttaccattctcaatattctgttccaattatgttctaatttcattctccgaaaatttgctaaaaaaatcccactttttctttcttttaacgataaaaagactcataatttggttatgttaaaccaatatccagatatttctcctgcaacgctcttcaaatcactaaatggacattcagaccccccaaaaaatattaattctctcctacattagatgatcggatctaccacacacacacaaaaaaaaatctgggaacataagcgaaattgaattcaaaaccctaagtcagcaccgtaatcataatttgaacaaaataataataatgaggaaggaaagctaaaactcaatacattggtaaagaaggatgtggcttacatgaaaaagaaagcggtaaggacgaggccgacggcgagcattacgaccgccagagttgggtaccatacttccgggactggactcgtgatcggttttggagccttcacgttcatcccaataagaaaattatataaaattaaaatcgaaaagcaaaacaattgaagaaaatgaaaatgtgtacagaaaagtgatgggttgattaccataagagacggcggcgagttgtggaagagggaaaattgagcttgttcttgggtttgatccgtgagatttcagatcccagagccacactcaattttgactccagttttcggtctttctctactttctactcagtgtatcatattctattgtagccgttggattggtaagaaatggggaaagatcaatccaacggtgcaaaattaacttttttttttttgtaataataaattttgagatttaaaccgcatggactattattataaaaaataaataaataaatatataaaggaaagactattgtaatacctgaaataaaattgtaccaaaatggtgggaaaagtttgggtaagcgtggaattctgcaagatgtccccattagctagtgcaatggttaaactgagttagatcgtgttttgaaagtttacaggttttctgttatttcagtttcactggtttcgcagtgttgccttttgattttgtgttctttaggcgattagcctttcttcaatgaagttttatttaataataaaaaagacgttttcattaatggaatatattgtttgattacaaacaaaatttagataaaaaatccaatggttaatattttgttgaatgaaatatgttgtataatgaaaaagtgaaaataaaaacaggaatgaaacgtaattgttcttgttataactcaatctcgagtgttattttttcctaggatattgtttgctgttggcatatcaattggaaggttgttcatacttcatttggatcaaaaggaaatacttcattttaggatgttctttttcttttttcttttttaacaaacttcattctgcgatgcaaggaaatatattcttatcacagattcaaaaaaaaattaaataataattgattaaatctatattaagaaattaataataataaaatagggaaaaaaacacaaatcacattgcatttggagtattttggaagtggtgaaagcaggcatttcattttcatagtgcaaaatattctgtacaaatctgtagactgtaactagagaaaacttgtctctaaatgcactcactggatttacaatcaaaagttctccttcactctgaaacgcaaaggatttggtcacgtcagccgagagtagctccttctgtgccatgagaaattttgtattacgattcaaacaccaaattccatcccatttgagcattagtatggagaaatgttaccccttattaaccttttcatgatttcccttaggaggtcttcttgagcttcttcttcttgtcaccgaaaaatcaaacaaggaaaagtcactctgtcattcaatgggaacctgaccaaaatctaaatgcagaaccatgatcactgacactgccacctgataatctccttactctttcccagaaatgcttgctctttctgcttcccagaggaccagaactagagtgacgcctgaacgattcggattgttctgtgcctaatcttgcagatgaactgaacaattctgatactgacattccccttccaacatcaagttcagactcatagctatgaactgaatattggctttgtggggggcctggaaactgttctgaggcactgaaatcaatagacaaatcatctcgacttgaagttcttgatcctaggttttttgcctcctcaatctcgttacacaccagtttcaaggcctgaacaacttcacccataaaaggacggtttgatacctccggttgtacacacatggatgcgattgctgctaccttggctacactttcaaaagggacctcagatactagcgaaggatcaataattgtttccagaccttctttactcgcaaggagtggacgggcccatgcaactagattttcttgaccaggtggttgtgacatgtctactggtttccttccagttagaagttcaagtaggacaactccataactataaacatcacttttcacaagaaggtgtccagtcatcgcatattcgggagccacatatctgaaaattgatgagaaaaatataaacatgtcaaacacagatcattttcaaattgttttgatagctcatacttagctccttcaagacagcactggaccaccaaaaggaattatacaacaagctgacatatggtaatccaactaaggtagtttactttattaatcagcattttattcctatctatcttgaatacttagtacagcaaataaggttttctaccttgccagactaaaaggagaaagtgattagtataaattggtcattacacatgataagttcacaaaaccaatccacagttacattttttccactgtgatctgctatatgccaaccaatccagtaacttttttgctggaatctatccactaacttgaaaggaaagaaaggttttacgaataaatagtctgccaatatttcaaaaaaattcaggtgcactagttccagctatgacaagtgaacaacttgttttacgcttacatttcctattggaataaaggaacgtttcctcaatcactgaacagaaagctctgattataacatttctcaggtttatatagttaatagcaaggtggttatgtaagtatgagattttagtacccattcatgtgcatataagtatattggaatgatcctttttccatgcacaaaatgataagtgtaaccaaggcggttaagaataataaaaaatgatgaataaaaaagcatacccaaatgttcccatgacacgtgttgatatgtgttgattttcttcatccatggcagaccgggccaaaccaaagtccgaaacttttggcataaaatcctcttccaacaagatattgctagacttaaaatcacgatgtatgacacgggggcttgaatcctcatgtagatatgccagtcctcgagcagcaccgagtgctatcttcattcgagcaggccaattgagtggagcagcctctttgtcaatgcctggcaaaacaaaataaacagtgaaactagtaatctccaaaactgtattaaaacaataacatctacaaaacattttttttgggaataattctaagaagagtcaaataatgtaccatgtaaatgagattccacactgccgtttgggaccagctcataaaccaagcaacggttgcgctcctctgtacatataccaatcaacttgaccaaattccggtgatgaagacggctaagcatttcaacttcagccaagaattcacgaccaccctgttgatcatctctctttaaaactttgacagcaactttggttccatcttcaagaacaccgctgtaaacaagtccaaaccctccttccccaagtattctagatgcattaaaatgatcagttgctttttctatgtcacttgtgctgaaagtcttagcagatccagtgtaggtcgcaatgctagatccaaatgataaagaagcagaactgtccctacttcctaacatagacgctggagctcctgcaaaatgtcttctcttattagaaaagtgaaaaatataattataataaaataaattcttatacacccaattgccagcatgccatccataatcttattaaagacccaggagtcaggctaactttcatacccataaattgaaattaagtgaacagtgaaattgaagtgatttatatgtaatttttctgtaattagtggctcctatttctataaatctcttcttacattttacagaactaaggttgcttacataaatgatattatagaaagaaagaataaacagataaaaaggcaaccttcatatataaatgaacactaattatcatcttaatcatgcaccatggtcaacactgattttgctaacccaaacttagtggcaaaaatacacattatttgattccatgtacgctgtgtatattccttattaatactacataacaagctagaatcgatgtgtttatctgcatctatttttattttcatagactacattagcgagaacttgattctacaatatctattggctgaattacctgatggtttggacagggaaggcagcaaaacacggggagctggccctaattcagaacctttgtctctatgtttgaaaagaaaaatccaagcagcaacggagcacgaaaccaaaattaggaaggctgatagaacaataatagcaatgatgccaccactaagcacctttttatgttgcctttttggcaaatcaaccccaagaggctttattgttctcgcattattgtcagagccagcatacggcccatcatctatcataccaacatcggaaggtggcgaggcaggtaaacctacaaatgaatggttcttgtgtaagataaaaatttataacaagaggataagtggagggatcagcaatttaaagtgttaaagaaaacctggataccgcacatatagcacttcatagtcaccaaagtaggttgattggatggtaacttgcttgttccaaaatcgttgatacgttaaaaaagcagtagtgttatcaaacctttctcccattggtaccaaatcaacaaggactactgtcttctctggttgttggttagcggaatttgctccaataatgcgtacctgactttgttttacgaaaacactgctagaaatttcctgggcgagctctgagaccaatgggaagaaagtatataaagcaacactaaggcgcaatccaacttgaatgggcaaaacacagccacaaggtgatccaggaggagtatttgtaaagggctctgtacaaatcattgttgaacaatctgcaacaaagagaagactaaacgtcaaatttcagtagattaaagctgtggaaccatgattaaaaaacgcaagcaagaaactttctagcttttacataccttcattaggaggtggaggaggaaatacaagtgaaacctttggtggcggtaaacgtgaaac

SEQ ID NO: 112107 - DNA, 6633 bp, Cannabis sativa
  modified_base (66)..(84): a, c, t, g, unknown or other
cagaaaaatgcttattgttgaccgccattgctatagcaatcatcgcgtagcaattgccagcccagnnnnnnnnnnnnnnnnnnnagtccagctggctttaatgaagaaagaaaggagctgatgtggcgaaatttggctaataactcaacaaacatgtgaaaaatgaagaataagtggaccatgacttagattttcaattagagtactacgcataatatatatagagtaatattggaagccaaatttgttatgttttagtatttctacacttattttattttattttattttttgtgataacatctcattagcttcatttttgtttgcaaactttaagcaccagttatatttgctaattaagattgtcaatgcatacatatgtatacaagtaacaagaaaatttcaaaaccaataaaaaatatatcacgagtttcgccacaaaaaaaaaaataataaaaaaaaaattataaattaagtatataaaattaaaatatataccttcttataataaattatatttttttccatctactcatattgatactataagtaaccaattaatttttaaattagaaatgcaattttattggacaaccaactactttgttattattgattttgtttggtcccactacttaaagttttgttttatttggctatatttggctatatttcagttgggtttattgtctaaaaaattaggaaaaactttctattttggatttgatacataaccataaataaatgaatctgattgcataacacatttacaaaaaaataaactaacgacaagaaattaaaagtgttacatactctcatgaactcgcataggttcaaaacatttttactatctactcgagatgaattatttcgataataacaccatacttatactttacatcaaagtattagaatattttatatcaacttacatataaatagtatgatcccaattgtctaattaagactataatgagataatcaggttaattaacagtatttgagacacatgataatattctaacgactatagttgactccttaaattataattcactgtaagtaatattatgttcttgggatgtgtggtagtgttaaaaaagacttgttctccataaaactccattgtttttcacatttgatttgtgtatgttgtttgtagttcttgaagcaaagtttatgatcaaagagaccaagatagctattagtgaatcaatgtcaagattaaccacttgaggctagctcaagtggccataggagggtgcgtttgtgttggaggtcctgggttcgagtcacaagttatgtattgtgtaatatataaacgcttgaatcaaaaaaaaaagaatcaatgtcaagatttattggaaacttatttttaaattagatagctttaaagtttataaagagcttaacattttttttttcaatttttttagtttaggggaacaattgccccctcgccccctctcgcctctatatgggtttgctcctctatacctagctagagtcccactttcttagggccttcttttaaaagcaaagatcttattattcaaaaactactataagtgttaaaattaggagtaataaatgtattaattaggtccaacatagcacataggtggcctacgagactataaggctataaaattttggagtcttcatgcaaaactcaatttacatgcacacaaacggtttcaaaccatgatttccacgtgtcattcacttagcatgccacatcataataacaacatatacttatattccttctttatcattaaaaaatatttgtacttatattatactccctcttactaaatttatttaattttgtaggattttttttactattttgatctataattatcaaattaaaaaaaattttatttaattttttacttggagttatagcccccacattaatacaaatgcttgtactatttattaaaaaatactaaaaagtacgtagtatctagtgactagtactctccttaatgttaacatctaatctcatataattttaaggtaataatttttttaaaaaaatagctaactaattataaggcaccacctttaggtagtgttaggcaccattatattacctataacaatgccctatttattactaccaaaattaagatgggatgggactgaaatttggaatttagtaaataaagagtaatttcatgtaattattaatttgatagtaacgtaaagtaatggaaaagagaaaagaaaggaaaatgaatcatatgaagatgaatacaaagacaaaatggcctttaattattgactaataatattaacgagaataaatactataaatggccgaacacaattgactttatcgatttaaaacaaagtaaaataaatattacaaaaaatatatacaaaaggtataaattactactaaaaaattaaattaggatttcttggctgaaaaataatcgggtatagtattctcattggtctttaagactgacgcttattcgactatcacaaaactggatagaataaacatcgtgaaaaaatatcagaaaaagtatttcctgacacaagaaaactatcgtcaattttgcacaatcacctatactataagcgaccgcaaaaccgtcagctatactattattgctgacgatttttgcacacatggctatatcactttatagcgtttcaaatattttttttttctaattttttaattttagcggaataaataatatattcagatctatacaatatgaacaatatataattttgatcaaaatatcaaaaaaattacaacttttttttttaatcttacataggaaataaaatatttagatctttacaatatgaacaatatgaacaataagaacaatatataatacaaattcaaaaatctcaaacctatttttttacgcagtgatcagaattatatatgattaacaaagcagctagtggcggacctaggatataatcttagggtgagctaactaaaatttgtagtaaaatttaaaataataattttttttaaaaaaatacatattacattgtttatttaaattttggataaagttgcagcattttgttgagcttgttttcttcagagcactaacaagtggaggaagattgtactgctgctgctgctttgatatctcaatgttatctattctaaatttgttctgatttccaaaattaaataacattcattttaccaaatgaaacaaaacaaagtaataagtattctaactaaaaataataaaataataaaattaaaaaaaaaaaacgggtcgggcctaactcggcccgattatctcgggtcaggcttggcccgctaggccaaaagaaggagtcgggccgggccaggccaaagtgatatcgggccgggccgggtttgtggcgggccgggccgagcccggctcgactgacattcctacaacaagttatgcaaggataacaaattcgcagtttccaatcacattaagttaatattgtctcacatggattaaatgtaaaaatattgagccatttacaagaatataagttacttcgctcatcaccaattagttttgagataaaactccataattcttgtcatggtatcaagagtatatccctaactagcattacatccaaacatattcgatcccccaccatcttgagaggagatattgggcatggattaaatgtaaacatattgagttaattataagaatatgaattacttcactcattactaattaattttgagatggactcgatgattgttatatattctaactttgatttgttttcttatttgatcaccctgcaattgataccaaatatcctgttgttgtgggaatgaattgcccatttctagtaaagcatagaatgaaggaatacatgcctgatatgtcgaagctcgaatttgcagaagtgacggcctgtgagagcccacaacctgttgaagctgagaataattcatatcatgcatgccctgtaactgtgatcaaaagaaaactgttaaaagtttaagatgaatctgaataaaacagtgagactattccactcaacaagcaaaacaatagaacaaataacaatttaatttgtcacgtggtttaattttgggggtcaatttataaaataaaacataattatatgcaaaaacaacaaattttataaatctagtggtcaaaatataattaaagtaataactagggtgcaaattaataatcttccaaagtatatatttataacataacataagcccctttctttctcctctctcaaattcataaaaatctgttctttattttttgttagggttttaggaagaagaagaagaaaaatggcgacgtctagggttgctgtgaaggtaaaggggaaggcaagcaaaggatcaaagagctccaatgaacaatcaaccattcaggtcttcaaggaatggactacttggactgtgaagaaggccaaggtcgtcgttcattacggctttattccagctgtgatcatcatcggtatgaattctgagccaaagcctcacctttctcagcttctaagccccgtttgatttgaatcacaagtaacccaggtttcaatttgggattttctgtaatgggtcgttcatccctattagtcgattcgacttcgttttctatagtcttttgagatctcttgttctacatattacttaatatgatttaggtttttttttttaatattatgtaatggatcttatgaaacaaaaaagttcagatttttaatatctaatttcgatttagtgtatgattttttttttatttattttgcttgtactgaataattgagggaattggtgagatgggtgaggtgaaattgtttgaatatatacataaacatctaataatgatttaagtaagttagttatagtattcatattcatgtttttgctttctaagaattacattacttaattgttgttattttgtgaattatgttcaataatatttgactgatttaggtaagaccttagttatatgcacaatgaatttgttttgttttgtttgtatcttagtttataattgggcttgatgtccttaccttccccatgaaacaaactaattaattgatttatgctttatgccttgattgatttttgttggctgcctatatacaaaggacgtttcctttgtaattctttagttgagttcatttgtgtaaagactccatttttatctaaaggatttctttggttactctcaagtgttcttcattattgttctgctaccctttggtggctgaacctcgcaagcggacttggtgaggctaacaacagattgttcggagcgtgtcaagtggtaaacttatttgtgaatcaagttcatttagtattgggaatggagtcagcagctaggagggtagttttgaaatctttaaacattgttaggttattcatagcaaaagttagctgtggaatgaagttatggaactctggatttgtgtttgtagagactgttacctagttaagaattagctcattttgtcctctgtctagatgatgaggttttaacaggtgtttcattatattatattagatgttcttcttcttctactaggtagttttgtatgctcagcaagcctttttgcttttcctaattccattgaacaagttaatttttgtttcatgttatggtttgaatgggaaaaactagtgaaggtgaagtactatgtgtgtggtttgttttcataaggtttgaggtttgagttattccaagtttctggtgtttgaattttcttaagcattacttgtcattcttatttgtttttgtcttttaccacaacaacatagctctataatatgtctttttgtcctggaaacctaatcaggagaattgattgagtatcatataatgaacaatcttgttcaggctctcattcatatgagacaacaatattcacttcacttcacacaattctatgacatggaaaaagatgaatcttatctaggattgtcagctggacagagtagggtgtggggccaaagttgtcccaaccaaacatgccctatgttgtggcaaaaaacatgcttgcccacttacactctgatcttgtgtttgatgtcccttacccactctcactctaattttgtgtttggatgtaacaaaatcacatgggaaatgatttggaatgttttgtcaacttgtaaccgaaactggaaaagtgtcatctgttgggggcatcagcttcggttagtagctcttttttgcccaactaacacataatttatgatcgataacattcaagtgtttagtggaatttttgagtttgttcgagcatcagtaaactgcactattttttacttcggttgtgagtgagagatcttcatcttactttttgtttacaatgtttgagtttgtagttttgtttctgtcttcatatgcttttcggcaaggtagtaattagaatgagtgggaaagattgtgtcatagtgtggccatgagggacaaaactgttggaaaattttagggtggcatagatagaaaataggagagaaagaaaatctagaggaaagaagagaaaaatatccactttctttgcacagatagccttgatacatgccaaaaattaaagaggaaattacatcttataccctttttatattgtcctcttttatttttaccctctttttta

SEQ ID NO: 112108 - DNA, 6926 bp, Cannabis sativa
gatgcaaaaaaggcgaccattcctttgtatttccctgggttggtgtgtttgttgtaagaaaagtggggaacaagtggtgcatctgtttttggggtgcagccttgtgcaaagattatggattaatcttttgaacgtatttgagttttgagcacttttcgttcttagacttgagtggagattggagaactttgtgtagctttgactaatagtactttatatgcttgtgtcttgtttgaatactgtttgttttagtttttttttgtgctaaaaccctgttaccacggtttccctccgccaaaagtgagatttttcaatatttttcgggggaggggtcaatctaatataagtgacctctttctctttttttcaaaaaaaagaaagagagggaggagagagggggagttggaatgatgaataaattgagagggatggggagttggttaaactctttggaaggtaaatatactatttatccttaatctcctcattctcccttctcatccttccaaggagaggactatctcgtgacccaagagggttcctagccttccaattttctcgactctcccattatccctcttgccaaacaaggatgagatggaattctccttaccgaacaattccttaataaattgaattgattcactcatcttatataattatctatctcattaggcttcccgtgatggaccaacaaataaagttcgggcaagaatgtcaattgcatcagcaatcatatttggctcagttttttggagaatgggcagatctcagacatcaattcaagacagaatgggattgcttcaggtgagcaaattaattgatttccgcacagtgaatatgactgtcttgtcctatactttcctataggctgttaatttttataattcttatatacatgtgtcaaacaatgaatatgactctttaactatactttcctctaggctgtgcattttaataattcttatatacatgtgtcgaaatagtcataggctctgcaatttattcctggtcaaagtttgtttatttattgttttaagttgtgaaagcgcctgtatatttgctttaaatggatttgtctcatagatgaattgtaagtttagttggtaattttcaggttgctgcaataaacaccgcaatggctgctctcacaaagactgtgggagttttccccaaggagcgtgcaatagtggacagagagcgtgcaaaggggtgttatgctttgggaccttacctggtttctaagttgttggctgaaatacctgttggagcagcttttccattgatgtttggagctgtgttataccctatggctcgtcttcaccctactttttctaggtatcctggtgttactactgcattttctgatactgatacagcagtctaatttttttaaactttaaatattaatgggtgtatacttgcattttgctacgattagaatagtcacgggacattgatttagcactcaaaagagaaaaaaaaaaaggcgttctttagaaattttgattaagtagagtttagattataaagaatgcaatttaacaacttttatttgcaagatcaacaaagaccattttcagtcctatattgcagaaatattgatgaaaccaaatgcatacataccttattgctgcaagaataaatatgttagtttaattaggttgaaatgaggctttggttccctcagtaaaattttcctagagaaagtatgccataacttatagtgaacttctacttggtaatcaaaagtgcggatgttactaacttgtagcttcttgatcatacaggttcgggaagttctgtggcattgtgactgtagaatcttttgctgcatcagccatgggccttactgttggggctatggttccaacaactgaagcagcaatggcagtgggtccctctcttatgactgttttcattgtttttggaggctactatgtcaatgcagaaaatacgccaatcatctttcgatggattcctcgtatttcacttataagatggtaaaaaagtgatgaccccattacagaaaaacaatatatagagtgctttggtgatagctgtagtttgtatttttttttccttttcctgcccttcaatgacagcatagttctttgcaaacttccagggcctttgaaggtttttgcatcaatgaatttagaggtcttgaatttgatcatcaacattcctatgatattcaaactggagaacaggtacgcttggatgatgaaattgattcctaagtgattgaacttgcatcaatatagtctgtcctctcccattattttttttttgaaagaaaaaagggtaattttcatatttaaacttacagcaatatcatttttattcgttcagtcaaaagacagttccgcaaaaagaaacatttgtagaatatgggcatttatcttgtgcagtgggggtgctatattcacataagtttttttctcctctctttagtttctatataacgatcaaagctgcaacaccaatacacatgagaaatacaagggagggaaaataacaaagttgaatacttaattgtagcgtgcagcatgtacccatatgataatattgctgcctatgtgcctgttagagattgtagagactgctcttttaggcaatccataggataggcccaatgtgtctccattgtaccatatataggtattgagatacatttttgataaatataactgttgagattaataatttttcaggcactggatcgtctttcatttgcacaaagtcacattagggatacagtggtggcacaaagtaggatacttttattcttgtattgtatcacataccgtctcatggagaaaaataagcccaaatatcagcagattgagcttccaccttctgataaaatccaaccagagcaacaacttgagccttttaacacagaccaagtcgaacaataccaaccaaaagaatctccaccacctgatcaaattgaatcaaaccagcagcttgaatcacctgaaattgatcaaatccgaccatttatcctagaaggtttgtaactaattcggcattaataatcttctcataagaaaaaatcaactatttattgatttgtctcatacaggtgctaagtaaaggagatgtctttgcaatacaggaagccccatacttttatgagctaataagcttgtttagtttatttttatagctttttgtgaatgttgtatatcaggaccagcagtttaagagtctcaccgggaatgattctcattgtaattgatcttgtcaacaccttaagccaacttgaggcttgtaatggatgagatgacttcttttatggtcactttaactatgaaagcttttgcttgattcaagtgttttgacctctctttactgcttacaaaaggcggtgcaacaatgaaagtatgcattgaaattttctgtgtttattttcgttttaaccacgagtctctaaacataaatatttatatatttacctctttatctttttttttttttacataaataactgttagccaaagttcacacaaatctttgacttattatattgtaatctaattaggatttttctggtgcagaacaattaattatttgtgctgaatatttatctagattctcttctgttagtgaagatttagagaaattgtattgttggaaaactcagctcaaggtctgagtagcagggcatttcattaaatagagaaagagtattacaatgacaggtacagagtaccaatacaatcattacacgtgtaaaaggaatataccctaaacaaattctaatagaaagttgttatgcagcaatgattacaaaattattattgggattccctcattctcatgtcccgcattcgattctttcaattcaatttctttaactctaccccgcaaacgaaatggagactgtgtcacattgagtttggtagtaagaaactgttaacaagttggagtgagacaattggctatctgatcatgagagggcacgtatcgtatttccaatttcttgtcaagcaccttatcactgacaaaatgcagatccatctctatgtgctttgttcttgcatggtaaactggattggaggcaagtgcactggcactcaagttatcacaccagatgacaggaactgaggagcgcttgaaattcaactcatttaacaactcttgcagccagggcagttctgcggcaaggtgagcaagagctctgtattccgattcagtgcttgagcgagccacgacagtttgcttcttggatgaccaagaaatcagagagtctcctaggtacacacagtaccttgccacagatttcctgtcattgggacagcatgccaagtcagcattcgagaaccctacaagagttagattcacactaggagcaatgtgaagaccatggtgcattgttcccttgaggtatctcagtattcgtttggttgctccccaatgaacatcagtcggctgctgtttgataaattgactgagtttgttgacggcaaaggagatgtcgggtctagtgtgactgagatactgcaaagctcctattacactcctgaatattgttggttggctgagaggtgttccatcagaaatggacaagggttttcctgctgtcataggggttacactaggcttcgtgttttcaagtttagctttctgcaataactcagcactgtacttccccggagacaaataaattccggtgttgtctctaaaaacttcaatacctaaaaagtactgaagtggtccgagatcctttagtgagaatgtttgattaagtcttgccatgaaggcatgaagttcttttgagttgtttccagttaccactatgtcatcgacatagacaagaactaagattacatgcttcgggtgtttcatcatgaagaatgaggagtcagcttttgaattctcaaaaccccactgaataagtgtcgtttttagttgatcataccaagccctcggggcttgtttcaacccataaattgacttgtgcaacttgcacacatggtgaggtttttgaggatcttcaaaccccggaggttggatcatgtacacatcttcatcaagagttccatttaagaacgtgttgttgatatctacttgtcttacttcccaatcatatgccactgctaaagtgaggacaacacgaaccgtgactgccttaacaacggggctaaagtctctccaaaatccaaaccgggtctttggtggaactctttagccaccaagcgtgctttgagtctttggaagcttcggtcagcattatatttgactttgaatatccatttgcagcctacaatgttataaagagctgaaaaaggaaccaaggtcaaggtcttgtttcgaattaaggcataaaactcggttgacatagccttgttccacctatcatgctgaagggcagcagccattgaagcaggttcaatgaagtcgagagagaaggttgattgaccaaggaaggtccgaggcttaaagataccagccttgcctcgagtaatcatgggatgtgtggcttgaatagccgctgcaggagcagcaacagtgggattttcagcaccagcagcagtagacaagggactagtagaagaggttgcagcaggggaaactggaagctcttggtctgtcaagaatacagtatttggaaaaggaattggagagccaacaacatggggagaggaacttacagagttatgttgagaacctgaggaagttggtgttgcaggggcacttgaggatggtctcgaaggagatgcatgagctgctgtaggagaggaaaatggtgcagaattgtttacagcagggaggttaaaccaggcatgaggagtagacatagtgacaaactgttcaggttgatggttattaagaaaccctttggcaaaaggaaattcatcctcattaaatatgacatgtcgagtaatgtaaatccttccatgaggacttaaacatttataacccttatgaacatcactataccccgaattgacacagttaattaaatggaatgcaaacttatgactttgatatggtctaatgcatggaaagcaagatgcaccaaatactttaagaaatttatagtcaggaacttttgagtaaagaacttcaaaaggtgactttcctttaagtataggtgttggtaagtgattaatgagatacacagctagggttaggaatattttgttatatagttatgccatttggcctcatgaatgcaggggcaacctaccaaagagcaatgaccacaatttttgaagacatgatgcacaatactgtcgaatgttacgtcgatgatttagtggtcaaaacaaaagaaaggataaattatcttgatgatttaaaacgagtctttgataggctcaggcaacacaatctcaagatgaatcctttaaaatgtgcatttggggtaaaatcgggaaagttcctcgggtttatcgtcagacatcgaggaattgaaattgacctataaaaatcaaatgaatcccccacgtaacttacgtcaactacatggtctacaggaaacacttgcgtatatccgaagattcatctcaaacctctctgatagatgtcaacccttttcgcggttgatgcaaaaaaatgtcccatttatttgggatgaggcatgccaaaacgcttttgaaaacattaagaagtacttgttgcacccactagtgttgagagctccgaccttatgaaagccattgatattatatatcccttcactcgaccgctccttgggagtcatgctggcacaaaacaatgaggagggaaaagaagttgctctttactatctaagtagaactttagtatgggcaaaacaaaactaccctccaatcgagaaagtgtgtctagctttaatttttaccgtcacaaaactacgacattatatttgctctcacaccctgtgactttagtgtcaaaagctgaccctctaagatatatcctatccaagc

SEQ ID NO: 112109 - DNA, 8962 bp, Cannabis sativa
  modified_base (27)..(56): a, c, t, g, unknown or other
  modified_base (98)..(102): a, c, t, g, unknown or other
  modified_base (8896)..(8907): a, c, t, g, unknown or other
aacagttcagggtcctatttgtacaannnnnnnnnnnnnnnnnnnnnnnnnnnnnnttaataaaacagaaggtccaatttgtaacttttgcaaaacannnnntccaaaatagtatttacccttttctatatcaatgttggtatgtattgattaaaaaaaaaaatgcatccaataaccaattgtgttgggaatgtggctgattatctctaaatgccacccacatcaaatgcagaaagcataccaagaacacattactttcattttaaagagaaggcactgttggaataagaaatattaatgcatatcctgttaccgaattaactgcaatttcatggtaggaaatagagaaatgtgccacatgtaaaaggtaaagaagagaagattcagatatacctaaggatgctcccatcgaagctcaagacttcggttcggcaacgatgtcggttagccagttttaatctttggtgttcactcaaagctcccgaaatgggagatgaaggatccacaagtggattccaccttccactggcataattcatgagatgtcgagatggctccttcgatttctctttctgataaagaagttttgccgcaggacctgttgcttgatactctgcacaaacatcccgtaatctttttcttaggccttgcattgcatcgtgatgctcatgtagtgaatctgcttgaagtaattgggatgaaacaactcttttgcatatattgttgcataactttggactgaaaagtggaacaccaaactccacactcagtgggacccattcatacttctcttcatcaggtgaaaattgttccgactctttttccttgaaaagttttaagagtcgaatataacccactgtccacaactccatattgttagccaaatcagccaacaaggagttcaaccttttactttcctcttcactcagtcccatatccccttctatacgagcagttgaaccatcagaattcttcagaggcagtggaatatccagcgtaacgactcgcccagattcatcaaggtcgtacttactgaggggctgcactagcacagctgagtgtttcagaagtgaatttaaacagtgtaagagtatacctcccttgactaaatttccttcaaacttgccccccaagcctcctactgtagaaccatcccaagaccatacaagagccttctcgcaaccagccagtggcgcaggaagtaagcgtaggcattgccctttcatcagaacaacagatagaggtccgcaagccacagttgtgtacaacactaacttcatccaaggtgtcatagatgagtgagagggaggaccaaaatgaacaggaaatgttggtccagggagaattgatgaatgcggaagaggaataatagacacaacaatatcgtagtcacgaagaaacaaccgttctaaagttgcaggtgcaagagatgccaagctttcacagcgaagtatatctacacgatatttctttatcttccttgacatttcttttccaacatctgattcttcaactggaatcactctctcatcatccagaagatttatggattcagtgacttcaattaagctattatctgttactgattcagtaacagattcagtaaagtcagactccacctgtgacatctccttattaatggagccatcaccattaaacccatcttcacccacaccagtaggttctgatctgtcatttatggtaatatcagcaaccagagaagtagcctcctcattgcttaaagccattttatccatattgttgaaaatctcatctgctttcacataagttgcaagtccaccagactgcaggcattctaaaacacaacgaaggctagatgcatgatttgcgaattcctggagttctccctcaaatttagctccctctaatgtgctcagatcattacaaagatccgcaatgctagcatgaccaagttttcccgcttcatacagtgtcacagcatgagattttaagcctgaaagacaaattctttagtaacattcataacaagcaactgaaatttcaaaatagaaaaccatgaaattatattacctaacactggactctaaagggttgaaagagctaccaataaaaataaatatgatgcaaagatgtcacagactgaaaagataaagaatattcataaatgcaatcagtaacccatgtttctctgttttaaaaagatggagaggctactcacgatgtccacacatcataatttattcaaaagtatattcaactgcacagtgttcggcagtaatagaaatgagacaatgcagaaagaaagttttaagaatctgttacaccatattgcttaccccaaaaaaggaaagaaaaaaaaaacacgtgtcaactgaatcatcaacaaacagaatgcctcatttgtctgttaaattttagaagttaaagaggaaaacacaaacatttattctccacacataatgtttgaagatatagcttactaagctgcaaagagttccatgaattagtgtgcattcttttatataacaagccaaaggtatccatcaatgtatccaaatttaaggtgttcctccatcgttcacaacaaattcaactacaatcacgtgatcataatgtttaagggagaaggttctaagttctgaccacttagcagtattttaattcatccttgataacagtaatttatcttagaagtcagtaaaaaaataataataaactgaaagacaaacctggtgaaacagatcccatcataagatatgatgttatgttagcatcaacaatgaaagcaacacgagcatacattgaacctggcccaaacttttcagctcctgaagcatccccttccaaagtattatcaccatctatgaagatatttgatgagcctacactagcatgagaagcctcttcatcactaagaatggtcctgggagaaccaggtatacttgtttcttgaagaatagatgctggatcaatgactttcactgcccatcccaatcgacatgcaaaagatgcagccgcctgcagctgtgaaaggtcggcctgtaatgttgctgccagctccgcaacagttgcattctcacttgaaacaacaaaaactgcatacagtaacctttaagaaaacattgaaatatcatgactcagtttccttgccagtcaaatatataaagatggtatcaaacacatggatatgttgaaatactgccttactcctctataggatcttcataggattgctctctgttggaaacaaacccttcaagcctggaaactggaccaccctaaccgttagtaaatcaagcagaaaagtctactatgataactgatgaaaacagaatcaagtagaatgttttccggtttgcagcacataataggaaagcatagaagagtatttgttatcttgaattaattaaattatagaattatatctgcaataaaataaaagataaaacatccactggggcgtttgaggtatgaaaaagttaactgctactagttaactttaataaattcaagcaaaagttgcaactcaaaacaatagaagttcacacattttaactcataactgtcatttatagttttcaggaaaaagctccatgtgttttaacccaaaaaggtgacaagtatagagaacagatatagggtgccctaataaaaataatctggaatgtcaagagttcccctgaactcctagttggatgatgtggcagttcagcataaggacaaacaaaaatgtgcaagagcaactatattatatttcacctaaataatatagattgaaagaaagaccgaagacatacacatagcaaaaattaaagaaaaagttcaatatatgtgattggctgttagattccaaagccaacattggattaagtaataaataattggcatgattttgttattacatatgacttgcctttaaagcgatcatcggagtaaactggaacatcaaaatatattaatcccctccgaaaaagagctttgatgatgtcaggatcaaacagtataaatgaattggcttcttctttgcagactttatctatggtagccatttcttcttctgatagtttctacaggggcaggtaattatggtaatcgacatcaatcacacaaatcataacttggaagcatgtgggcacaaacacacaaaattgtgtaattggggaaaatgatgttatttcccttgagcactagaattcttaccttaaattcctccaatgtaaagttcacgagacaaactccccaccatggttcaattgcaaaatccacaggttgggtaggtaaaagttcttttgcaattgacttgttaagcttccacataattttctgcatagctccaaaacagatgttagaaaaaggaaaaaaccctcccccaggttgttgatgctgaactccctctccctctccctccccctctccctctctctctcaaagacatacaagatacagacttattaaaatgaaaatcagtaccttagatctgcacttattcattatatcaataaattcatttctccctatgcctgtaagccgcaatgcatctgcagcactaaaatttgggatgctatcataaggttgctctgcaaataacagaaaatacgtgatcatgataacctactttaagtaacaagcaactcttacatgcaaatttgagcaataaacgacatagtttaagcaacaatgtgcaatttagctaagttttaaaccttataaaacaaaaaattcagccttgtagagacttctgtacaagttccactaatttattattgtttctctcatccctttacatttaaccagaatacattcacctattgcagatacatctgagattcttaggtaatgttctatcatcccgtcatcttgcttgcaagcattaatagcaataaacactttccttcttttctgttttttctatttgaaccagaatacattgacatcttgctgatacatttcagatagctagttatatgattcaactatctgagattcttaaataatgttttatcatcccgtcgtcttgcaagagcacaagtcaatagcatcgcgtcatcttgcttgcaagcatcaatagcaataaacactttccttcttttctgttttttctttttgaaccagaataaattcacatcttgctgatacatttcacatcgctatttatatgattcaattatctgagattcttaaataatgtttttatctatcccatcgtcttgcaagagcacaaagcaatagcaataaaaactttcctctgttttttttgaatctataaatatgtaaatgttgctggaattgcattacaaacgtacataataatttacaacagctattgaaaagtttgttgacattcatgcacagaaatttaaacaacccaatgaaagcaaattagttcatcaagtgccagcataagtgtggtgccctggctcttaggtatcaacaattcaacatgctattttcaggaatatgctagaaaccatgcaagaataatactaattcaaaatcttagcatagttataaaaagaaagtgaagtattaccattcttcataacctcaaaaatcatatcgcagtagtatttgaaaggtgataccctcattacacggcaaacatattctgcaaggtgataaggaaatagctgcacataacaatttcaccaacaaattgcaaaatcatatatctgaagcaacatgaaaaataaatgtaattttgtacaactgatataattaaaccaaagtgataacatattgagtgatgaagagcagagataaatatatgaaactaaatcaaatatagtattgacaaatccgtgtgttgcactttattcaaaaacagatagagtacagaacagaacgcgtggattgttgatgcaatgtagcagcaatagaacttagtacacttccagaaattagacgcaccgctaaattctttcgcaagtagcgcatcaaatcttcatagtattcagtttctttgcatattttgcgagcaaaacaagtgttccattgaagtctttttttaatgcaatgttcaactatcctgcatgggcaagtgaaatcaaaactaaaataagtctctacagtcaacattgcaggttgaaatattaacaaaacaaatattgacagtaaagactgttcaattaccatgcacctatattactacatttcataactaaccagctatttttctatcatcatacacctacattagtctacatttcataactaattaatttatctaagaggatgataagaatgataaacatcccataagattcacgtctgtaaggaggaagtttagaaacaaacaagctaggaagctagttgaatgagcaggtatgttgttacaattctgtattaggatgttatgatcgtataaatgaggtcaattctaaggagacaagttagagaacaatttgctttttcttaggagagctcgcctctcgaattaactcattgtatctattaaggcttcggtgcttggccaaacctgaagttgaataatacaggggcatttcagtatacttatgtgtaaattgtttagatatgataatcagaatcctatcaagtggtattagagacagtgttgggccatggtagcgaaaaagatggatgcaagagtagaagttcttgaatgtgatctcaaggaaattagatccaagattatagcgatggttggcgatgaagcagaaactacactcgacgtcaaaagcaatagagaaacagacagtcattggcaacaactgagtgtagtgatgccctttaggttgacaatatgctccagctacatttcagtatctaataatgataatttcaaaaaaaaaatgaaaattttagtacaattttgcttcaatgatatattggtgtatggtagagctgaagaatcaatcgtttaaagcaggcttttaaggtgttcaacaagaatcagcttttactacaacaagaagaaatttgagtttgttcaatctcaattgcaatatttagactatatcgtattaggaaaaggtgtgacagcagatgagactaagattgaagcaacaacggtggccaagtccgaagggcttgacgtgttattataggaggtatgttgttgagtatgaataaatagattggcccttaacctaacacctgtgtaaggatagctttgcttgatcaagtgaagcagtgaaagctttacacatgctcaagaagcgatgatctaggtgccaattctgacattaccagatttttctcatccaattgtggtggaaatggatggatgggctcaaggttgggagcaatgtccatgcaaaaccagcaactaaaatcatagtttagcaagtgttttcttttcacatttatacagacactaaaatcacacactcatgaatacttttaatgactttttaatatcaaaacaattaaatgaaattcttctatgaaccctcaatttaattgttaactccacaaatgtagggcattcatcgtatccaataagttaataaagtaacagcggcctcagggcattcaatcttgaaacaaattagtaaaacagtgagtactttctcatagaaacaatttttttaaaaacagtcacggtattactcaaagcaaaactcaaaaacaagaagaaaaataagtagcctaaccttctgtgccattcttccttggaagacaaggtggcttgaagccgtttgggtaagctctcccatggacattcctctttgattgctttcaatatcaactgttcctcgatagttgctgggactcgctgcatcttttacacaatcacctgatctgctctctccatataaatcaatggtttcatagacacaggcagataacagttgacaccaaattgaaaccaaatttacccaaattagccaaaattgaaacacaatcgataaccaaatcaaaatatattacctatataataaatgctagttcacaactcctctaaacatgttattagttggtagctattcaatgaagtgttgtccactttagttcaaaaaaattctaaacaggtttttgcttctcctattaaaatttaaaataccaatcaacagcacagccttgttcgaggtataacttatttcactatgagtagttaaaataattacaattcaaattgcctaaaaacaccataaattatattttatttggagagaagtttctaaacacttcatcaacatcaaacttaaactgaaaataaaatatatgtagaaacaaataactatacgaatgggattcacatgaaagaaacaaaaaaaaagtacatataaaataaagagaatcacttgagaaaactcaaacaaccagaaaaagtgcagtacctgaggtgagtgaaaacggaattcctccggtccgatctccgatcagtgagagaagttagtgagagagccgaagaaagccacaaaagggccgatagaagaaaggagagagagccaagaacagaagttgtgctctgacttttagaaggatgaaatggaaagctggacaggggttttctcatattgggctaactctctcaaacaatacacaacataccccactcttttattaaaattaccattttctttataattgttattttttaaaattattacaattacttcatataattttttttaaaaaaaaaaaacaataataaatacaagaattaccagtatatcttaatttactatgctcttttctaagctttgaacacaatcaattaatgtttgtattaatctattaaaacttaaaacaccataattacaattcaaattgcctaaaaacaccataaataaacatggcattttttctttcctaattttgttctttatttagtccaatgtttgtattaatctattaataatagaggtgttgtttggttcactgtaatagtaattgtaatagtaatgaataggtttattggaagaggttttaatggttacatttttattgnnnnnnnnnnnnttacatttttttaagccattggattattatttaatggttgtgattaatttggaaa

SEQ ID NO: 112110 - DNA, 2600 bp, Cannabis sativa
  modified_base (2514)..(2546): a, c, t, g, unknown or other
ataatcctagacagatgaggttagctggattagttatccagacttctaacatgcacaaacattgaatttgacaaattagcctgtctaatccaattcagtcctacgtacaaaacggatcctatatataaatatatataaaaatttgaactatatattaattaatgattaatttaaaaaagaaaaaagaaaaatgtgtcttttggttcaaagttgaggccaaattagaactagtagatgttttttaataataaaaatttcccatcaaccgaaaaagacattccaacttggattaatgttttaactaattggaatccctgtatataaacaaaatatttattaaatagtaaattggaagagacttgtagaaccttaattagagtaaagctaaaagagagaaagtaagaactaaaaaagagagaaatagagtaaagaaaatgttcgagaaagcttatttctcatgaattaagagaacttttatttttaagcacgcacaattacaaatggagaattagagttcaagatagctcaacgataactaaaaataactgaaagttacaaacattctaactaactctaacaacttgaaacaactaataaacttatttctatattagcttacatcccccacaaatgaaaagtgattgaagctatttgatgtttgcctttgagatatagaaaatagtctgttgaaagggatttagttagaacatcaaccacttgatcaattgaaggagcaaatttaacagagttttgtccaaaatttgatctctcacaaagtgaagatctatttcaagtgcttggaacgggcatggaagactggattcgcagctagtacaactgcaatttgattgccaacccaaatgataggtgcttttggaagagaaacatggagtccatttagtaaatacaccaaccatttaagttcagcatctaaatttgcttgtaatagaccttactaccacttgttgcttttcggcagaccaaaatatgagatttccaccaagaaaaacaacataaccactagtaaatctcctgtcatctacacaactggcccaatttacatcataataagcatataattgtaaagtattagctggtttgagcaaaagcaaaccaaaagaccatctgaaagtgtgcccttaagatatagaagcagcctcttacaagcttcccaatgaacctctattggagcatgaataaattgacttagtttgttgataatgaaagcaacatccattctagtaattgtcaaataataaagagaacctaaagtgcatatgtgtagagtagtgtcctaaaatggagctccttcagttaaggacagtttttgagcagagctggtggggtttggacaaattttggcacccccaaaatgtaacttgacaattagattaactatttatttactttgagacaagtacatcccattggaatctgtatatatctcaacaccaagaaagtaatgcacaggtctgaggtccttcaaagaaaaataattattcaaatatttaataagcttggagataagttgggagttaggatcatttattagtatatcatcaactagaaaaaaatagagaagtatctgatctagagattgtgaaaccctaatcaattaaagtctatttgagcttctcattccaatctctttgtgctttcttaagcccatatagagctttataaagatgacacacgtgtgggattcttaggatcaacaaagccttgaggtttatgcatatagacaatttttttgaagttggccgttcagaaaagcattactaacatccagttatttgacctgccagttaaaggtatcaacaagggagagaactgtgtgaactgttgtaggcttcactacaggactaaatgcttcagcataatcaaatccagatgtttgtagatagccctttgcaactagcctcaatttatatttatctgaggtaccatcaacatttaacttgattatgtacacccatttgttgttaataacagccatatacacatgtaatcaatgataacagcgggaaccgtattaattgtaaaactacactttggaatgtcagtcaccaatatgaaagatccaatcctgattgagcaaggacaatgagaccaattttctgtgatgtgtctatgctttcattctactcttccattttgttcatgatcataagaccatggatgagtaaatttaattccttaatcctttaaaaatctaacaaaagacctatattccctcaccttagtaagcttggactccttttacaggtagattgaattatttttcaaccatatttttgtatttaatgaacgcatcaaaggtctgagatttaagagtgagaggaaatatccaagtatatcgactgtaatcatccatgaaatgcacataatacttgaatccttcttgagataaaacataagagggaccccaaaaatccgtatgaattaattcaaggggtcgggaagcacaatttgtggatgaggaatgtggttgtttgtgttggaattattttaccnnnnnnnnnnnnnnnnnnnnnnnnnnnnnnnnnaacatcctaaatatgaactttataaaacgattataaacacatataaagttaaga

SEQ ID NO: 112111 - DNA, 7031 bp, Cannabis sativa
atttctatacgatttttttattgcgatttaagttgtagtgctagttgtaataggagtttttatatagaattccgtaaaaatgtaaaaaaaaaaatgttttgaagtgtaaaaataaaaaaactctcattaaattcacttgtttaggttatgttgatagtcaaatgttttgaatatgttctgtttaaaatgtgtagtgataatattggtagccataatttactatcaccgttgaaagtttgaagagtatatttatatccccatgatataaattacacagggcctcatctgcgcaaaatatttgctcaactacacaagctgcccaattcacactctattgtgcaatgtagtgacattaattttggactgattttaatgctactgtagcggtgcagtacactttgtagtagcgttacaattcgtgacacgatatgatgatatgacgacataattcaaaaatgacacgaataaataaatttagatgacatttaatgttcgtgtcataattgtgttcacgtttaacataattattaacgtgtcatttttgggtcaaacatacttaacccctaaatatcatgattataacatataagaaaataaaattgtctttaatttttatattatgtgaaataagtgtatctatgttatattaaatgtggttatataacaaaaaaatattttctttttaaacattataatttaaatttaaactcactacatatctctctcttaacttttaattatattaaatgtagctatataatgtaaaatattttttttttcaatattgcaattcaaatttaaactcataaaacatatctaaaaaaatatatttctattataatttttttttaccaaatccacatatctaattttttttcttctattattattttctttttaaacaataaaataaaataaatatttatatttcttaaataatttttattgtgacgccgttacttattgcagttaccaaaaaaatatctttatatattattttttattttaaaaaaatagaaatctatattatattaaatgtggctatataatagaaaaaaatgttatttttttttaacattacaatttaaatttaaactcattttatatatctctctcatcttttaatcatattaaatgtggctatataacataaaatatttttctaatattgcaattcaaatttaaacccattataatatctaaaaaaaatatttctattataatttttttacctaatccacatatctaaaaaaaatgtctttctatattattttccttttaaacaataaaatagtaaaaatatttatattaaagaataactattgtgacgccattattgcagttgtcataaaaatatctttatattatttttttattaaaaaaagtagaaaaagtgtataatatttctaaaaaaaaatgaatagtattataaaattagaaatattactcttaaattagaattataattaatttttttttaatattattatattttattttttcagatagcacttaaattaaacattatataataaaaaagttatattgtttattgaataacatcaaaaaaaaaaaaaattaattacacaactaaaaatatacagttaacttagattttcgttaacaataaatgaagtcttataaataaaaattaactatttataattaataaatatatatcaaacactaagagtttttacgtgattttgtagttaaaatctacatactccacgagtcattattatttatgagtatttcttgagaaagtacttgaattataggagaataactacgaatattcactcaatcttataggatatttccttcacaaaatgatcgattcctttccccttaggttttgtccctatttatagggttttaactatgatagttactctttttcgatcttatctagataactgttcatgaaacgtggtcaatttccacgtttcatgtttacaatatatggataaaatgaaaactgctgataaccgtcttttgatctaatttggaagtagtcttttgttgtcaaggtaacttattctatccatggctcgcattttttcatcgatgctcaggaatagttagtcgcattttgtgagacactgattaagattattttcctcactgtttcctttttcggtaattactgaccagtcctttaagaactccgagagtggttgcttctgacttattttccttaatctttcaacatactcacgagtatgtgggtcgatgagttgcaagctcttaaaggactcattatctaccctttccaatgatacagttttggtctgttatactcgaaatgacttctatctttatcatctcaccatacgttgtttatctcgctatctgtttgccaatgcataatgcgagacaagtattgctctttatttattatccctccaagacaattcatttattacacaatgagtttttcataatttttgtgtctaattatccacgtgtcatgtccatattcatggctcaaaatatgggcataacaattgcccctaaaaaattctttctaaaaataaaagggtttttttgcagaagctacaaatggacattttgatcttttctctttcaacaatgagtactttctttggcggtttcatcttcttgagaaagtgtattccatcataaaattgtgcatcttttcaactgatgggcttttcaactatcctttcattttatcaagattgaaccccagccgcttgatctaaatttgaaacctgatcaatggttcttcatctttcaatataaaaaaagtttttaccattgccttcttcctttcttcactcgaaacacaaaactagagagaaaaaacctattttattcaaaaggttcttacatgctcggtttttctttgacctattttcttcgtgtaattaatgttattttttctcaaccaagctcccgttatatcccctacccatggtaccagcgatttcctgtgagaaactatcaacgctatcatagaaactcagaagctggtaagccttcgttttccattcttttttatttttattttctattatttcttttaaatgttctcgttctgaagtaattaggtagtttaaattttagaaactcccttccccggacttaactattttcagagttttttgaatgaaaaaacccaaaacaatttaagatcacgacctgaacattcgaaaacaattttagaaattaatgatgagaaagttaagttgtttaacaaaaaacttgatcgagaggatacttctattcactctagacatttcattgatgaaattattgatggaaaatgacatttcctgcgagatgtggcttggtcagaacccctttgtttaactgtgtatccggtagcgagcccattatttttatccaaagttactgttactttttcctcaagtcaattaaattttgagatcatgtcttcaaaggaacgtaagtctaagttaccccaaaacccaactgttctattcgaagctcaactgattgagtctagggctaggtcacttgcttcctacatggatacttttttaaagtcccgcggtattaagagcgagaaggggtgtcagagtcattcggttgaaccaagcgagttcaggtgcttttcaccaactcgtttaatggaggaacaagaggattgttgtagctcaagtggttcttcatcgataggcacttagagtgtcgaacatattagagctagggccatccttcccttaaatcagtatttcaaggattgttataattatcttggagttgcgccttcttagctcatcccaaacacatataggattggcctgtttgaagatgctataccacatcctgggatgggaatgcctgacatcgttagagatttatgtttttatagtttaaaagcatgcccctcgagaaagaactgctcggcaggcttttattacttaggcacccactctaacaacaacaagattattgtttggcttcctaacaaaaaggagcttaagaatgatttttttggacgactggccttcatccaataaacacaactaccttcaagattatacgtaagtgtttatcatctcaaatttttggtctcggtcttgaatatatgttcgagtttgcattgacttttcctcctttgatattctttcagctctttcaaaaagaccgatcctactcctaccatccaaaggtgccttgaaattcttgtgaaatcgccatatggtttgtgtgcggcagattttcttcttcatgaaaaaaatttaaaaatttgtggccttctcgggactaaccagtacatcatggatcccaagtatctaacttgacaacgaattctagtgcccaaggacaaagaagatcacggttttgttgctcgcacccattatttgaacacccttgctattcgagaagtcagcgagaccacatataaggctccccgaggtaaaacttcttatttttatggatggtctcctatcatccttaggactaagccaacgtatctagtttagtgttgcatagaatttctcctaaaacacgtagcagatcaggagcaagccaggtggcaatgggacccacgttacaaggcacacccccttaatcactcctgaagtctattagttcaaaggagatgatagattagtcattcctgggagggtccagctggacaacgagtatctcttgtcttttcctcttcatgagtgaagtcttctcagagaagggtacgagaggactgatgaagtataacacgttgttcgaggatcaaaatgatgtatacgcatttaatgcgacatggagaagaacatttgacaccttacgatgacagacgtgtttaaggatttacacccatcactccttgatttcacgagatcccatacatcaatcgatgactgcataaatgagtcgtcaagtcataaataaaggataagataaatgagtcgtcaagtcataaataaagaataagaaaaatcccacccaataccgatacacagtccaaaattcatcataataataggcaattatgccctaaaaatctgattttaaaaattgtgcaaagtatagtgcaaacaaacacgacaattgtgacattttatcaccattatgagcctataaatacccaaaatgatgtaaagtaagggggatgggtcgaaaaaactctctgtaataactactctcataaataaagtgactcgtggactaatgctcattaatgccccaaccacgtaaaaattttcacttgtaacattcattaattacgtcatacaactctaattattagttggaaaaataatctcggtgaatattttagtgctttcattgagagctgtaggaagcttaccaaaagaggaagtcataaataacctcgtggcataatgttaaagacaagaaacacttcatgtccagaacaactagatgacccaaaggatctagatgaagaacaggtggcttcttgggtggatgctgaaggagaaggagacactaatgatccaatatattcaaactaagaagaatatgaaaactacgatgaatacaactatacagaattagttgatgccgaagaatatgcaaaataagtgccccattgcttattttagccaggctttgtcttctcgatctcacgccaagtttgtgtatgaatgagaattgatggctattgtgcttgctattcaaaaatggcgcccgtatcttttagggcaccgattcatagtctgaacggattagcgtagccttaaatatttttttggagcaaagattaatggtggatgagcataaaaaatggttaaccaaactgttgggttatgactttgagattcaatatcttttgagctggagaacaaggcagttgatgccctctctctcttgggttcaacttgattctttggctgctttatctatgcctcatgtgatttcaattccggacttgcaatcataagtgcaagcggatctgatgttgtccaaggttttaagtgagctgacaaagggacaggatgggggcagctataccttggttcattttcgaggccagttggtattgtcatctaagccgcctttcattctgcttcttttacaagagtaccatagcagctcggttgggagacattccggagtgttcaaaaccttccaatgggtgggtgccgatctgtattggccaggtatgaggaaggatattcaaaagtatattgttgaatgtgtgttttgccagcaaaataagtatgtggctcagtctcctgctagtttattaaatcctctacccattccagaacaagtttgggaagatatttctatggacttcatggaagggctacctatatcccacgaatttgattcaattatggtggttgtggaccgcttaactaagtatggccatttaattccctcgagacatccttattcacccactaccgtggctgaggtgttcgtgcctgaggtggtcaaacaccacgatttccctcactcaatcgtgtcagaccgtgacaaaatccttttgagcttgttttgaaaagagttgttccgtttgcaaggcactcacttgaagcatagtaccgcctatcatccctaatcggatggtcaaacagaagtggttaaccgttacttggaaatatatctccgctattttctaggggtgaagcctaccaagtgggttaagtggttggcatgggcgaaatattggtacaataatcctaccatgtttcagcgacaccattcaaagctaaatacaatcgagatcccccgccacttatttgctttgaaccagccaataccaaagtgttgaaaggggatcagcaactccaagctcgtgatgccattctagttttgctaaaagaaaacctccaacgcgtccaacaaaaaataaaatcaaaaggaaaacgtggcctatttagttttattgacttggtagtatatattatggcagattccatttgttgacttggccatatatatatatcattctttttaatatgccacttgatccacttttatctcaaaattgagagcaacgttcttcatgaacgttagtgctttatacatatatataagcacttaagagaacaataagagat

SEQ ID NO: 112112 - DNA, 2864 bp, Cannabis sativa
  modified_base (2823)..(2830): a, c, t, g, unknown or other
gtaaaataatttccaacacgaccaactgaggaacgaccggctgagagacaaccagcttagggacgaccatctgacagagggctagctaagggacgatcagctgatggatgactggctgatggagggccagctaagggatgatcgggtgatggagggcaacttgatgtacttgtcatttatcatatattcatatggtatttctccaactatatctcatgctcacaatgtgtcactagtctattagaactctttgaatagttcttgtagactaagtttggagagcttcatctttacaacttaatttttcttttcttttcctttttgttacccttcacgaggagtgtaggctttatgagttatcttgacccatttcgaggtcagtactcacaacaatgagggagtgttagttcattgagctttctcaagctccccttttagttttcatcattttgctgagagggagccctttgccacctggcctttctcgacctcttcacttgtgtaacatttccattgagggagtaccaactcatagagtagtcttaacctcctctcaattacttatcttatttgagggagctttttgacactttggttccttttttttgtaacctcttttatggtgtaaccactttgttgagtgagtattagctctgagagcattcttgtcctcttaatggttactctttggatataagggagcttgtggccccttaggttgcgccgacctttttctagatttaaattgtattgggggagaatgtggccacttagggtacactctgccccttacattgtatctgtggcacttaaaacccaatttatttgttagagaacccatacttcttttagtgagtcatccctctcagagtcgtattcgattcctttttcattttaatattttaagggagatgatggttctgtgaactggctcaacctttagctttcaatttttatatatttttaaagaggatgatggttctgtgaactgactcaactttttgttttcaattttaaggaagatgatggttttgtgaactcactcaaccttttttttttcaagttttacggaagatgatggttctgtgaaccgactcgacctcttgctaatttttgtctgtttctctgcgcatgctttaggactaattttaaggagcatcccgctcgttattatgagtgctctttcttgtggaactatcttttagctttaacttttttcttggactgttaggggggtcaatttctgtattcctaagagttaacttgtcattgccaagaacaatatcttagatggtggaacttcattttgaggagcatctttgatgtttgatttttacgggccgtaggttggaggattcaattgaatgtgttgacttatgagcgtcgagtgtagcatctaatagaccctttatagatctggtgagcttcctgaagaacattcactggtgtcttctcttaagactctatttctttcctctacaaggatgtatttctctactctttcgtaaaagtcatctaagccatccaactctcttttcaacatattcttccacaatccactcctagagtgtaccccagcagctatggtgaactcgagtttatctttaaatatttttcctactttagtaacttcagtgttaaagtgctggatgtagcttcagaaactttcttgtcccccctatttcacattggttacacttgtgatatgcataatgttattgcatgtagcctaatgatgttagaagaatttgtctgaaatttatagccaagaggtaatagacccatgtgccaactatttgaaccacttatatgctgcacctctttgtgtcacaacaaagcactagcaccttgctttgctcgtgaccctcttcatcttcattattttgttaaaagcatccaggtggtactttaggtcagttatgcctttttaaggaaacaggttgggttcttcaaagtttatgggtagaggttgcacttgaatctgccttgagaatggggattcttcatcgaagtcgtcctcatcccagttacaatctttagatgcaactgatgctatcctttgtcaaagatcctttatctcctcatctgactccttcctcattttagttagcttctcccgtagggttcgtgttggttggctttgtttttgttttgttttgttttaaagtgaatctactaagagtgtccgcttctcggccgttgtcttcttgcagagcttttttctcaagttaccttggacaattttggactcgatattttaggatcgtgatgagggctccaaattttttctggttgaagctttttgcagggaggatttaggggtgttatttgtcgagtactttgatgctcccccaactcccagcccacttgctccgctttttcctacttctggtcctctttgccttattattggtgcctcagaacaacctctcaagagctcctctaatgccctatgcatgtatgtcaccgtttcttctagctgcacattgcttatccttagctcattcatctcattgtgtagctgagtctgagagctgtaactcaccgagtagacttgcatttccttccccgatcagtggtgtgagattttctcccaatctcagtggttgtggtggccttatcgaagatgggttcctcgacctttgcaccacacctccttcctctagggtgatgtaggcagtcgctccatcttgttggttgtttgctggattgtcctcaggtcgcctattctcttctttcgccgagggtacatgtgttgggtttgatgccctaaataaaaatccatttcaatgtaatctctattatttaaatatcaataaagannnnnnnntattttcatcacttatttgtgtgtcatttggttc

SEQ ID NO: 112113 - DNA, 4393 bp, Cannabis sativa
  modified_base (4349)..(4352): a, c, t, g, unknown or other
aaaacaccttttcttgtagtgagttttatttgtgaaaaagaaggatggatcccttcagatgtgtattgactatttagaattgaataagctggcgattaataacaaatatctttagtccaaaattaatgacttattcgatcaacttgaagggaaaacaattttctctaagattgatctttgcttaggttatcatcagttaaaaatccaagaggaagatagtttgaacactacgttttagattggatatggtcattatgaattcttggtgatgtcgtttgggtgttcaagcttttccttgataactacgtaatagtgtttatcgatgacatcctcatatactctcaattagaagcacaacatgagcaattgttttagaacgacttagagatcacaagctctatgttaaactaaagaagtgtgagttttagttatcacaagtttctttcttaggccatattattggaaaagatggaatcatgcttgatctagaaaaagttgaatcagttaagaactagctgagaccaaagatagtttctgaagttagaagttttcttggattggtcaggtattatcgacgttttgtggaagagttttccaagatctctatgccattgacaaaattgaccaagaagaaatcaacaatttgtgtagtctgataagtgtgagacaagtttttaggagttaaaacagcgactgattttggcaccagtgttagctttgccatcaaactaggagaaattttggtgtattgtggtccatccagacacggtatggggtgcattctaatgcaagttgatagggttattgcttatgcttctcgtcaattgaaggagtctgagaaatgttgcccaagtcacaatttacaacttgatgttgttgtttttgccttgaagatttggcagaattatttgtgtggacagaaatgagaaatctataccgaccacaagagtctcaagtacttctttacccagaaagatttgaatatgggacaaaaacggtggttagatttagttaaggattatgattgtgagattttatgtgattccgggaaagcaacatggtgctagatgctttgagtagatgagatctcatgcaggtttttagtaccaaaatgatttcttcgtaactagcagcaaacatgatcaaggcagactttgagtttatagttgacaaacttcataatctaacacttcagtctaatttactagaaacaatcagaggttgatagttggaagacactgagttaatcaagtttcgagaggaagtgttagctgattgggctaaggacttctcaatcttggatagtggaatgttactttataaggctcagatttatgttttgagcagtgatgaactcaagaaagaaatattgaatgaagctcatattactccttattcgctacatccaggtaccaccaaaatgtaccaagatttgaaatgctactattggtggtgtggaatgaagataaatgtggttgattttgtgtccaagtgcttaacttgtcaacagatcaagttgaacaccagaaactagtagggttattataacctttaacacttcttgaattgaaataagaggatgtcacaatggactttgtagttagtttatctagaaccgtatacatatattatgggattagtaaggcaattagcattaattaattatattataagattatatgttattagtttataatgtggggcctattttttaagggattagagttataatttttcaactatggagattttattaaactctaagtgttttatatgtgatatatgtggaaattattatttttgtaatttttgctcggtaacaatgaaaatacgacagtttggccattagagtcacattagttttgattaaaaccttttagttagcgagaaaaatatatttgatatttagaatatcgatattaggcggggttgtgatatttgaccatttcacccctaagccttaagataatatacttaaagtggtaattttgtcttatgctaggttttgccctctagcaagattagtagtaaatcctaggagtttctagttgagtaattatattaagaaaataagataatactaagcttctattcattttcatcaattaagaaaaaagtcaaagtttatcctttgctctgtcttccctatttggccctaagagaaccaaaagaaccaggattttttattcttcatttctcgtagaattcatcagagtttggaggggaaactgatagcaaaacttgaggtaagtcctagaatcctttttctttgattttagaaagttttaaattggtttgagcatgcaatctgtgaaactaggttccgtccaaaccctagaagtttatgggttactttttgaggttagatagagttgttgatgctttttgggaaggttttgttggctattttaaggtgtggagcaagtttgagtttaagaactcaaacttggctcaacaatggtggttttcatattactgagttatttttgcttttgttgcttgatttatgtttgttggactcaaattagttattctggagagtttcacaaagtttgggttagtttggagttgaaatgagaagtttggaaattttgcagcagaaaacaacagaccgttttctcggaaattatctaccgtttttgctggcagtgacccaacaaaatggtctgtcttttttatagaaatgttctctgaagtctcgtttttggtgttttctcaatatttagggttttttcacgctatttatcgataggaaaacttctaattttaaatttaagtccccgaaagtatttagagtaacacttacctattttacataaatgtgacatagggcttccgttcagcaagcgacatctctattctggttgaccaacacacttgaatctagaagcaaggtaagattcgtatatgatatatatatgtatatgtgtatgtatgtattatacatgttgaattctatgatttgtatactaagaataatagtacagttagagtacggagtgtattggtacagtataatattaaggggtatgccacagagttaccaacactagtacgcgaagagtatggagtgtatgtggtacaatgctcagttgtactggaggtacggattaattctaccaactctagtatggtacaagtacttattgcatgtggtatagaggtcgtaattttgttataaacattcttgattcacctactaagccttgttggtagttctatgggcgtctatttgtaagtcggtaatatgttatatgttttatgcttttcttactgagttcgttgactcacaaatctggtttcatatgtaggttaaggaaaggcaaagattgagcaccagtgagtccatagcttgaagatgatagtacatatcgggatggttaaagttggagtgttcggtttttgaatgacatgggctcatatttataatcgctgggcgacacttttgtgaaaaaagtattttgtatattgttttaaactttcaatgggatttcagaaactatgttaaaatattgatttaataaagtttgaatttaatcaaaaaaaattaatttatcacgattctcgagaaaacttttgattagcaaatgtatgcccaataattagaaaatcattatagcatgtctaagcaagtaggcgttacaaaaagaggacctaccacaccttctgcttctggctcacaaactgctactatggaacagtattaggccttacaacgacaggtgcatgaggcataataggaaactcagtatttgtagaagcaatatgaaacacaacaactctacttgaaccgattccaagatcaggttaagtatctcactcaggttgttcttggtttcaacttacctactatggtttcacttccaccattccccactcttgatggtgctggattgttatcacgcatcttgagactcaaaataatgaggacgatgacattactgtctgtagaatcatatatattttataatttactttaaaacttgactttctcttacccaaatatctttaatattttactatagtaatttttttgaattgctaactttagaacttgaacatctttttatagtagtttgatcaatatattatttaatcatatatgtgaatatcgcttttatttaagtatatttttttaaaatataatttattatttaaaattaattataatatttattatagattatccagatatttaaaataaaataaaaaaacactttttccacgcaatgaaatttggagggtaacatttttacgaacgaaaatttacgccaatataactattaaccaccatattatattacacaggtttaaattatgtcggtgcatatttgtaacaccctaactannnnaggcgtattacgtgatttttgaacgtactgtgcagctcgtt

SEQ ID NO: 112114 - DNA, 7144 bp, Cannabis sativa
  modified_base (5785)..(5789): a, c, t, g, unknown or other
gttggatcaaattaactacccatcaaacggttacagtacatcacggattgaaatccgtgtccgtacagtaacgggacgaaatccggtccctataaatatatagtattagtctccaaatactgctactcatatttattctattatatcacctttaaaaagagttcgtacgaacttgaaagatctatatataccctactaatttctttctttttattttgtagatcttatcaatgtaatagtgggaatttgccactacaagaaaagacatttattgcgaagacaccaattgttacgacaaagtgatgatctcaaatacaagttattgatatgaaatttattccgagcacttagtattctttttttccaatttttgaaaccctgttattgtgatgattagtcattgcaatagatgctagctcattacagtagagttcgacgataaacctatgcctctaaaatatcttcctctatagcgacgacttatcgtcgcaatagtgactgaaatgtttacgagagaaaattcttgcctgatgaattttctgtgccaaaatttattaattaattctataagtttttttaaatgtaattgcaactagaggaaattgaaagagaaatataaaggttacaattacaacgagagaatgagagctaagctccccaaaccaactctttatctagtcgtaacgcatctctagctagattatagattggacagttgtcatttctagaaacatgtacagaaatacattaagaaaagttgataaagagttaataatctttgtaatgaaacgagagacagcgaaacgattcttccatttatgattgatcttcaagactaattgaagacagtttgtctttatatgagtgaggggcaatctaatagatgagcaccattgaagcgcatgaaggagagtgcttcagcaaacagaggagaggagcttccaaccttaggagcagagaaacctcctataatgtggttttcccaattcttaacaccagcaccaagacctgtacagtggctgcaaacattaagagcaacatcaatattcaattttaaggcaccaagatgaagttgaggaggagctggagaatttctagctaaagtattcctattagtttatacagttgcaatccttgttttgagtgtgctattgaattgaacagattgagcatccttgtattcctgcaaaaaagttttaacaagatcttctacatttgcacaagggttagttttcttactaaaaggaaggcattcctttgagaccatatcatccagttaatgccaaggaacaaaataaattcatccccactaaaagactcaaagctcctgagaagatattctttaatgtcacaatgtttatttgtagtgtaaaattagtaaaaggaagtttttttccacacagatttatctctggaatagcctaatagggcatgacacacaatctcatcttttcttctggagaaggaacaattaggattgtcaagaactcccctcctaaacaaattgagagcaaatggcatgacatgattaaaagccttccagatgaagtgctttattttaggagggattttattggtccaaactggcttcgactaaggctttaaatagtcatgcacaggagaggaaggagagcccaaaacagagacccagttagcaaggtgataaattgagttgacagtaaaattaccaaaggggtgatacccccaaatgaggcagtcctccctcaaaggatcaatgtgaatcgagagtacaccatctactttataggaagaaaggtaatgattaagtttactacggttctaacttccttcctcatcaataaaaaaggagacattattaatgataggagaatcataaggtaaagaaagagagtttaaacctagaatctacccagtatcaactagggctgaacatcgggtgggtttaccgagtttcgggttcgcgggtttcgggttcaaaaaaataaaatcgaacccggacccgaatagggcacgggttggcaggttggtgggttggagggtcacgggttggcgggtttcggttggccaggttgactgggttggcgggttgacccggtcaactctttaaaaaaaattaattttttattcaaataattatttcttttatcttatttatttattaaattaaacatatataatataacaatttgttcatcaaatctattattgaagaaaagaagcattaatcaatccaaccaacaaacaaataacttgttcatcaaatcaaacttcatcttcatgttcatgaatcatgataaaagtgaaaactaaaatatttcaaaatacatccatatccatagtccataaagttcataaaatccaaagtcgatattaatgtacataactaactgtatatcatccttctgagtttatttggatgtacataactaaatgtatatcattctgtgtctgtgagaacatcaaggtacttcactcatgcccttgtgtttgttttcgtaatgtttgaatgctaagatgtgaggaagaatccaaaatatttgtaggtactcatgcatgtagtaatgttgtcatggttttgttattatatcatatgttatatgcttttttgtggatatcaagacaaatacatgcaaaacagacttgtgaggctcgtatgcatttttttgcagagcctaatcagaaataatatcatcaatggtgagttttattttggtataataatactattggaaatgattagattggtaataattttgtttgtttatgatgtatggttacagttaaggatctgttcatcgaagttcaagcattttgtatcgagttctcgaggattagagaagcagcaacattgtttaggcttttcaagtcattggaatgaatgaacaaacaaattgaatgatttcatcatatgcttacttagcttctcatctaatttctcttatattacattttgtatataataataatgcattaattgaattgagaggtcattttttcagtgaaagatattgaaagaatagctatttgtttttgtggtgttcaatgagtgctgaaatgtaaaaatcttttagggtttttttttaaaaaattttttaattaataatttaatatatatatatatatgtatataaactgtaataaaaaataaaaatatatataatatatttaaattgcgggttggcgggttcaacccgaaacccggtacccctaaaaactcaacccgcgaacccgtccgaagggtaccaggttgaacccgacctgccttaacatttttttaaaaaaaaaatgcgggttcaccggttcgggttcgggcagcttgctcgaattcgggtcgaagccgctcaaaatattcagtcctagtatcaactaaggagatggatttcccacttcctactgtctaaaccaaacctttcaaaagaagttatctgccccaaggaatacttctccaagtcatagaggggaaatgtcccttaagagcattaagaaagtcattatacttgaaatacctagcttttaacaactaataaagaaaggatgtaggattagtccaaactctccatgcttggttagcaagaagagcttagttatggtatattatagatctgaacctcaatcccccataaaatttcaaagcacataagctaggccactttttccaatgaaatttcttaatgttattagaagaccctcaccaaaaatttgcaataagtctttgaagttgcttacaatactcatgggcagtttgaagcaagacatggtatacgaaggtacagcttggatcacagctttgataagagtttctttgctagctctggaaaaaaacttaacattccatacattcatcttagaagagactttcaactaggtaatagaataccgagttattaaccctaccagtccattgggaacccctaaatatttgctaataaatccttcattagatagccctagttggtcacaaaaagtctctttatcctctgggttagtattaggggagaacaagatcaaggatttggctaagttcacaaactaacataggtgctcaagatactactgatagcagagttaaagttcacactacctggacaaaacaagatgctcacatcaacaaacattagatgagaaataattgaggcatttctgcaaatagcaagaccagagaactctctagtggcctctttaattcgaatggtagaagaaatcccctcagccaccagaaggaacaaataaggggacacagggtccccttacctaatccctttagtagggctgaaactcaaaaatttcaaaaagacaaccattcaataggattttaaaagagatataggatatacaattaagcacaatggacacaaatctcaaggggaagccaatattcttgagaatggcttcgataaagctccattcaattctatcgaaagccttctctatgtcaagttttaaggctgcccaatccactttacctttctttatacagttaatggcattgacaatttcattggcaataaaaatattgtcaaagatgagtctatcagaaaggaaagcgctttggttgttagagataatagaatttaggacaagttttattctattggctaaaacttttagcaaaccactttgtaaatagtggagcaaagactgatgggtataaagtccctaactcgagaggtattctttttcttggggataagaacaataacaatattattaataagagagatattcaggttatcattcagaatggacaagacatcatcacaaaaatcagccccaagcgtggactagtttttttggtagaagaaggcattaagaccatctaggcctgcggccttgtcactataaagttgaaataaagcctctctaatgtcatccttagtgaaaaagctttcaagaagggaagcgcgatcattgactccagcaaggatattagagatagccatatggtcactgccttgagaggcaaataaagagttataaaagttaacaaaatgagagacaatagttgaagttctcctgaacacagtaccatcctcaagggtaatggacctaatgaaattgttttttctcctagctaaagtcttgtggtgaaaaaatttagtatttttattcccaactttaagccaatcagttcttgatctttgcttccaaaataattcatctttgcaaagaaaattgtcaagagaggcctgaagaactttggttgtctcaaggtcattgggcggaggatgagaggtaggtagatcggagagcgacgactttgggggaggaggaggacagtggctttgggcagctttgggcgttctgtaggagggaggtagagagatgggggaggaggagtgctgttcttttggactgatgagaagggaaaggaagagagagataagttgattagggtttttcaatttttgacataaaataaataggaagggttttttttgagtaaagtgaggaattattaggataaaattgtataaaataattaggaaggtattttttgtaataagttttttttaagaataataaatgaaatttttttaaaaaaattgctattagctaagactgtaaatagtaattttttttatataaataattaataatgtattattattatttattaattaaaatctttattattatttattaaattaaaatgtgtgattttatattaattatatgaataataaagtagtatttatttatagtattgatagaaagtagagaaagatagataaaaaattaacataggatggaaaatataaaataaggataaagtgtaggaaattttgttatatatatatatatnnnnnttttttttttttgaaaaataaagtctttattaatgaaggtccttcaacaataagaaccataagttagcaggaatataagaccccctaagagtaaattttgttatattggttggtaggaagaaagaataaagtgatgtaagaatagataagtatgtacttacaaaattatattatatatgtgacagtcatttttaaataatattttaaagggtacaatagatttactattttctccaatttatttttcttcattcaatctcattagtaattagtaattaccaaacgaatgaattgatcaactcctttcctcgttcttaccaaacatataccgatggaggcaaaagaaaaaaaaaattagaaagagagtaaaatggaaggagaatttagaaaggattaaagtataataattctctttctattgtttgatattatgaataaaatttaagaatagagagatttttttttttttttgaattaatagaatagagataaaattagttattaaaattatcataatattgtttttagcataaatatttgttcattttaaagggtaattttagtatacttattttatctttatctaaaatccttcaaaatggagagattagatattttgggatttagagattgaagtccctctaactctcctatccttctctttctcccttttactaaacaataaattttacctctctattctattctctctccctccacccctctctatcaatctatctctctttcttactaaatattaagagtcttcataaaataaataattcaattcaatctgcaaagtatggatattcacattgaatcggttaaaatatttaaaatttgcacttgtacaaattagatattgattaacatataaaagtaaccaatctaatttaatccacacatatttatatatgcaattaataatttaatttaaaaatctaatttatataatacaaatatattttaaaacttagtatatcaaatatattttattcttatttataagaaaaatacaatctaaaataaaattaaatatttctttatacatacaattattttcttcttcttttgaatttattattttttttattttaatttattgttggaaacataaaacaacaatcatttgttctttttttattagttttatataaaaaaaaaatacttttaatatatattaaataactcaatattaaattggatctttactttctctaaagtaaccgattcgatctctactttttcaaattggattggatttaagttattatgagaagggataattgcggcaaaagtccccaaaaacttgaggttgatgccgattagtcctcaacctcaaaaattggcggtga

SEQ ID NO: 112115 - DNA, 6765 bp, Cannabis sativa
agtcatcaatccttgaagcagccaaagtgacgtactcatgtataagaaccattattctatgggtgtaagggaccaatggaggcttgacgcggggacgttacaagtagcatgtatctccttgagcagtttccatgagtttaaaaaagatagtacaatagcttgtgtctcggatcccaccaagtgctaattatcttgataaaaactacttccatatccatcaggtccaggtgacttgatacctggaatgaaaaagatagcctctttaacttccttagttgtgtattcagcttgtaaaatatcgagatgtgattgtgagagcttgggtcaaacatccataattttgcattcacatgaagtcttccatccatatcagttcccaacaagctttgataatactgtaaaaaagcatcttgaacagtggttggatcatcacaccagattccataattattctctgtagaataaattctgttttgaactctcctagctcttaaagacgcgtggaagatcactgtgttttcatctccattcttggcccaagtaaccgtggctttttgagttaagaaggaggtgtatgctttgtgaatggccatgtaattctcccttacattctgttcttcaagcattaaaccagaattcaaaggatccttactaagattctcttgagtttctatcaaaacacttttggcttagattttttctttatgaatatcattgaagccttctttattgatgtctttaaacacatctttcaatctcttaagctttgtcaccattttaaacattggtgtgtcacaaactttttcttctcaactttgtttcactttttgatcaaagccatgagcacttttccacatgatgcagtacctaagtggctttttcccacaggccacattttggtgaaaagataccaatgatcaaacaaaccatcagataagaaagttgcttcagagtgctgaaaataacctgtccatttctcattgactaatgctctactaatgtttaagaataccttgtcttctggcttctgcttattattctaggtcaaaaatgatcctaaaaatttcaagtcttcaagataacatctctcaatacactctctaaaagatagagatggttgtttatttgagtgcttccccacccctttcattagaatttaagatatcatttaaatcacataggactatccaatttccacttgagtagagatatccttcaattcatgccacagctaacttcttttttttttcttcgttaaatccatacagaaaggtgatatagaactcaccttgttgatgtcttgactatgaaaaacagtgactgagttggctagtacacactctaatgtcaatagagtacatatttggttgccaagcaatcactattctccccttgtcaagccatggattgttattcgtaaagcaccaacccaaaaataaacttgtatgaactgcccccatatttttattcttcaccttagtttcaaggagactaaccacgccaaccttcttagaataaatcaatctctttatttaattaatcattatatttttattggttgttaattccccttacattccaacaaagaattttatatattaaaggttgagggatctccccctacctatgttaacttctctgtctctatcttctccttgctcatcatcaagagcatcaaacatattattcacttttatttctatgagtggctcatttgataccgcttttttccccttcaccacctgttgaaaaccttgctcatcaatggcaggttctttactaggcttcttctttggagcccatatgttcttctctagttctttcgatggctccttcttcctacacattttggtttcatggcccctattcctaagcaattatagcaaacaagaggcaaccattcatatttcacatctaattctatgccattatcatattcatcaataaatgagattttgtcagaaaagtcttgagccaaacttacctcaatgagaattcgagggtacagtaagttatatctcatcaacttgaagtggattgcctatcttctcaacaatcttgaataaagatttcccccccaaatatttgatatctaggcccttcaactgaaaccaagtagatacagttgtaatctctgtcttggtgaaatcgtctctcgaattccatggtttcatgaccattggttttcgatcaaagaatacatatcctccatgtaagactctatgtcttttctccatattctgaaattgaatgatgaagatccctcaagcaatcatacctactttattaaccaagtctttctatattctcctagtgaacctgtctagaatgttaagtggaggattatctacaactatgtggcatactatcgatggttgccaaaaattcacctcatcaataatattatcaaaatttaattttcactttagacttcggtgtggcattcgcagatctagctttgtcttcttccacaactgaatctccaaacctgctctccagatttcgaacaacattggatctcaagattggaggagtagtcttaatccctatgtttacagcttgtgaggctctattggagatgctgaaccaatcaaagaaatcttgacgaatttcacttcacctcctaaattcctcctctattttctcaggcgataagaccttctcaccccaattttgctctattttgacaacttctagaaccttcagctccttcacacccaaaatagcatccatggacctagttttgatgattcgatctgaagaagacggtcctatcttcttctgttttaccttaggtttcctacccacatttgtaccttttgtcgtagctccggtgagaacaccgaaagagaaaaagaagagagagaaaattcaacttaagaatttactaataaataaactgacatcatctccacgacaaccatttctcttttggataatttttatacattaataaactgaaatctagccttaactaccatctttacttgatgactaatggataaagatgatacacaggccgcttcaaagtgacactgatttttgttgcaccaaacaaggtgcaccacaactaccattatagccatagtaagtaaatcaatctagttttttaccatcttaaggtcccaatcgagtacttccaataagttttaggccattcatagctcttgaactacttagtgatctcaagcaatacattttttagtgaaaatacagctaaagaaaagatggggatgtgattcactctccaactcaaaaacgaggtagttagtagaatcaatatatctaagaattttccaagcaaatctcgaatcagcagatgatagtttatagcttgccaaagaatgaatctatgttttggcactattattctattccaaaccagcttgtaatacttaactctttggcaagctataaactatcatctgctgattcgagatttgcttggaaaattcttggatatattgaatttaccattgagcaagtcttcaacaaactcccaatcaatcatatcataagctttgcttatgtctactttcataagacacttggtggaaatgttcttcctaatataccctttaaggagatcttggaagatgaggatattgtgagtcagaaggctatttttgataaacactcctggttactgctaactcataatttcgttaacataaatgagactcttgataattaatgatctaaagtaattattctaaggaaattaataatatatttataacggcaacaaattacgtagttttgtagtaaaaatatacatactccgcgagtcactcttatttttgagtttgttgattacaagatacaacttagcataaatcctctcaatcgtgaaagaatttcaccctccccttttgtcactatttatagaaatttactccagttgctattttttctaatctatctatatgatgattcatgaaatatggatattttccacatttcttgttattaacatgccaaaattataatgataactatttaaatttaaataataccgaataactaccacttttgatcttatcttcgaacattattcaccaaactatctttttgtttgatatttatcctcctcacaaataacgtatatgaattggcatatactattaggatgattctcataattagagtgattcattgaacattctcaaaaggatatatcctaaatgaggttttgaataatttttgtttgatccttctaggcaaacttcttcaaattgtatctcttgttgtgtttctcatgatgatgaaaacattcaatcttgcaaccagcttagccttcctcttctcgctaaactttattttgtttgtccaatatttcccgagaagactatattatagatctttggcctcgattacacactacttaatgaccagcacatttgacttacctttatgacacaagaaaagactgtaaattttgggtcatatgagtattattcgacacacgttaaacaccacattatttctccttaatatacgagcctattgaattttgggtacttgtacatgtgttgtgaccatattcattgctcaaaatatgggtataataatttctccctaaaaagtgatttctgaaattgaaatgactatttaattatgacttgggggtaaactcataatatctcaggtgtattgaacacacttttatcttggtggttttatattaccgagaatttgtcacattagcatttaaacagcatcacctcaactgacccaaggtttgaacaccgttaagctaataatcattaagatctaatggtgtcccttgaagattttttaaacctcattcatttttttctttacttcattctttcttgaacaagaatttgtagagaagaaaaaatatcttccttcattctttcttattgcatgcccttattatcccttacctattttcttcgagaatcagcaaccattttttcccaacctcaaaatcgctacatacctgacccctggtatcaaaaattcccagtgagaaactctttcagactgccatttattcgaagacctagtaagttttcaatttttcctcctttaattatcatttttttttcatttttcttattttatacatctgggtgatttactgggtttaataaactggtaggcaaaatatttttagggttttttactgatctttttgaattttcaattccacaatctcttcccaaaatttcgagatattttcctgttaaaagacctcttcctgaatttgattgtgaaaccccagaatttttagaacacgaaatccattatttaccaattttttcctttaaaccaaaaaccaagaagtccaaaataaaacttgaggaaaatagtgaaaaaaaattagggcatacaatgacaagcttaagcgagctgatacgtcgactcgctatagacattttattaatgaaatcattgaaagaaaatgtagtttcttacgagatgcagctttgtttgaattaaacgatctgattaaatacccactggtgaggcccttatttttaccctctgttattgttcaattcgagtctaaattttttgaatcttctattacctctattgcatcagaccttttctaactatgtgtggcataaagcaaggaaatggctttgtatgctggtctgttgaaaaagaggagaaaagttgctttccccctaatcgttttaatagggaaatcgaatgtagtacgagcggttcccctcgcattactatgggagcttggagtattgaacatatctaagtcagtgaaattcttccacataaatatttttacaattacgttgagattgctcatttttaattaatcccgaatggttatagaattatggcctctctgcggtctctttaccatatgatgggatggtaaggtccctctcccttcaaaatcactttcttatatgcatcaaaagaaacctagggaggaagcactgcttgtgaggttttattatctcgggggatactctgatgatttcaaaatccttatcagacccccatcaaaaaaagagtttaaagaaaagtttttataaacgattggcttccaccctatcaaccatacttcctttcaaaaaatttgtaagttctagacaccttttggcttcgtgttattttcatatcccttgttccattcttttttgacatgccttatatttttttagcactactcttgctgtaacgtccccacttcaagcctccattaggtccttatacccacagaatgatggctcttatatatgagtatgtcactctagctgcttcatagactgatgactggccctacaaatcaacacgagtgtctccagcgtgctttgtcctcactaacacacttcttggaaaaacttcccaagaggtgcacccatcttgaaattaccccaggtcaagcactcttaactgtggagttctttcgtgatgtgctaccaaaaataaaagatgcaccttgttgatataggtagtatcaatcaatctatctaagcccccttcaactgtgtagtcccatacctgcatagtctcgaaatcatcccactagacctttcctagctaggcagtgtgagattgcacagcttacccggtattttcccttatggatcaagagactactgactgtcataactttccaggaggtgtgcgagtgaggacaaagcacgctagaaatacttgtgttgatttgtagggccaatcatcaatccatgaagcagccagagtgaccgtactcgtgtataagaaccagcatttcgtgggtgtaaggacccaatggaggcttga

SEQ ID NO: 112116 - DNA, 2603 bp, Cannabis sativa
aaaaaaaaaaaacttttaattttttttttttttttttttttttttgagaaaaaacaaactttcaagttgattcttccaagtggttatagttttctgtactgattaatattgttcaaagcttgttaatatatacacagcctacattaggctgaaaaccaaagttgaactgaagtttctatttccataatggcatgtgaaatttcctcatataattgtggtttacgtatagtgtataatatgctcataggggtgattgtataagtttttaggtatggcaagagttttggattactggggatgttgatggacgaggtgtcccagtatcaaatcctgatggtcccttggaccatgatcttttcatgttgtgtgccagagacactgttaagcttctaaggaaccatcctagtcttgccctttgggtggggggaaatgaacaaattcccccagaaggcatcaacacagcattgaaaaaggacctcatacttcatcctttattttacaacgaattgaatgaagatggcaagtctgctacaggtttatcagttgaaatgaaggatccaagccaatatcttgatggtacaagtatttacatcaagggatcattgtgggatggatttgcaaatggaaaggggggcttcactgatggtccttacgaaatccagtatcctgaagccttcttcaaaactgattattacaagtatggatttaatccagaggttggttctgtaggcatgcctgttgcagctaccatcagagcaactatgcctccagaaggatggacgattccattatttaggaaggtttctggtggttacatagaagaagttccaaacccgatatgggactaccataaatacattccctactcaaaaccagggaaggttcacgatcagattcaactttatggatctccaaaggatcttgatgatttttgcttaaaggtagatcacatgttttgcatattcaggcataacttgagatttagataatctcatttgacccattgacatattacaatgatgttgcaggctcaacttgttaattacattcaatataaagctctactagagggctggacttcgcagatgtggagtaaatacacgggtgtcttgatttggaagacacaaaacccttggacaggtctcagaggtcaattttatgaccatcttctagagcagacagcaggtttttatggatgccgctcagccgcagagccagtccatgtccagcttaatttggctacattttttcttgaggtaaaatattcagttatagcaatttaattggtgttatacttaatgccttaggatttgaagcaaataacgtggtgcaaatggtgttaaaagatagtaattttctcttcctgctttgaacagattgttaatactacgtcagaggaactatctaatgtagccatagaagcctcagtatgggacctggaaggaacatgtccatactacaaaacttttgaaaagctctctgtgccgtcaaaaaagacagtatccattgtagagatgaaatatcctaagtccaaaaacccaaagccagtctactttcttcttctcaagctgtattacatgtctgacaatcgcatcttatctaggaatttttactggttgcatttatcaggtggtgattataagcttttagagtcatacaagaagaagaaaatacccctcaagattacatccgagattttcatcaaaggctcaacgtatgaagtccatatgtatgtcaaaaataaatcgaagaagccagagtctcaaactttaaccttggcaaacaattttacctcaatgcaaagtgacaatgattttgattcttcctcgctggaatcaacatgtgaaaaaccaaatgaaagtgaagctgttggtttagttcataagcttttcaggcgtttctccaaagaacaagatggtttcaaggttaccgaaatgaacatgaatggttctgaagaaggtgttgctttctttcttcatttttcggttcatgcttcggtgacacagcacaaagaaggagaagacacaagaattcttcctgtgcattattcggacaactatttctcactggtgccaggagagggtttaccagtcaagctcacttttgaagtgcctcctggtgtcactcctcgagtaactcttcaaggttggaattaccctggtgcgcataatgtccattgatctataatataaattataattaaattttcatgtttgctgtttacaaaatgaggatgctggatgttgattcaactgtacatgttcatgttgagtgagtatttataacgaacccaacccaattacaactttttccttttttattagccagaaataaaataataaatttcaatttcgatatttttgttttaattattagaactatttacctttgtcttttactttatatatttatatttttatatatttatatatatatatcattatatattaaaagtgtctatctaacgttaattcttggtttaacgattcttttttatttagtcttaacttaacagactattaacgttaaacgttaacaaataaataaacccaataattaaacccaaaaaataaaatatataacagaattcttgatttatgaga

SEQ ID NO: 112117 - DNA, 4362 bp, Cannabis sativa
ttttattcttgatttgtttgttttgatttaacttttgtttatttaagtgtgatcttgaatctggaattacagagattaattcctatgtatcaaagctaaattttctacacttgctttgctagagaagaatattttcaggagataatagtttttttttttgtactttcagtctcattagaaatagtttttagtaatttttatgaattgctaattatgtttgtattttatgtagttcgaaacatcttatttttaattgaaatatttaaaaaaaagtggaacaaatatcgacagttaacttaaaactagaagacaagagatttccaatatttcaagcataatattgttcggaaacataagtaaagttggataggttattcctttaaaatttgttgtactagttgattctcaccccttaaaaattatgtatgagttgctaacacacatttttttttgttcaataatctaagatcattgtttgaggatgttattcaattttccaaaaatatccctaatctatgtacattagtcaattaatatagctgcatatgaattaacttaacatactcttcccataaataaacaattttttttaactaaatgtctatccacaatgatattcctcattacttaaaaaaaaaaactctctaaaataataaaattatatattttttcttataataataataataataagagggtgagattgaaggtggtgtggccacgtattattattattaatataaaaaaaaataaaaaaaatgatgagatgagaggcgaagcaaggctagggttagctcttattagctctgcctctctttatttgagcgggtattcattcatacacaatatcatataatctcttcttcttcttcttcgccaaaggtactccccaaaccctaaccctaatttccttctctttagatctataccaatatctatgcttatctaataataattccattctcgccattgttgctttcctctcatttttctttttctcctttcttagatggatcggtaccagagggttgagaagccgaggcctgaaaccaccattaacgagaatgagatccgcattactactcagggtaggatgaggaactacattacctatgccaccactcttctccaggttattttcttctacttcttctttttcgataattttttttttatatatgtaggtcaggggaggtactgattgtgcttctgataatcatgtatatatatatatttttgtatttttctttttgtaatgataatggttaaaatagagttgcagacatttttttaggattttttttttgttatggcgtttaaggttagatgtgttgggaaaatgcaaagcatgttgtatatattttcaatataattaatattttgcttgaagagttcataaatgtgtttcttcttgattgttgcacttatttctctaacgttgaaatgtttcactgactattaattacaaccaggagaaaggctctaaagaaattgctcttaaagccatgggaagagccatcaacaagaccgtgatgattgctgaattgattaaggtttaagtctcttcctattaattatggtaacattaaatttcttatgcttatttacaaattcttttacttaatgttttccctgtttttctctcttgtagaggaggattgccggtcttcatcagaacacttctataggttccaccgatataaccgatatgtgggagccattagaagagggcctccttccgtaagatgcatttatcaattggagttattagtgtgtgcattcatcttactttactttagtgattgtttatttatttataccttttaatgatgctgcagccttgaaactacccgccatgtttcggtgataacaattactttgtcgaaagaggagttagacacttcttccacagggtatgttaagatcatttttgttcaggaaagcatagttttaatgttagacctctaaatttctttcactaaaaaaaagcagagtactttatgctgtaaatgctgccattacttctgtcctgttttcttattgtagatgtttctttgatgtagataatgtaacttgactgtttacttttcctatgctgtagataccagctgcctattccggctgatcaagtgaaaccctggactgaatacgaatatgaaggaggtaattaaaaaaaatcatttcacttaccatcttatatgtgtctttaattgtattaataatgattgtatgtattcttttgggtgtagagggctcacctaacaggcgaggcagaggacctggtggtcgaggaaggggcagaggaagaggtatatatgatagcattgcagtaatgccagtgctcacattattttggactttttgggctttcattatgaattttttggaaatcttgtgtttgatctcttgttactgcttaattaattttcttttgataattaactatcataagagtactttggtatagttttatgtggaaaagatttgtcaaggtggctactagtttcccagactgtctatgagcactcaattgattgatttattgtttttgatacttcagtgtcttacacagatctgtcagtccaatttgttaactttcttgttgagcagtaatgtgtaatgtgtaattttgaagtatgataactgtgtacagaaggtgcctgcatcgtatttgttcttttgcaagtactcaatattcaatggttttcaccgttacatttgttttgaggttgtttgaagcggcaaatctgatagagcttttttcaggtaactttaacaatggagttattgagaatggcgatggtggttttgacggtggacaccgtggcggatatggtggtggttatgatggtgggcgtggtggctatggtggtggttttgaaggtggacgcggtggctatggtggtggttttgaaggaggacgtggcggttatggtggctttgaaggtggtcgtggttatggtggcagaggccggggtcgtggaagaggccgtggcttccggggtcgtggaagaggaggttatggtggtggaaatatgcagccactagagtcaggtggtggttacaatgattacggaggaggtgcacctatgcaaacccgaggtgaggttttatatatttgatatcatctttttttactggaagccaaaactaagtaacatttatcaggacatttttttaggtgacacacctactttgagaagaaaaagttactcaaaagttcccttatttccatctacccactgacttgttatgcatgtctctctctgttaactttctagtattggaaatggcatattgtatgatgtgaaatagtgccttttgttttgctgaagttgattgggcaatatgagctgattatgcataggaggttattacattggaattataacaaattataacacatcaacttatttttctaatcaagctcatcagcttttttatttaaaaatttacaaaatcataactctgacctgaagcatgatgaacggattactgttttctgtgaagttctcaatttttactgacctcgaattatcaaaggggcctcattttgatccagaagttctgctttgtttttaaaaagtcattatcttattctcaagttaacataaatcttgcaggacgaggccgtgggcgaggtagggcaagagggcgtggaagtggtggtggtggtagagggggcttcagatcagatggaccgatgcaagctgttgctgctgcctgaggttgctcacggtgacgtataaaaattcaagttttagattgctgaaagttctggatgcctgctctgctgactatgtctattctagtgaaatttgtgagggttgaaagtggggtgttttataggttggagggtttggtgaatttcactgatacattttcgggcattactaattttgtagagctgtccatttatttcatagttgtggcagccatggttttgtagttaaaagattaggtttattatcattttttttcttcttcttcttaattgcagacttgaaaactcagtgagtttgtacaccttttatcttttagagaataatagagcagtacattcattatttgttcctaattaaacatccatagctaatctttttgagatagataaatggtacaaaagttttggaatctaaagtgacctataatttatagggtaatatttaaagagccctttttggctaccattgttttcttttattgttggaaaatgttacctattgtataatttaggtgtgttcataaaatagccgatccaattcgatttgcacgatccaattcaatctaatccgcaaagtgcggatatctgcacttgtgcggattggatgttgattgatatgtaaaagtaaccgatccaat

SEQ ID NO: 112118 - DNA, 2486 bp, Cannabis sativa
ggggtttgaagtccaagtcatggtctggggtcgggttcagggtctagatttgagtctaggtctgggtgcagggtcgggtcagaagtcgggataaggggtcgaggtctaggtccccatcctcggaccctttctagatattataatacaggctaatacaaataatttgttatgtatcaaataatatgattcacattttattaaaatttatggtcgtaataattaatacaatacaaaatttatccaaacacggtgtttcttgttatttcattcaataagaccctcatatggtctaccgaacgagccctaaaatatttataatttaatacaataactaaatttagtactaaaatactaaaatgacaaatatatatatataaacaatgcattattgtgatgcaattatgatctaaatttggatcaacttgtacctggatcaattgacgagaaatgctaaaaggcactaatggtgcctagcacccttctcggtattatatcgctattagtgtaattaaatatcgtgtcttatataacttaagacaataacttttagataacatcgtaaccaattataggggcccacctataaaaagtgctagacattattggtgcccaataacaatactcatcaattcacatacaattatatagcaaactttttataaaataaactatatttttagcaatagatcgcaaatttacatctccattagagatattttaatagtgtgtttcaaaataattgtatatagtaattacactattttaatatacaaggtgtttgaatattaaatgataattacatataaattggttatgaaaattgtatagtataattgaggtctcttaattacctttaaggttactatctatttacttggaagtattgttattgagtattagtagtgtccaatatcttttataggtgaaattttatgattagttagctatattttataaaaattactttttaaaattatatagaactcaatacttaattatactaatagcagtattatactaaaaaaaaatatatatatatattactaaacaacaatgttaccttttaacatttctcatttacttggctcaacttgaaacttctgaattactccgagttatacttaagttgaattaaatggttacttgtgaatcccaccctaaatgtaagaatcaatttattccttttgggaattgtgtatatttactctagtctctcgaatgttgttgaataaatgcaactatatatcataatttaagcggcacatctaacttcattaattgcaaatctcaaaccacaatatcatctagaaaacgtgaagaagatatttcatttaattatatgtataatatttatgtcaaacatagctgaaaaccagccacactaatccaaagcttttgactcatatttataacctcatcctttttacgttcttaagaaccactctttcattccttcttttctttctcaattgagaaatacataaaacgacattgtttattaatattccagtgtcgttttaatcacttcactacagttcatccccattacataaaaattaggataaagtctgaaaatttgaatacaaatatataattttgtgccgccatggctgcggctctagcgggagacgatttggccagatcttcaacgagtagcttagcttcaagatcatcaagaagtttgagagagatatggacattaccggcgccgttggacatgttcagccgtagtaatcatcatgatgaaaacgaggacgaggaagagctgcgttgggccgccattgaaaggcttccgacttatgaccgtcttcgtaaagggatgtttaagcatgttctcgacaatggtagagttgttcatgatgagattgatgttaccaagcttggaattcaagagaagaaggttttaatggagaatctacttagtgttgttgaagaagataacgaaaagtttcttcgaagacttcgtgagagaattgataggtatttaatttaattgattaaattaaactttctattataatattattaattatgattttgattattaattaattttgttgttaatttgggttttgtgaagagtgggaatcgaaattccaaagattgaagttcgatatgagagattatgtattgaaggagatgtgtatgttggtagcagagctcttcctactctgcttaatgttactttgaacactgtagaggtactcaattccaatttcaatttcaatttcaatttcaatttcattttcattttcattttcattttctttgttttaggataaggcaattggatttgtgtatatagttatatactgtatatagtctatagatttaacatatatatttatggagaaatttataatacaccctatcattatattaaattgcggcataaatacttaatctttctgattttatacatttaaatatctaatgtctatttttggtggcaaaaatacctaatgttacaattctcttacactgtt

SEQ ID NO: 112119 - DNA, 6469 bp, Cannabis sativa
attatttctcttttagctgctgttggtggtggttcttgttgtgccattccgcgtgttgcgaatggtgtggcccacgcagttgcaaagtctgttactaattccataggggttgatttgtggacagatgcttgtcctagatttatgagtactcctgtaacagctgatttgttttaatgagatacgttccttctttaaaaaaaaaaattataattatagtatattttttattaatttttataaaatttaaaataatttgttgtcccaattattcaaacaatttgaattataaatttgttacaatattaaattgttcaaaataaaaaaccctatactataaattttccctaaatataaagataattggtgaatctataatgtctctttaatgtaattttccaaaaaaaaaaaactttttcttttctatggagagaaattgagaatcatatattatgtgttcattcacaaaataaggctaaatagagggtaatctcacaaacaaaggctttgaatagttataaatttatacttatattctttatatccaacttcaacttctatatttggctttatttggtttagtttcttcaattgcttccaatacatacatcatcatattattactaatatatatttttacttaaaattctcctcattcaaaatggcacacacatactccttccaacttttgtggatggtgagtttgacatctcttcaactcaacttcgaatatgctttgcttacaaaaacaacaaaagtacaaaacacaaagaataaagagaactattatgctattacttaagatctcaaccactaactcctttactttgtttgtctcctttttttcttttttaatatataataaatgttagatctagtatgaacaattatatagacacaagaaagttgagagcaaaattatatttatatatattgtgtcattaatttcaaacatctcataaagagaataaatttgacaaaagaacatcatgtgtggaagtgtcacagggaaaagacaacattccaagcacttcctcctttgtcaaaaaaaaaaaaacatagtaaacaaaccagaacaaaaataaatttgaaaagaatattaaaaaaatataataataagagcaaatgaacacattcattgctatgatgcagtacttatatataggaataaggattgattggttctagtagtagttttgagttgtttgtagtagtatataaccaccaaaggtaagatagtgattttctcctttcatggtgttttagttacaatgaagtaaaatgtaaagggacacctttgtttctctctttctgtcccccgatttgtcttgctccggctaccgcctcagactctcaactatgtagtcagcatacagatccctacacaaaatcatcccacattataatctaagaagaacaatataatcatcatgatttttatcgtaatcataatcataggacacttacattgaatgttggattgcttcataggctgctgaagctggaagaaaatcattcactgcaacttccttgttctcatttttcttgtctgtttagtttttgacaaaggttaatattttgatgtcataaacaaatcccaaaggaacaaactttttatcaccctttgaactctaaaacaaaaattagttagcttacagtcttcaaagaatcggcggatctcagccaaacgatgtgggggtagctccttgatatcattgaagtgtctgtactcaggatcatcagcacaaacagcaatgatcttatcatctttctcaccctgatttcataccatacaacaaaacacaagattaataattggttgaagacaaaaaagcaacaagaacaattgatacatgtccaaaattcacctgatcaatcataggcatcagtccaatagctttagcccgaagaaagcatcccggaagtactggctcctgtgagtcaaaacacatcaaattcaaaccccaatttcataagaacatgaaaatgagaatgaaagagaggtggggtatctacctgcataatgatgaggacatcaatggggtcattgtcctcacaaagagtacgagggatgaaaccatagttatgagggtacacaaccgatgagtaaagaatccgatcaacctacaaacaaacacacaaaccaaacaatgaatccatgtttgacataaatgattatcattcaaaatttgactttgacataaaagaaagaaagaaataccttaatcaaaccagtctttttgtcaagttcatatttcaccttacttccctttccaatttcaataacctgaaacaaaattttgcatttttttccttcttcataagaacaatgttcaaagttcaaacaaacaaaacacacaaacataactatgaaaattgtatgcttacacagttgaagacagttggagcaccaggtcctgcatttcatgaaaataacaaaaaaagagggttagattataatgaatatgaatattgatattgggtaaaaaatcacagaagaacaaaaaccataccaatctcaagatcatgccatggatgagcagcaatggacctcctactcatagatgaaagaatcctctcattcaaaggtggatgtccattatgagacgaaacagctggtttgtgaggtgtttcaatcggaggactcattctctcttttctctgctcaaatccattccaaatatcacaaaatcaaaatcattatacaaatatacagatcttttccatatgtaaccagatccaattcattaaaaatgcaccaaattacaaaatcagaatcaacaaatgtaaaaagctaaggacattagtgattgttttacctgaaaccaaaactgaagaagtagatctggattgaatggagcttcagccagctcaaccctattttctgttgtgttcttagctcaaaaatccaaaagcaatgaataaatggcacacattcccgctttctttctccttcgccatttaaagaccttgaattttccatttttcatttttatttatttatttatttgattttaatttaagattaattaaaaattttgttccgaactttcacatgtattaaattatgtcattaaatttttaagtggtttaaaatttttcaattattaagattattggatttaaagatttttatgtaattttagtaaaaaaaaatgtaacatagataaaagttaagagagttttatttggtacatatcaaagttctgatataatttagtagatatcaaatttaataaataaataatcaccgaattaataaaattggataaaaaattcttaaatctaacaatttaataattcaaataaaaaaaaattaatgaataaaataatttaaaaagtataatttattatatgtcaaaatttaaaaaataaaaattctcttaaaaaaaattattaagagaaaaattctaattagtttttatttaataatgcttcgtacgttccatcaaataaataaaataaaataaaaaaggaaaattaaaaacgtatattccgcgaaaagagaattttgagaaggtgattccagctgtgaaatagatacgtacacgtgtcggtgactaattggttaagccagagagattaagaggcctaacagtcagtcacaccatcttagcagtgagtcgtgtggcgcagtttcgtttcgtcggtgagtagtccattttacgtttcgtgaacgggtttgtttcagtgcggtagagtgtagacgtcattgggtgagatcgacacgtgggctaatcgtattgttgggttcagattttgtgttttttttttttttttttcgagtcaagattttgtgttattaaaacgtggagtaaagtaaagtaataaagtaagagcgcgtgtatggaggaaaggatagaattagaataggtaagcaaaatccgagtaagagctgagtgggaaaatgggattaccaacaaataattttggaaaattataaaggattcacttgtgtgtatttacatgggagaatagttatttaaggaatattattattggatagcgatattttttttttaaattatatagaatctgatacttaattttatatgatattgataagagtgttagataatgagaagagtattaggtactagtagtattttttagcatttatattatttaagacattttttaaaattttgagactataaggttcgaatagtttgctgcacgtgtgaatttttattttaaacgcgtgtaaaatagagtgttttaatattaatttctatattgtaaattattcaaattttttaaaatttaccgaactatcttaaataactataactataacgtacacgattatgagaaaaattaaattaaaatattcgtgtgaatgtcgaaataaataagaggtgcatcgatcggtgcttactttttaggagtgtgtattgtagaactacctatttttattaatttttataagttgtctaatctttaattgatttcttaattaactaaatctaccagtcttcttaatttttggttttttgttggaaaaaagtcccacaaaagaattgtcttcccattctacatgttttgatttgtttgagaacgcgttcttcattgattttggtttgaaatttgaccatttagctttaatattatataataaatatataaatataaagaacaagtcactcgatttctagaagctaaaacacacacaaatagactaattccttacttttatctttaagaggttagttaagtaattaatacaaacattatgtaattaaaacttttcaattctttaatcacattcacatgttatgttaagtgtacttccaaacatgttaaataataatttaatttctatttacaatcactaatctgacatccaatgctatagaacacacaagaaaatgattattgaaaggaggaatgttaaactttgtcaagattataagagacataagcactacaaccaaatccaacccaaaagactaacaatacttactagagtgttatccgagaaatttagacaataataaaaattatatgagtattcgaattaaataagaatacccatatgcataattatgagtattcacctaaattggtgaatattcaaaataaaacagagattaatataatatatataaacaacaaaataaaaagacaaaaaaaattagtttaaccagagctgtttactccattttagaagaaattgtgattagtcttatttagattggataactcctttatatatatatataaaaacaattgattcttcaatttacataatcagttagacacgaccattattaattatacttaattgaaatagaaaaatgtaaataatgaaagaataatttcgactgctcttatttaatatccgaacaggtgcgactatgtaaatcgtacattggtcgttcacattctgagtaacacatgaattcgcaggtttgctggtgttactctcatatcaagtctgactcatccgagagagcataaacctaggggttttatagatgcgcaaagctattgaggttttataaaataaaatgcttgcgacaatactgatcatgtattggacattcatgtactatgtactgacaacatagaactcgcgagttcaagacgagatgtcacgcacattagtcattcgaactaattattgtaaagataccgtctttacttaggttgtagagaaataccaaatcatcacatatagtcgatatatgtcgtgactgtgctgacttctctctacgtcctatttctattctcttcattatgcatctagaccctgtctcgatcgcaccttctcgcatgtttatattatgcaaggataacccaattgggattggtggtgtaaacaaatcatccttttccaactggaaattggatccctgtcaatgaaatacaaggtacttgttattctaggtgaaaaattcatcctataacaaatcattgatataaagtattaatggtgcctagcaatacctagaggcgttatcttgtaattagttagcaatattttataataattattaaattaaattatttaagatttaatacttaactatggtgctagacattactagtctttattatttctccacttattaacctgtaggctattttgattttgaattatattataattataaaattgtgctctttaaactttttcactcgtcaaaattttttcttgaagtattcaacatatgttgaaatataatattttcttaagctttatccaatgtgactaatatgataatttaaaaatttgaaaattttattttcttataaataaataaaaataaataattttaattattctattattaatttttgattaaaaaataaatttcttacatttaaaattaatttttcttttagtaatacatatagtgtttatgtggaaatgacacgaatcattcacatcaacactttgttataggggtgttcatccgatccaattcgcacttttttggtcaaacaacatccaatccgcactaagtgc

SEQ ID NO: 112120 - DNA, 992 bp, Cannabis sativa
cttattcagtcactggctggcacgagaaagcttatatagcatttgagaatatgcagaaggaaaagttaaagccctcaatagaaacttatactgctttattggatgcatttaggcgtgctggggataccgaaacattgatgagaatttggaagatgatgatgaaggaaaagatcgaggggactcgtgtaacgttcaatactcttgttgatggattcgcaaaacagggttgctacatggaagcaagagatgtgatttctgagtttgggaagattggtttgcagccaacggtgatgacttataatatgctgatgaatgcatatgcaagaggaggacaacactcaaagatgccacagctgttgaaagagatggaaaatctcaatttgaaaccagattcagtaacttattcaaccatgatctatgcttatgtccgggttcgcgatttcaagagagcgttttattatcacaagagcatggtgaagagtggacaagttcctgatgtcaagtcttatgagaagcttagatcaattttggatgtgaaagctgctagaaagaacaagaaggatcgaagcgccatacttgggataatcaatagcaaaatgggcatggtgcaagctagaaagaagggtaagaaagatgagttttggaagtacaagaaaaggcacgtaagaactataaactctactacttctagtaacagtgatacatagtcgagttttttaataaggctttttaatcattcatcaaaatcttacagaactgttgttgtgcttcactctagttttctagaatcaaagcaagctaaattgagaagaatgttagaagctgtttagttagtaatctcagttgattagattcaacaacttgtggcctgagaactgaatgtagtgcaacctgtttgataattgtagatatatataagggatatgattttgtccaactttcacgacgacagccgtcagatgagggagttatttgatctgacggttgagatt

SEQ ID NO: 112121 - DNA, 3411 bp, Cannabis sativa
  modified_base (105)..(117): a, c, t, g, unknown or other
aaagtcaatttttttatcatttttttgccgaatttttatttttattatcttttttcagctgatgaaacaaccccaacctgcataatgtaaaaatgagaaattttnnnnnnnnnnnnnaaaaattaatcataaaaacttaatttttctaatattactcattcataagtaatacctattaagagtgcacccatatataaatatgtatgaattagattagattggttatttttatatatcaatcaacatctaatcagcacaagtgcagattttagattttccaatctaatccgcataagtgcaaatatccacactttgcggattggattgaatttttatgaaaacctgtaaatttatttctattcataccactataaagaaacaaatattcctttttctaatattaactaatataattgccatatagaacagtctattaattatctcacataatatgtgaatagattcactgcttttctcttcctcgaggtattcccaaaaattttaaaaaataaataaataaagaaataacgaaagaaaagaagatgagaaaggtaatctttacatatttttctttcaacttttgtaaagtgtaaattattgatttaactggccaaactatggcttttctagctgataagaagtgcacctttgaatttccagcctctcgggagatgagatacgctgaccacggccattgactcatagcatcctctgtaatatgcatcctacagtacaagcaacatcgctgacgacaccagagatactatggattctcccaaatctatggagtttatcttaaaagaatgctagcaactcaacttctaatcaagtcaagcagatgagaatagctcaaactcaaacaattgaattaattgaggttatattataaactaaaacaagaaagaaactagatatttgaaaaatagaaagctagtgtttcatactaatgtaacaacaattcataaacacattaatgtatgcatcgatcgagattaatgcagaacaactggatggacatatataatattgctagttgcaactgactattcatattagaaacaaattccttgaaaattaggcagaacataaaacaggagtagcaaaacttggaatcccgtctcaagtcattcaaattcacttaactaaaatagacaaatgactctgctttagttcccaatggcaatggaagaactgggccttgtctgctttcttcaagttggtatcagccttcaaattaagaacagaaattcaaactcaaactcaaactcaaactctagccctcttgctactgcaaccagggcacttgtactgcttgatgtgctcagccttggctggtgtaatcttcacacatttaccatggaaccatctctcgcacacatcacagcagatccagaattcatcggcaccatagttatctccacaagccccacaggtagcaccttgttcgtcatcttcttcttcctcttcaccactttcatcctcatcctttggtggtgaagacatctttactcccttgggttgggactcagattgtcgtgactgcttaaaagacagacattcatgtagcaaaagatgattaaagtatgaaggtaacaaaaaaaaaattaaaataaaagcaaatagatagtagaaaggatgagtgatacaacttcttttattcccaccttgccacttgatttgcttttgccactattgttctgggtagcagactgctcctttgattgtttgacgacactccccgttactacttcaaatatggtgggaagatcatttatcatctgaaaaagccttttcctgcaaattccaatcaaacaagtgggaaccctatgacttttaatttaatatgatgctaataatagtaaatttgcacattaatcttggatggcaaggtggcaatatttcctaaaatcgtgtaggatttaaaaagcacataatagccaatagatttgtcttccaagtatttaaatgttgtgtaagccaattacacaagaaagagacatcaacaaaaagataccaacaaactaacacagacgctaatttatacagccaggaatatactctgcaatcgatgcaagtaagaatttatacaggaaaggaccatggcttatataccatataaagtaaactatctatgttcgatttgatgcataaattaattgtctaaggaattgaaaatatacaattgatctgtgcagtacatgcaagattctcttagtttcctagcacctgaatctgtataaaacacaaatcaaattaccaacatcttagttgcaggcaaagccaatataagatgagtcaagagacttgccagaacttcaagcaaaagataataataatatataaatacatactattttctttaagcaagcagcttctaaattacagtgacaaaattgttcaggtcacaccaattcaatgtacaattgaaaaagaagaaatttcccaatcaagggaaaaaaaaaaataatgtgttccatatttattattcttttgattgtactaagtcactaccactgtacaactcttgtcgagccctcttagattaccacaactaagaacagtacatcataacaacaataactagtaatttgtagaatgtgaaaacatggtgtgaacaagcaactctaagtagaataagttgcacgctagtaattgaagtatcaacattgattgcaacatcctatactgaaagttgtacaaaattactataactgaatctttctaacaagtcaacttatcaattttagtagcctgagctgaggaaaagaaattgaagcttgattccaaacatagatgcccaatatggtagcctaaagaatagaagcaagaataaggtctggaaagttaaaataaatctcatgatcattagaaaacgattactctgacaggtgagagtatgaattttctagagcacaaagaatttgtcttccccaaagtgaaaacaaaacaaaattgttttgagctagaccataccattctgcaagagaatacacacacagagagaaagaagtgaaagaaacaacagaaataaaacaatcaaggatgcctaagcattactatatgaacaaaataatttcattttcaatggaccatcactccccaactttgcatcatagaaaacagttactaatttctttactcattcccttgaaaagaaaaacacaattctgtcactggagtttctatttataattatcaataaaaagataaaaagaacataaaaaaaaaaaacattccacacatgttataatacagtagaaacctaggaggaaactaattgcataccaaagagcatatgcaagacatgatatatcataatgaattaaggcattccacatagcatataccacaaatacaaatcaacaaacataaatcagaagaactgaaaaaaaaaatgagaagttactataa

SEQ ID NO: 112122 - DNA, 1812 bp, Cannabis sativa
  modified_base (422)..(422): a, c, t, g, unknown or other
cagtgagtgaggtagttaccctaatggtatttttgatgtttatctctatggggactgtgcctccacttcttgcttccacataagagttattgcagggcaatagttgggcattgggtcgctcccacaaaggggaatgaatatgtgcatttcctttgcaaagggttgctcgtaagacatatcctgtgtgataatttcttggttgctcgacatggttcgatatatatgatccgtctagtgcttgcacgctactgggaatacttcccttgcatatcttccgaccaacatatttcgagaaaagtatttaagcatcctcgatccatatagtggcttttacgcttgccacgtgtcacattatacagtgccacatcacaagagtgatttttggaataacattaaaaatatgataataataataataatantaataataataataatacaaaggtcatttaatgtaaatgagtattttcactaaaattttataataaaatattaaaaatggcataatagtaaatatacatatgtagtattttttgtggtacgaattttgtattatgctatttagtaatctaaattttaatcagcttttgttatgtgaaatttgtctcacaatttgacatgctattagagtagatttttttataaaatgaactatatttaacatttgcatcacttatttgtatctatcggagataatcttatgcttcaaaattttttcaatcaaacaatccttattcattcccggagtcacatcaatttattctatccaaatgactgaaactaaaagtttgagtgactactatgctattttattttcaatggatgccataatttattcttcgagaagagaaaaaattcaactgataccataaagtattcttacagaagaaaaaaaaatgaacatagataatcaataacatagttttaagtgaaatttagtgtgaatgcttccatccttgtaataatgagaagctaatttgattgaacttatccttagataaatgtggtatctgttaaagtctttgtatcaaaccaaaaaatatatatactagatgaaagttacgtgccgagctacgtaaatattagtgttatttaagatttggtttttctaattattttttagatttctgtaactaaatgtattgtatgaatgatttattttcttaaagtaattattgtgtaaatgtatttagatagtaaaacataattgtgtgtataaaattatgatatatacattggtttcaataataaaaagtacgttaatcgtaatatttacataatcataatgtagttatctttaatgtgaataaataatttatgctaagtcattacaatatgtgattttaacatttattatttatttttgaaaaatttaaaggaacaatatatttgttttgtaaaatttaaagcagacattatgtagcgaaaattaaagaaaaagtagcatcttaaaataaagaaaaaaaaatattaaataaaatcttattatagaataatatttgagaaattaaatagagtatagtgaaactacttcatattctttcatcggctgagctatttgaatggtgatttggttgtactttacattcattgttcgttttggatggatctacatataactgaattttttattttttggccgaaagtttgattagtgtttttattttattgatacttgattgtgtattttaataaaatatatttgttgtttatgataacaacaacaacacatctatctattatactagtagaacgccacgtgcgaggcacgtatactaagttttatgctaggtgtgtcttgctttatttaaa

SEQ ID NO: 112123 - DNA, 4919 bp, Cannabis sativa
gaagaagatcttgaagctttatgtgtgctgatgagcacaattggggagatcattgaccatcaaaaatgcaaggagcttatggatgcatattttgattggatgaaaactttatcaaataatacaaagctatcatctatggttagattcatgctgaaggatgcaattgatcttagaaataataaatggcagccgaggagtagagttgaagtggctaaaattagagatgaggaagaaggggctaagcagaggcatttgagggctatattaaacaaactaactcctacaaaatttagcaaattgtttaaacaagtgatacatgttgacatggataatgctaagacacttctcggtcttgtaggacaaatccttgatagagcccccgtagagcctattttttgcgagctgtatgctaacttctgctatcggctttcactagagttgcctcattttagtcaagaaaatgagaacatatcttttaaaaggttacttgccatcaagtgtcaaaaggagtttgagaaaggagaaagagtaagggaagaagtcaatatggatgatgatgaggagagagaagtaaaacaatctaaagaggaaagagaggagaatgtaattaaggcgaagagacgtatgttgggtcatgtcaagtttgttggggagctgtacaagaagaacatgttgactgagagagtaatgcatcactgcattagaaaactgctgcatcaacaccagactccacatgaggaaagtcttgaagcattgtgcttactgataagcacaataggggagatcattgaccatccaaaatcaaagacatatattgatgaatatttggaaaagatggaaactttatcaaataatattgaactgccatttaggattaggttcatgttgaaggacatcattgatctcagaaagaataaatggcaacaaaggaggagtgttgaagggccaaaggaaattcactatcgaaaggcaaaatcgctctctcccagttctcagttaggcagtcagaatgttcatttagatgtgggaaagccttttgaggccatgacattatcagctcccttaactcaaagaccactttgggatgatgcttctagagtagagaccagtagaggatcactttcaccatcattttctttgctgactgatagaaatagtccaaggaaggatctcattccgaggatgtggctcgaagaactgcaagagaagacaaaggcagctattaaagaattttacaggtttgttcatctgctagctatgtatgtttctaatgcccatctactcataactttcaggatgtcaatgcatactttcagggtgtgtttggtaacgcttattgtttaattaacaacagtgctcgggatgtggaggaagttactcaatgcattaaagagttaaactccccaagcttccacccaacaatggtatttatttggatcacagactcttttgaggaaaagggcatggagagagatcttctggcgaaactccttgtcactcttaccatgtctcgtggcgatactttgagtcgatcacatctcattaaagggtatgcaaattaaaaatgagaacttgttggctttctgttagaacataaggcattttctttctttctactactaattcttcttctgggcaggcttgaatttgttttggcaactttggaggataccataattgatgaccctaaagcaccagagtaccttggtcaaatattagccaaaatgatcatggcaaatgtggtttcattaggagagattggtcagttaatacacaaaggtggagagaagccaggcagccttataaaaactggaattgcagctgatgttcttggaaatatcttggggactatcagagaaaactatttcgacgagattatcaaaaaatctaatctgcatttggagacattccgaccacctaatcctctaaaatcaaggatattagagaggtttatccaggattgatagtaatgctctgtgtaaggtagttatgatggaatttgtgaagtttgacaaaagttctccctatcccattgcctcttctttggcttgtttgtgtatggtatggaactgggttgctttgctgtgcttagatttgtgctatgtagtttttataagaacaccctatttattatttaaaattaacataaacttttaacttatgctacaaaaatttggtttagagcaaaaaacagattgaaaattgaaaaaaattagaaggaagttttaatatctaaaatatgcacttaatatttttttttaagaaaaatgcacttaaatatgtgccatcacatttatttaaaccaccagcgagtagcatttattcaaagtgaagaatatggatgaataaaatagattttttctttttcaagtgaatgaacaaaatagaatttgtatcaacaagttggtagctccggaaaaagaacccacttgtttcataattttttatgacaaaaattggatacttattcatctcacttattcttttttttttaaggaacttattccttaccgacacgtttgaaatgtcatcaagtcatattgtattatattgaattgaattattatatatcatatttttatataatactatattaaactttattttatactaaaatattatatatttaagtgtccataaaaattaataccacatataattttacataaaaatattgtataaaatacaatttaatataatactatacaatacaatatagtgtaatacaacgtactaaaagaaccctaaattgtcttaaatatctcaagtgcctttttttttttttttaggtattggcgtattcagataaaatagaaatagcttcttttttttaaaaaaaaataaatcaaatagaaatagctattatttcaactattaaacatagtaaatagtctattaaaaaaaaaaaacatagtaaatagtaattgacttcaacattaattcagatgttcaaacaaatgtaagaattaattacaaagatggcttgaagtaggaaaattttatacattcttaggtacactctcactaaaacacccaccagttctaattaattgtcaccccaagaaaaaaaaaacgttcattaatcaagaatagagtaaatgtgtaaataaatcagtctatgaatacaaaaaatatcaaagggagaaaggtcttgcatacacatcaaatggctgacaggaagttaactggggctcctgttccaagtacaaaagaaaaaaaagcaatgcttatgagaactgatgaagtatatgactgtatgatatgagtaactaaaaacagcatgtttgaactgacaatttaagatatcattgcagatagatactagattagtcacaacaacaatacctgtcttagcccaccaccagcactgcctcctgtcaaaagcatgccaataagagttgtaacaacatcaccgccaccgccaatcccgcccccaccactacctgtattccgaatggtagatcgcatggaattcagtatgctcccatatgtgctcccctgtccacgctcgatggcttggataaagcaataagtcatagcaccagttgatgtgatttttgataaggcctgttatataaaaccatagtcaaatgttgtatcttttgtcaaaaacataagaagtcactcacagtagtaaagtggtaccaggttgaatttcatttatacttacagatgtatcagctgaggtttgatcatcatcgcaaccactgatagaaataacttctccaccacttgttcctttccacacacctgatctaggccgatgatcctcccatacatactgtccactcctatcagtatcacaagataagaaaagctaagctcatgaaagaaatttgacattttctttgtcaatgaaatttgacattatccagagttttgttctccaattcccaagcaaatggaagaaagggcttgaaaaccattcaaaattagcaaaaagcattaagttaagaagaaggtgatgtctgatcataaatccgtatatttattatttgctcctaacagagtcatttatatttattcgtgctggttaactaacctgctcattctgcagaggaatggcaaatctagtacagtgccactatgacaagcatctattattgcatgaagcttaactccatggggaagaggtttaacaattgatgtattgatctcatcatcaacaatcataccctgagtttcaaagtctagggggcacagagtttcatcgtatccatcaacttcatcaccattgtagtttctctgccgtgacccatgaccagagtagtgaaataccaaggagtcacccgcttgacatccttgtaatagccagaatagagccatcctaatgttatgtttagttggaatcctgtatggatcagtttcttcttctgcagttcaagatgcgagtaaaaatttatatcagaaacaatttttgagagagagagagagaagtgcaaagactagtaatttactatagattcacttattagcgggaaaaataatcataattttctaatctaggaagaagtaagaacacaagaaaatcttataatacaagtaacatttcgggcatttctggagcctgctaagtaactcatccatttcataattatataaaatttccctagattttgatatacaatttacaagatggaaaaggaaaccatatgatacaggatttacctaagttttttttttatataataacttcaaaaaatgaggagatgttgataagccaccacattaagctagactttagacttagttgttaactctctttatttttaattaaaagctgatgtgtatcagtggctgagttgtattgtgaacaaatccagcacacaatctacaagctaatcagatctaaatgcatttacgctattttctatcaaagaaagtttttggagtcattgctccccccccccccccccccc

SEQ ID NO: 112124 - DNA, 2228 bp, Cannabis sativa
cggtggcggtggcaccactaccgccgccgctgccgccacctcctccgctaccagctcctccacctctaattggaaccgcacaaaattcacatggatctaatggggttgagagactaacaaaggttagttttttttttctttctttcttttttcttgtgtaatcatatatttattaattagttcaactttaaccaatataattaaacaaatatatattatatattaaataaataaattcctattacattttttttaaataatttctctctgtattaaaaaagttctactatccatttacaaataataaaatatttcagtcattattagtggatctgtattgttttattctccaataattatctcaaatatttggttatcaaaaacaaaaaattatctcaaacattaaatagctaaatcatctctctctatatagtattttttttaattaaattaattacaaactgatctgatcaataaaaactgttgaattttaagcctctataggaagagaaattaatgctgtaatagtggtatatgttaatatcgttataattaaatataaatttttttagagagcatgtttcactaccaattatatattaggtgatacgaaatgttcaatattttttttttttgattatttaaacatttatttatatattagattgtataacctgggacccaaacttaagaccttcaacacacgcacctttttatatagctacttacaagctaggtcactgatactcaatatggatgctctaataaaaattacaattaatatgaattatatatagattctaatataaattgttttattatattataatgtgtaggatgatacaggagttggcatgaacaaaacgctcattatatcagataatgcatcggacaagaacgttaacaataataataacaacaacaataattcaatggacataacgtcggacagtagtagtacaccagctctttacagcgaaaaagccgaaaagattaggcgcagttcgtcgcgaaaaaaggcggccgctgcagccggggcggcggtgaacaagatgataaagaggaagaggaagagaaagcaagaagagttggaggtggcggagagtattcggtggctggcggaggcggtggtgaagtcggaacaagctagaatggaagcaatgagagagattgagaggatgagagttgaagctgaggctaagagagctgaaatggagctgaagaggactgagattattgccaatactcagcttgagattgctaagctttttgcttcagttgctcatgttggtaaacctgttgattcttctttaaggattggaagaaattaattaaccaaataatgataataataataataatgtgatcacatagctactacgtatatacgtacacattattattaagtgtatacgtacgtatatatagtagtgggcatgaattagttaatatgtatagatatttacttgttatattatatcttaagttgtactgaagaaaagaaaggaaacgagagaagtctagttttcgatgggatatatatgagagagattttgattaattaacatgatgaatgatcatgtaatgattattatatacgacgagattataattaatgtaatatttagtatcatatatatatatatataataatattgatccaacatggatgtaatgtttttctatttttcattaagagaaaatcgtaagtatttttgtccaaattaactacaaacttcatataactctcaataaacatatttcatgcaataacaacagctaaaactccaaacgtatataataagaaaacatcattgttgagccaaactaaaacttgctcaacatatctgaaacaaccactaaaaaaacctatataagtcttaaaagaaagcttagaaaaaacaccctatgaagctaaggtttggacaaaacctaatctcaaaatctgcacgaacaaaaccaacacctttacttcaaaaatcacaaagaacaatagtttagggtttacttttactaattctttccaattgctattgaattatcttagggtttgtttggtacgttgtattacatcgcattatattgtatagtattatactgaattgtattttatacaatatttttatataaaactatatatggtattgaattttataggttcctaatacaatatactatataatattttagtataaattaaaatttaacatagtattatataaaaatat

SEQ ID NO: 112125 - DNA, 1345 bp, Cannabis sativa
tatatatattgctttattaaatcctagttgagtttataatatatgtatatataatagatccagaaagaaatattgttccattcacaaagttaaatatacatatacatataacttttctttctcatcacctgtcactaaacatttaaacaaaaaaaaagttctattcgttttaaaattcgtatagcactttatatagatcttggtggtttttattttatttttcatgtaataaagtgtgtccttttattggctgtgataaaaagtagccataatgaataattcttccttcgatcaccaagaataataatcgaaaaaaataacaataacataaagttgcatatgcatctacaaaagctatctctctcactcacacacacacacacaattcgtggcttcactttggcccatgtcatctttttattattatgtcacttctttatatctttcccacaaatattcgtggctcacaacataattcaccttctttacttttaaatgtataacctctcatattaattagtttttaatattatatatgtatgttagaaaatatggagatagtaaagtgaaaacttataaggacaaattaaatatagtgttccaaatcaaaacaccaaatacaaataaataaatgagaagaggtagaagattagagacaacacaaaacacaaattattctatgcttaacttgttctggaactctttaaggaactctccgtctttcgttctggtccttctagttttcctttctttcaacgtgatgccatactccttcctcttcttctttattttcttccatcattgcccctttcttataaattaatactcagcatttaatgttctctactcctctcttagatcgagactcctatgtattgtgttttcagaaaacccttggctattctcctctctaggatctaatcgaacatttattagctgtcgtcaggcaaatatgagtcatcatgattcttggttggcgaagatttgggctaggggatgctaggacggatatggcatctttccatcttcccttgatgatattttttaagtactacctatgtggtttcaactatttaagggtgggtttattatttagttcttattctcttttatccatgtcttctttattgttttcaatcttatcaccttgcatgtctttaattaaccatggacaccaacttcgaaaaccctagccaaactatccaactcactgaagaggaagccttgattcatgactttgaccatgtttcccttcattcagaacctcaatctaaatcttattgtatgtgttggaaattacttgctctaaccaacacacttaaaagaaacaattaatacaatagtg

SEQ ID NO: 112126 - DNA, 2090 bp, Cannabis sativa
  modified_base (2053)..(2054): a, c, t, g, unknown or other
aaaaaaaaaaaaaaaagagatagctatcgtcagcaaagagcatgtgtgtaatagaaggtgcccccttggccacacggcaaccatgaataatatgttcatcttcaaagtttctgatcaaagaaaagaaaccttcagaacaaataataaacagataagttgataatagatcaccttgacggattccacaggaacgagtaatcggacccatgatatggccattgtgaatgatggagtattgaacagagttaacacatttcataataagattgatccattttccagcaaaccccattcgatgcataaccacacgcaaataatcccattccacacggtcataggccttactcatatcaagcttcatagccatgaactccttcttccccttggtcttccgcttaagatagtgcataatttcaaaggcaatcattatattattagagacgagcctaccgggaataaacgcactttgggttggcgagatgacatgatcaatcaaatctctcattctatttgcaagaacttttgagagaattttataagagacattgcaaagggcgatgggccgcaaatcacccattgtagagaaatgcttcttttttggaattaagaccaggtgagtgtcattaaggccaagcagtaaattctcagtaacaaagaagtcagtgacaagttgcacaatatcgaaaccaactgtgtcccagtgtatctgataaaaatcgggtcccattccatcaggcctaggggctttatcagggtgcatttggaagagtgattgcttaacttctttagatgagactagttggagtaaagcatcattttgttcagttgtgacagagcgacgaatgccattgactacagagccacaaaccgcacaatcagtagcataaagagatgagaaataatctatgattacctggtcaagcccagaattccaacccttccaatcaccattgttattttgaagttgcacaatttggttatcccgtttacgagaacttgcagtggcatggaagtatttgctattcttatcccccgcgtttagccaaaattgtttcgatcgttgctttcagtaaactttttgctgggctaggatctcaaagtaattgcatttctcacccgaaaaatcttgagccgaggtaggggtatcaatagatttgaacttcgcctgtttaattttacttttagttaaactttgtttgcccagtaagtttgtgaccccattcagtaaggttggagaggcatagattggttttatccgcaagagataggtaatgatttaaatcccaaacatatataatatatttgtgattataatgataatgttataatctagttcattataatcacaaatatatattataaaaaatatgatataaaatttttaacttttatatatttttaattatttttttatataatataaatttatatgcatttaataaaaatattttataatatttttacaaattgtagtttataagaaagttagcttaatgttgtttgttaataatataaatataattttttaaaaaaataaaataaacaataagaaatttaaataatatttttttaaaatattttttttctttaatttttttaaatatataataagtaattaaatatattttaaataaaaaataattcattataatcttttaataattttttttttaaaaaaaaaaaattaagttgtactaagtttaacttttttatatattcttcaataaattatttttttctatcacaactttttaaaaaatataattttttagttagtatgataaaatctcttcgatgtaccgttgacgtgaataaacattgatgtatggtatttacttgatgatgtttgactttattgaaacaaactgaaagaaatagcaattgactaaattcgaaaataacgtgtagaaatgcgaaacctaacagataaaattaagggccaagatgcaaaatggctctaaatctaacaattaagttaataaatgttccttttttaaaaaaaaaaattaacaaaatgtacgttctgttaaaagtttgataatgaaattacaannataaccttgaataattaagtgtttggtatagttatt

SEQ ID NO: 112127 - DNA, 1166 bp, Cannabis sativa
actaataaaattgtagttttaatatatatggtttttttttaaagggcccaattttaaaattttgcacgaggcccccaaaatgctggggccggccctgcataggggcaaaattgctacaacttttgagaggtgtatcccgagcaagatttcctccatttaagaagcaattgttattcatgactctagcaatattgtagtaaatcacatatggagaaaccgaaataacttggaccataccagcattaatttcgtgtattaaacaggaaataatgagaattaggatacaatttattttaccgagaaaaaattgaaataaaaggatttagataatggatatatttttataaaagaaaaaaattgacatgtttttatagcatgcatgaaaataaaatgtagagatagcaagcctttgttggcgctgctagtttgtaatataatcacattgatagaattatatttatatttctataaaaattaatactatatactgtataatatataagaatattatataaattataatttaatataatattatatatatatatatacaataagttataaaaaacaactcttcctaataatatacaatattgtattaggatgaaaaaaaatataagaagaaagaatagagtgaacaaacaactccttttatcaaaatgaagaaatcaaactctaagccatgttgttgatatcttacaaattacatatcttgtccattttaattttttaatttttctataattgctatatatatatatagggatttttttctttcaagaaaaagtaaaaatcatgcatgtacgtacgtaccaaacaatcttcagcaatgagtaacgtaaaagtaaaagctgaaagctgaagacgaaggtgatattttaagaagatttggttgataattaagatgtgaatgaagtggaaaccctccatatctagctaaaatcctaaaacgaacggtgcctttggttagctagcctgttcattttatttttccgttttgagcgggacaattacgtgtacgtgtagttaatcatgaataaattaaaataattatttatacgctttatcttacgttacagaaaattgcgcattcagtacttaattaagtgtggctaagggtctgtatctgtaactgtaagatgtgcatataatatatatatatatat

SEQ ID NO: 112128 - DNA, 14859 bp, Cannabis sativa
  modified_base (14807)..(14810): a, c, t, g, unknown or other
aataaataaatttaaataccattaatattataatttattataaataaaatattacgatatacatatatatttagtctgtaaaattaatttttttataactgaattatttttatgttattagcaataatatatatatgcattatacataaattttatgagaatggtgtacataaatgacataacgaataaaaataaataacataatgatatataaaaatatttattttaattaataaaaaatacaataaaatttattattttctaattaataaatgtatttttttaatgaataattattttatttttatgtataattaacattctataaatacaataaaaaaaatattttaattttaattttttaaaataatatataagattcctatactcaaccaaacagtataatttaattaacgggaatatgattacatattagcctacacaaccaaacacaatttacacatttctctataatcatattctcctttataatattccctataatcaaattattttgaaagcgcccttaacaaacaacaccaaggagagtaatttttctctccattccttctactctccatccttcctaccaaatatagccttattctctccttccacccaaaattccatccttccaaacatagtgtaaaacagtactggtagtagggcatcagatttgtagatcagacgattgaaaaaagaaaatatcgtattcgactttcaaatcttaggagttaaggcaaaacaccagacaatctagattcttctggaactatctaggcttgtcatcgtggtccaacccccttaaaaccataaaagaaaagaaaagaaaaaactccttcttcactaagcgcttttcttcaataatcctgctttgcttcttatcgcttcctatattggctacttaacttcaggtgagtttaatttttatttgtttaacaattgtgtggatcatttcaatcattcattttggtacttgagatcgatacttgaatatttaatttatcatttggtataagggttgttaagtatgttttacgtgatgatttcaaaatcaaaagctttgatttatttgggaaaccctagaaaacttagtgtgttttatttatgtatattaggaaatcgtaaagtaatggcggatcagtactccggtgaaggctccagtattagcaatactgctatggatagttcagattctattgtggaaatcagtatcaagacacttgactcgcagatttacaattttcgagtggataaaaatgtaagttttactagaagaagaagattatgatgatgttgttgatgatactatacagttatgtatcttgttttattttactttaccaccaactaactgcttcaggatttggaatttcagatgcttgttatgtcgtttaaggagaaaatagctaatgaaactggcgttccagttggtcagcagcggctgatttttaggggaaaggtcttaaaagatgagcatcttctttctgagtaccgtatcctaacatataaggtgtttatgtgtaatatttgtacttgcgagtttttattcaaagtagtagaccaggatgtatcattagggtccagggggatgcaaaatgggttctgcacattgtttaaatacattttctaggtgaagaggcatgttatattgcgaagtagctggtaaaaactttgaagaaatagtagtgtaagctggtgtgctgttaaatttacaattttctaggtctgtagaaaaacttaattagcacggagatgaattgttacttaggcgtgcttggaatttgaatattataaattggtgtatttgagagaactccggcacctacttactttccattcagttttatcttttaggttggtttggtgtattgtgttgttgtttcatgtaaactatccttatttggtttgatgtatcctgtcttgctttatatatatgtcttccgcatttgcttgtttattgaaaaatgtgatccttaactagtcatagatgtggaaaatggtcatacacttcatctagttgaaaggcagccaacacagtcccaagattcctccggtacaagttctggtgaaactaatggagataataataatcaaggtactgaatctgagacttgtttccattgtagcatatcaggactttagtctattgcaggaaacagtgcttattgtctggttgttagttacactttttcgtgttttcatgatttaccagcaaatgatgccaatacaggtgtttctcgtaaccgtgtgggacaaatttcacacagtgtagttcttgggacatttaatgttggggatcaaggtgaagggatggttcctgaccttagtcgggtgggtgtatttattgttcagcatctaatatttaatttttattcaaaggatttttcattcggtcctaggagctcagtattcaatgttgctgttcctttaggtaattggggcagttctgaattctattggtgttggaaaccagaaccaggctatggccaatgttgctggcactgcacagtctaatagtatggtgagcataaatgttcttaataaaattcatgattatgggtgtctgatgctgttaatttgtgatgtgttctttttcaaaaaaaaaaaaaaaagaaaatcagtgtattgttatgatatatttatttcttttctttctccctatatccaatttgcaatttatgttttttacctctgtccatattagtcttattattattattataaaatctttcagcattgtcatatcttcttcttgaagaaatgtttgtaaatgtggcagtatagacaaagtaattgagtccttgaatggatttgatgagtttaacaaaatagtgcaaatgtctcacatatgcggtacttatgctccattgtttcttttgttatctacagtcaaataatcctggtactgctcaaggaaatggatcagaagggattcatgtcaatgttggtggtcagaaccaagcaggaaaccaaccgccgcctgggcaggcattttcgactcatccatttcaatctatgcctcaagttctgcaaatccctattgctactgcatcagtgcccattccttcactaaacacggtattattcttgttgatatttagctgtgtaatgcattttaactgtgactactactcacatctccttttcttctcagccaattccaggctccttgactactctttcggagtttatgaatcgcatggagcagactttgtcgcaaactggtgattaatctagaacaactattattatattcttctcatactaaaaataaaataaaaaaataatagcacgaaatgacttttcatgtaaatgtaggttaccagccaaactcatctccaatcagtactggagatctaccaagggtcgacttaccttccaatgcccagggtttacatacaccagaagcattgggcattgttctacgtcaagcagaacggctgttgagcactcatgcagttgctgcattatctgtaataagcattttgcattacatttttcaaattttgatttaaatccaacttgattttagttcatttttaattattatgacttgtataaaagtaaggaaatacccacgggggctcaaatggttaggcatgtggtttgctcccacaacttttgaggttatatcctctccttgtacctacacataacaattgctatagtttcctagtctccaaatattgtagggttaggtgaggatcctagtttcaaaaaattatatatagtatgggtgatttcgtcatgcttctttttcattaagaacagtgtctaacgccactcatttgctaaaacggagatcatacccatttatgttgtttctgatttctgttattgtaatttgctgcaaccttgtagcatattaatatctaatgccacttaatcttttgtctcatttgctaaaatgtagattgcattatatgctacatacccatttagtttgtttctgatttgtgttgttgtaatttgctgcaaccttgtagcatattgcagggcgcttggagcaggagagagaatctactgatcctactgtgaggggtcaaatccagacagagtctatgcgagtgggagttgtaatgcaacatttaggcactcttcttcttgagcttggtcgtactgttttgactttgcggatggggcagactcctgtatgggcttataacttcttcctgttttttatatctgagtaatagttatttaatttgatgttttctatcatgcaggcagaatctattgtaaatgctggacctgctgtttatatttctccatcaggacctaaccctataatggttcaggtttgttaatgcttgcctgtagtgagagtgggttaccatcttccttttgtctttttaggtcatgctaaagattcagaattgtattctttgtttttccctcgcttacaccatctcttgatgacatagtaaaaacagatttctttggcgtattgtaaagtgaataattgataatagtggtgtcggatagtgtccagattaagaagcacttgtgagttggatgttgttcataaaagtcctctggttttagatatttagaatcagttgtgaagtggagaattaagatatatgttggcatctatgcttttctattgcttgggtttgccagcttgacattgttcttatgatttagattgtttccacacccatagtttcaacaaatggacaattttttgtgtgagaaaccagttctggttgttattattagctcttcaccttctaaaaaatgaaacatgattgttctatttttatactgcagccttttccccttcaaacaagctctctcttcagcgggtttgcccctcaattgaatcccatgaccttaggttctgctggcattggtaatgccccgagaaatgttaacattcatatacatgctggtaagacaaaatttgattgcccatcatgtagacccagttctgtaatcttttagtgcttgtgatgagattttcttggttctgccaattgtttctgcagttggtacacggggtgcaaatggagatgggctgcagggagatcgccgcagtggaactgtttctgttgattcaggtgcatcacgtgtgatacctgtaagaaatataattgctgctgctgtccctccacgctcctctggtgctgcattgcctggtgttgtatttcctgccactgttttttctccttcaagtgcatctgcttcacagcaagctactaacactgattcactgtcctctcttttagcagaagtaaattcgcaaattagaaatttggttggtaacatgcaaggagataacctggttcagtcaggtagctgaacttcatagctcatattgctaactagaataaaataatattcacttggagaaaaagaaaaagaaaaacgtatggtccctggctgattattttcgccttcaggtcaagaagatccaaataatcagaattcacatattccctctggtagtcgtgatgcagagaatgagcattctgattcaccagcagttaatgtagatggagaatccaatgtctcgttgcctgggtgtataccagaacaagcccgtgaggtacactttgcatgctggatcgaaaccttcatttatttgatttcatttgaggcgtattttgggtttggactagccataaccctaacctgagaacaatcaaattggtattttcaggatgcaggtgttgtttctgatttaaaagaggatttgacacacgtcgatacagaacatcagagttctgcaagtggacgaagaatggagaagaatgtagaagttcataaagaaaattgtccaagggacattgagaaggcagatgggaatgatgcttctaaagttgttcctcttggattaggacttggaggtttggaacgcaaggtaaataaatccttctttatttgtaattgtaattgtaattggccatataatataagtggaactaaatcatttattttctttttcttttttatattgtgctacacataattgctggtgtactaaacttatagagctagctttgttaaagtatgtgttgtacttggctgctacaatagtttgctttgctaatttcatgggtaaactgttttagattatcctatttagatcttcatattgaatatctgctgtcattaagctacaattagattgcttagtttattcttttttttttgttttttaaatgaataaatcagagacgtgcccgcactcagccactaaaatcactggcccaaagtgtagacagtggcacaactagtacttctgctaatcaaagtcaacaaatgagaaccgaccaacaggtctcaggacatccttcctctgtggttcagctggccagagatggtgaacctttgggcggcgtaggttctgctggccaagatgatcttgctactgttatgtctcaggttctgcaaagtcctgctctgaatggtatgctgtctggcgtttctgagcaaactggtgtggggtctccagatgccttgaggaatatgttgcagcagttcacacaaagcccacaaatgagaaatgtagtaaatcaaattgctcagcaggttgacggtcaggatgttgggaacatgtttacaggactgggaggccaaggtggtggacttgatttttcaaggatgtttcaacagatgatgcccattgtgtctcgagcccttggaagtacagggtctactgctccacaaccagtctctgttgcggagccccaagcattgccacagtacaatcaaaggaatttaagcggaaatgaaaacaatgaccagtatttgcaggtttgtatgctacttcaagtcttattagaagtttctagcgtgggtatcttattctgctttctgaatgttatacttcattagtctgattctgaaattatcttctacaagtacaaacttggagtcttctttttttgtcactagtgttatctaggaattttgacaagtatttctctttcgtttttaattttgaaattttgagttaaatatgaatgaactgaaattacgaatcaaagaacaaagaatttgaagtatgattccaaagaaaataaaaatgaaacaaatggaagaagaaaagtggtatggatttacaaaattacgtggaaaataggatacaattggaggattgaaccctagaccattctcacacccaagtacaaaatgtgtaatatagttttcggtattgatcatcagttttttgtacactcaaattaatggcagtgcactttcgatgttacgttcacagaagtaaaatatgtcaaggcatctggatctcgtttaagagtttcatattggcaataatttttctgcttcaaaattctattacaggctctttatttgtgtcattatctgtatttgtgagtactttttcttttattaagagtaaactgttattttaccttcatttatctactttgttttaggatgaccttcaatcagtgactgaaaagattgaaaacatgagtgaaccggaagacatttttcattcactagttgaaaactcacttaggttatctggagttgaaaatggccctgaaggacttgttgatgagctgtgcagcaacgagagccttgttaaagtaagtagcctttgattttggttgaatattttgaatagtgataagtgtgtatagtgactatccgaatgtttcggatcagtaatgattttaactatccgagtcggatcagatcagagtcggatcagatccgacccgccccattgacattcctagtatagtccatgtttattctatggtgataattgaactttttgctgtgattttaacttgtgcaggaatatctagagttattacgagacgaaatcggtcagcggtttcagagtgatttggaggacaagtgctagcgtttgtttggcttgaaggatttgagttagatttgcccatttggatatttgctttgtgggataactcgaaatctgttttacaagtagatactcccagttgaaggatttaaaagaaactcttgatactttttgtacaaaataggattagggcttgatgtgctctaagttatttaagcaggccatccatgttttgggttgtattgtgattcattttcagaaactagtaatcaattatatttggtcataatctatataaggctaaatactttctggaagacaacaggtttgcctctcttttttaactgcatgtggaacgatgtgcatatctacttaaattgcaagttcaattgtttggacttattggagtctacaaaaaaacttgatgtttaattttactggagaagaaattctttatccatttattaatttattgtttcgtttttgtcttaataacattatcgatgacttgatataagataataaaggcatttggttggttggaaaatggtggaatgagaatagaataacttagttggcgtttggttgggaggaatgaaaacataggaataagaaaggaatagaataaattttaaaatgcattaaaaaaaattgataaaaaagttattaaattttttctcatcatatattcgaaagatttttctttctatttcaaaatagaattgtcattctactaaaatggtagaaagaccatttcaaccctttaatatgtaaccaaacaaaagaatggaattgagattgtttcttttctattccattccatttcattacctccaaccaaacaacctccattctataataatttattgtttggttcgaatattagaataacagaatatgaaactaaaatatttttttttttcatgagaaattataaaatttttgttttataaatggaagaaattataaacaacatccatacaataaaagctaaagcaagttcagaacttaagcaatcaaatttaattttaagagcattttcaatcgacacactaaatttggtcttacattaaaactaaatttagtgttaaaaactctttccactctaactataacactaaaaattaaattaaaaaaatattcattattattatattaattttttaataaatataaataatatatacaaataaaaaagtatgtttaatcttatgtaagataaaataataatataaagtagtgtaaaatgttttttgtagttctctacatgacatatatatgccgtatactttgatgtatacatcaaatttaatgtcaaaatagtgctatattggaggagagattggactgtatatatttggtgttactttgcagatgctctaatgcctacaaaagcttaagcaagcttagaactgggaacactaccaactctttacaacactaacaattagcttatctttcaaggatgaaaaatgggagaaaaaaaacttttgaagagaaaaatggagagaattaaaaatcaaggttgtttggtattagagaaatgaaagaaaagtggagagaaaaatatattgggacccacccaaaaagtttcctcccacacttggagagaaaactagagagacattgtgttagaattttaaattattaaaacaaccttgtaatttttaattttagtttccctataatattaaatattatgcttttatataaatattatttttttattttgaatttttcaatattgtatttttactttcttaaaaaaaatccaagttatcactttttatttttaatttcacaattttaacctcaaaaattgtcatacatattacatccatttattttcaaacttatttatgttaaattatgataaaaaaaaaatataaataattatgtaattttttataaaaaaagaatgtggaaaatatataattttaaatatgagtaatacatactttttatgaaaaataaaataaatagtatgagtaatacataaatataaaaataaaaattgattacatgtaaatattaatataagggtaaaaatgttaagaatattttctttcctctcaattttaactcacataccaaacaaaggaaataaaataactttctttcctctcttttatttcctttatttttctttccctcatatatttcctatccttcctattttctttccaccctgccaaacataaggtaaaaaaaagatcacaaaatttgtggacaaaatattaaataagaatcacatcaacaataatatatcaaaactttgtaatttaaatataagaagaaaaaaaaatgacaaacttaacatacttaaagccaaagtatgtatcagtgacactaaatggagcttgaacattaaggtagtggttgagaagaagctcagcgtaacatcgaggggctggagtgatgagatctgtgcaagtcgtattatttaaattacaaaactttatagtagcgttttgttagagataatgaaatagaatagaatagaatagaaaagaaataattttcatttcattcttttgtttagttacattttaatatattggaatattattctaacataatactctttctaccattttggtataatgactctaagaaaagaccattctaatgttagattaaaaaaataataatattttattattaattttttatacgtttttaaattttattttattatattcttattttaattcgtatttttattttatttttatatttttattttttccaattaaatatcacctaaaaggagtaaaaaggttgataaaataatgtaagggtatgtttagaatgagggaaatatttatggagagagaagaaaggagagacgtggtgggagagacaaattctatttgtttggcattaaggattgtgggagggagagacaaattctatatggccccaccagtttaaatccctccacaaatagaaggattttcactgagcattgggtactagtagtgtgtagcacaatttataggtgacgttctatgattgattattgattaacgatattttctaaaagttattgtcttaagttttatgagacctgatacttaactacactaacagtagtataatactgaggaggatactaaacataaataatctcttttagcatttctttttatctcctttctaattcatttcaaaattacaaatacaacataataaaaaatcattagaaaatatttaaatgaataataatgtaatttttataagtatatagtaacgagataatttaaaaaaaaaaaaatacaaaaacaacaaaaaagtataaaaatacgatctgtacggaatttttaatatttttgtgattttttaaatttcatttacataaaatatgatctttaggtatatttttgtgttatattcttattattttattgtttttttttttggaagaatattattttattgttgatttgttgttatttgtatattatattgtctcttactttattgttattttgatattatttttttttggttacttttatattatttttttgtatttttataaaataccgtaaaaaataaataaaaaattaattacaaaaattaatattttctggaagtaggaaaatctatcccttcacctctctacctttgtaaacagtttggagggattacattctgcaactctccatccttcgtattttccatccatccataaaaatagagaagaaaaaaaaacacacacacacgcacattctctcctctgttctcttcgccccgctcgcgattgaagaaattttcttccactatattggtattggcggtcaatcacttccaatcagccaccgcactctacaccgtaaatgcctctttctctcatgtatagtttatatacggtattattgggatttactggaatttatatgttacatacagtatagggtcattggggtttgatttctgaatatgtctttgatgtttcttaatatgggaaattacgtctaaggttaatattatgttgttgtagtagttgacatatatggtgtttgataaaatgactgtgtgaatattattggtttatatgttttaattaaatatattgttactatacttcttttattccttctcgcctttcatttcttagtgatacatgcctttggttaatcatgttatcatacagaatgaactttgatttatctctttttgtgactaattcccagttttgttcaagtttcggagggctgttataattcattcgttggtagatgctagatttctaagccattcttttaggatattttgccttcgataatttttctgttggataaaattgtgtttaaatatattttaggattgccttacattcacctaattatgtgtattgcatgcccaatacttatttagtttggttgtcatgttagttgaattgaaatttttatattacttacatgctccatccatgctctcttaggtgatttggtacagtttttactctaatttactactaattcccttaatctcaactcctctcaactaaaacccaccaagtgaaccataagtttaatcatttccctaagagccccttttgcttctaaggttgcgtttggttggaggtaatgaaattgaatagaacggaaaggaattaattttcacttcatttctttgtttggttgaattttaaagcactggaattttattctaatggaatgacttttctatagtggaattactattccattttgaaatagaaggaaaaaccattgagaaaaattacaatagtttttttatcaattttcattttatgtgttttaaattttattttattcctattctcattctcattcctattcttatttttttagtcctcccaacctaacgcaatctaattttcaactggactttgttgaccccttttttcacaattaactcccaagtaagaatttcaggcaagtgagagttggagatcctacaatccaagttgggttgcttctttcaccactgaatctgatggagttagaatcgagtgcaaaggaagaagaaaatgtgataattgaaagttacaatagtcaaagtatgaagacggcaaggttgatgtcatcactaacactggctgctcttctggaagatccaattctggctgatgtctccaataacccgactttattggaagtagataccctcataagcctcgagttgggtagtgccatgcggatcaccatcctcaagcttgatgacacttcttttggtactttatttctgtcatatccagtttttcttcaactagatattttctaggaaaacatgtaatgaagaacatctgttcaaagctaataataatactagtaggctcggctcatttaactgataatggaatcatttgtatgtatatattttttatttttggcaagatgtggcagtgatgaattctgctactgtcaaggatcttaagcttgcaatcaagcaaaatgtaaatgaggtggagcaatccaatatgggacatcgtcatatttcatggttagttttgtaaatttactagtttttcctctcttgttagttgatgctagtaaacaattgtttttgaagggataattgccatttctttaattgtacttctgtggtttttcttttttgctggaacaaaattcacttctatcgtttttctttactttgttgtttttgtactgttgtcgttatttatcgtgttttgtttaaaatggttaggattaatcgtcattaatttgaacatgtaggaagcatgtatgggggaattcttgcctatcataccagaacgagaagctactagatgacaaggccaaacttcaagattttggcatacggaacaactcaaaggtttcttatctatgtatcctttattttttatatggccttccgttttctagaagaatttgctttgtttcgaaagggaaaagattgaaacattttttaatatctgcaggtacagtttgtcccttacgtagtgtcaaagaatacgcgacgacattcaaagagaaagaaacaccgtttctttcatggccttaacaagcgtgctatcggtaaatcctagtgttgaatgttcagtatatttctattatggaaaacttgtgatacccctgcaatggtagtttgatttttttgtatatgtatgtgttattgtttgatgagactgctattgcttataaatcttgtccaaatgtttgtcatgtgtagttagtttagtgatactttgaatagttgagaattgaggtgccaggtgattgaagaatgttgtcattgtctatactataaaatacccaactagctttagaagatttattggtcttttattgtgaagcactattctgaagagtaagctggacttgagtattgtggttaggcgggtttctgttgaccgaacctcactcatctcgggtcgtctttaagcattcctctatgaattttagaagaaatttaatcaaatccataagaaattttaagataataaacatgctcttagtttttggttgccaatgtttcgtttgtttgtgcttcttttgaaaactatagagcagcaatcaaccaacataaatataatgagcatttttgcctttctgtagctgtttccatggtttcatttcactagaaattggtgagttgtaaatgtaaaccgcgttactttccttctttctctttgatttgtggctgtggggccaacctaaaggtcctaaactagtatgcaagtagccgcatctttaacatgccatgtggcttcttaatcaaaccattatttgttttattttttatgtatatagatagtgatctaaagagaatcactaaaagttctcactggtctttagtattttcttcggtgttatattgttattggtgtaattaaatatcgggtctcatataaattaaagaatagcttttagagaatatcgttaaccaatcatgcggtgccactggtgcccaaaatggtctaatttaaaacagccctactttctagatataaatttatatatatatatatatatgagcattgctattnnnnaccagtagtgcctagcaccttctcgacatgtcgcgttgcgattggctgg

SEQ ID NO: 112129 - DNA, 3099 bp, Cannabis sativa
ttttttttttttttttcttaagatttaaaatctcttttacatgttttaagcattgttttgttttatgtatgtgattttcagggtgggaaaaacttctctgatgaaccagtatcttttacataagaataataataataacaaaggaagttgtcttttaagtctggttggattccttcactatttattttcgttttggaagatattaattcatcttctttggttagttaatgaattctattaacaacatgtcaatataagcaggaaatatgatctaaaagggagttgttacttccacttgcatttgtagaatgttatgttggtaataataatattgcccagaaagtataaagttgcgttttggaatataggtaggagacttaagacttttctggtatagaaagtgacaaagggatgagatttggtgattttgatggctattgtttaataattgaaaggctatgattataaaaagtatatttccgcttgatgccaatattgattagttgtttatgattataaaaatattttctccagtttgatgaacttttagtccataaaataaaactcatctgaagtgtttttttttttttttttggatccaaatccacttcttgtcttgttttgtcaattgataataaaaataaaatttaaaagggccatctgaatcaggtgtcattcagaaaatatatctctgtcaatcaagttgatcttaactactttattagatatgtatataagaagttcagtcaacaatataaacctacaattggtgctgatttcatgacaaaggagttacagcttgatgacaagttggtgaccttgcaagtgagtgaatattactacatttgtatactaaaaacattgcatgatgtttttctttgttcacttcatttgtgttttctcttgtaactgtcagatttgggacacagcaggacaggaaaggtttcaaagcctcggttctgcgttttatagaggagcagattgttgtgttcttgtatttgatataaatattcttaggacatttgagacattgcacaactggcatgatgaatttcttaaacaggtctgttaagatatgtgaagatgtgaagttgtatttactatataaaagaaatttctctgctagtttggttcataaatttatactggtcttgtttctaacacttcattactgattttcaggccgatccaacacgccctgaaatctttccttttgtgttagttggaaacaaggtggacttggatggtggacatagccgaatggtacacatgagatttttctagtcctttttctagtattgaactgataaaatctaaattttcattgacataatgatgattgatgagcaggtgtctgaaaagaaagctagggaatggtgtgcttcaaagggtaacataccatactttgagacgtcggccaaggaggattacaatcttgatgacgtgtttctttgtgctgcgaaaatttctctagacaatgaacaagaacaagacatgtaagccaatttttacaaacaagtgcaactttttctttttctacatcagttctactatccaaagatcatattttttgttgacaaattagaatttttacaccctgaactttgacatgtaccaaatcatgtctcttgaacttttttgaccgttaaaaattctttctgaacacaatctcaatagttcaggggaaattttaaccgtcttcaaagtttaggcggtatgatttagtacatgtcaaagttgggggtaaaaattctaattagtcttttttgtttttatgcctcaaaaacataggagatgaacacaaatttgtactattttttattattattattttctcttttctaaattgttatagttcaacttggtgtacttctttctaaccagcttttctacctctatctaatgttgcagttactgccaaggtatctcagaaaccatctcagatgtagaacaaagcagaggttgttcatgctaaataatacgctgactaataagtaataactggatctatctatccatctaatttggactatttctttgtaaatttgttgtgatttattcattctttcctggatgggactaagttcttgattacttcttttaactacaatccgtcgaatagacgataagtttgattttccctacatggaaagcaaggtgatgatccagtttgtggaaaacaccaaccatgttcaaagactcaataagccataaaattgtattcccttgcatggataatgctatgcagatttggatttgtgcttcttcttttcttttccttttctaatttttttctctattattccttttgatttcattttatgaaatgtctttaatgtatgagtatgcctctatagaatactggtaaacagatccaaagatccaaatccagtacaataaaattaataagaattgtttttttttttccttttgaataaatatgtattttgtcttctgaactttgttactaggaagatcgtgttaaatatttcccttaattttaaacgttagtaatttatgaggcacatgttatcgtatcttcaagatttcattaaacacattaatgtggcattacatcatggatacattttattttactgtacatgttttgtttttgaaagccattttactatacatgttgatgtgtccaacaccatatcattgattatgtggcaaaaataattgaaaagaaaaaaaatagatattaatgaaatcagaaacaaataaaaatgaaactaaacacctaattattataaaaataaaaaaaaaaaaaaattgaagattgtaaagtctttttttggcaatttagatgctaaaatattttttatttatggtaagatttatttgtgctttcaatctgattttatcacctttaatattcggttttattgctcttttctatcttaggaaagattgatttttcagcttgctttttcttgtatggaaacttctcgtaagagaagcaattctcttatagaaagttagtttttaaaagaaactttgactattatcttttttcttaataaagttcgagtgtgtcttgattatatcagatcatacacactgtttatggcaggtatcaagactcaatacaagatc

SEQ ID NO: 112130 - DNA, 2076 bp, Cannabis sativa
  modified_base (67)..(70): a, c, t, g, unknown or other
ttaataccacatatagttttatataaaactattgcataaaatacaatttaatataatacaatacaannnnatacgacttaatacggcgttccaaacattgtactaagtttcatattcttgttgtgagtgctatggaatttttaaaaaatttattatttttcatataaaaatttacataatagacttaaaatttaaaataaattacaaaaatacattaacacaaaaaaaagttcatatttaaaccgtttttatttacaaaaaataaaaagaaaattacaataaaaatttatttacaaaaatacctcttcaaataaacggtttttttattattttaaggtttaataattgttttattacaatttataacttatttatgtttgatttataattgtcgtgaagttgatttctggttttttctaattgttttttttttattatttttagtgagcaaagtatttttttttttttgtaattttaaattaaattttacaaatatatttttgtaattaaaaattttaggccataaaattataaataaacataaaataaataaaaaattcctttacttattgttttatatttttttaaaaagtaataattatataatgtttcaatcatgcgatttcttaataaggaaagataaatgagtaaacgtatataaagtttccttggcacttatatttggttctacacatatgttacgatgcaactaacagtcctaagtaagctgtttacgcccatgcgacgtaagagtttttggcactgagtccgcattttttggcactttcttattatgtaaatgttagacaaaaattacttttaccaaatatatatgtgtagatataaagagagatgagagagtacgtatgatgatgaaaatgatatagctaattaagtaagttattacataataaataaaccacaatatatattataaataaatatatagtagattatgtaataaattaatggagttttttaatttttacactttaaaatagtttttttcatttttacaaaattttacatagaaattcttattgcaactagcattgtaatctaaattgcaataaaaattcgtatagaaatccttattgcaactagcgctgcaaccaatttagaaactcaaatcgtaaattttaaaaaaataataataataatattaaaaaaatagtatatagagtaattttaataaattaatttattatatatgtatgtatgttatatttgttgtaggcactaagcaatggaaaatacaagagtagtctgcacagggcagtggtgaacaaatacaaggagagaaaatcaatggcattctttctgtgcccaaaagaagacaaggtggtaaggccccccaaggaacttttgttgggagaagaaacaagactgtacccaaacttcacatggtccgaattgcttcatttcgttaaacatttttacagatctgataacgctaccttccaaaacttcatcaaccgccagctgccactgcccacctccttcgattgatattttcaattatcttggatttggattttgtctttaactagattatgtcactctatctagggacgcataggccacctgtcctttctttattcacccacccaattaaataaggctttcatgcccaccaacaataaataggccaagtcagctagctagatatagtgacttcttccatgggaagatttttgttttttttaaaaaaaaaataaataaaatgctaaattgatcagcacttctttcaattctcactatgaattttttgtactggcctcaaaattgaaatagaacaatcctttataatgtttaaaatttcttttccaacaaagaaaaaaatacacaaaaaattactgaggtattatacattgaataaaaattattgattttaattatgatcaattatcatacaatggtccgagtttttgatcgtccactgtctcacacttctctctctcctgggttgacctctttctccctgagtctttgtcgtcggggaggtgggaattaggggtgttcgcggtgcgggtggtacggtttaggggtgttcgcggtgcgggtggtgcagttttt

SEQ ID NO: 112131 - DNA, 1751 bp, Cannabis sativa
ataattcctcaattaactcataattatctcattagggttttgctaatccttttcttaattccgggtattacaccttcacctcttctaattttacaggaaggtcgcactcaggggttggttcattttttggaatggtgtccaatgcctcctcaggttgaaatgtcaccacgggaccctcggtttgatcctatccccctgaagatcttttgacaaatggaatagattcaccttcaacagatgtggccgcacttgcgagaaagtcttgattcaagtccattgctatgaaggaaaaagcaaaccttttgaaacaactgatggacgcaagtatggaatttatttcgttcacactatcctgctctttggcgtaggaagaatcctagccctaacataaacagaagcctactgtcccaaatgtcaaataccaaaaaatcagataaggggttagtgaacttacttgtcgaatcagaaggggtgactggcgcatcaagaaaacctgcttgaaatctccaaagccagttgatgcagcggtcacagttaacctgaatgtcaaacgcttcgcctaatgtagaacttttccagtccaattgaagcggtgtgatgtctaggagaagctctgcgtggatgatgagtgatcgttggatcaggctctttaacacttcttgcatgtcaaagatggctggagaagaaaaagaggttatagagaaaatatggaccctcgagcaaataaagtaaaaagaatgccaccacaggtgatttatattttaaaaagaaaacaagcctatcaaagctcgacggttcagattctcacaatagatccaatggctagggaaatgagaagtcccgtacggtcagcttagggcccacaaaaatgtaaaggtccctttctacgcttcatttagccgctagttgcactcaaccttttttgttaaacgcaccttgccacgcgcaaacaggggtagacaagacttcttaaaattctatgtgataactacgcaaaagaaggtaaatgtcatatgtagcctcagtagaatacagcttatgtgggggtgtatctgggacctaaatctttagcacttgttaacagttaacactgggagcagtagcaagctcctgtgatccaaagaatctcgaaagcttcgggggtaaatattatcaaagttttcattaacaagacacatggcatgatcagagggaagaatacaaccacgacaaaagttatttgaggtaaccaagaaaagaaacgtctcccagacctagaaggtaatgagagacgatgacctccgggagtgacgtcttttagtaaaggacctgaagcgcgataaaggacttgtagacattggccacgtcagcatcctataaaaatcactccatgcacgattacacctttatttgagacaggaccagattttgtcccccatgccagatcatggtagcgcacgtatgcaccctaaaatatgcttctttttcccaatggcctagctagagagtattttacaaaggagagatcttcgcgcgatgcgtgtcttggatcatacaaaagtccttacaagcagctgtacacaacacgatgaagagggttcttaccagccaatggtcagatcgtcctttagcagtattgaccttggtggcgtatagagtatgaaatgttgggttttgtgccctaaataaaacacattacaatctgataagctatcaatatagaattttgaagtgatttatgtatgtatgttacatgtttatggtttactata

SEQ ID NO: 112132 - DNA, 2071 bp, Cannabis sativa
  modified_base (664)..(672): a, c, t, g, unknown or other
  modified_base (1991)..(2014): a, c, t, g, unknown or other
atagaacatgattttgaaaaatattttcacttttctacttttaaaaacagaaaactgattaaaaaagtgttactaaacgccaactaaaatatttaaaatgtgatattaaataataagactatttatgacacctattttttggtttattattatttgttttaaacatggttttcattgttttatttattccattgaaaaatgacagtaatttttcgttgtggttgagttgaacttgatgttgatatattgtctctcatattgttttgtactggagatattttcaattcatgtaacattcaataatgtatgtacgtgaatggttataaatgtaatttaatattactaacaactcataaagagtcggttgcctattagaatttacacatttgggagaaaaagtagttttattgatttgaatgaagattacagaagagatcaggagcctttatatatagggtcttgattaaaacgagataaactaaataacagaaaaaggaaggtgaagaatcattaactaacctaaccaatctaactaactaactaactaactaatttaataggtcaaccacttgaggctagctcaagtggccatagggagtgtatgtatgttggaggtcctgagttcgagtctcaagttacgcatgatgtaatatataaacgcttnnnnnnnnnaaaaaaaaaaaaactaatttaataggtcctttaagatggagtgtaaaaaaatttcacacccatcttgaatacaatatcattaaaatgagtaggcaacaaacatttagtaaatatgtcagctagattggtcttagaggagatatttttcatcttcatagtgttatttgtgactttttctctaacaatatggtaatctatttccacatattttgtgtgtttatagtatacggggtttttaaagatgtattgttgtattattatcacaatagaggatataagaaaggatgatgtcgatattgaaatgtttgatgatggagatgagccaagtaagctcacgtcatgttcgccattgcctgtactcgactcagcagaagagtgagatatagttggttgttttataaatttccatgagatgagtgagtggcctagaaaaatgcagtaatcagaaattgatcgtcgagtatccatataggcaccctaatcaacaccagcaaaagcttttagttagagtggcattgaggtagcggcatagtaaaagagaccttgaccagatcacccttttagatattataaaattctataggcagcttgtaagtgttgttgtcgaggggactgaagatactaccttaatttgttaacatcaaaactactgtcgggtcttgttattatgaggtagagaagcttgccgattagactcctatattgagtgggatcaggcaatggtggtcctgaatccttgtgcaacttgatgtttggtttcataggtgtggatacaggtttagttccaaaaaactcgatttttgtaaaaagtgtagggtgaaaggttgtcgtgtgactaaaatacctttgttgcagtgacctattttaaggcctaaagaaaaatggtaagtcaccaagatcttcaagtttaaactgagcatcaagagtagaaatgaaagtgattagtgtagcagtattgttagtggaaactataatgtcatcatataaataagtaatgccaagaaaatatttgattcctgtctaaagaatagagagcaataatttttggattgtataaagccctgttttaatataatggtgttgagtttagcataccaatatcatgataattattttaaaccatatagaatcttttttaatttgcatacaatatttggaggtatcactccctttgagggggtgtaaccttaaggtcttttcatgcaaacatcctcatttgattttccatggaaaaaatggttgtttatatccatgtgatgtaaatgcaaatttttaatggcagcaagggaaaataatagttttagggctcgtttggaacnnnnnnnnnnnnnnnnnnnnnnnntattatattatattgaattggattatacatcatatttttatataatactatgttaaa

SEQ ID NO: 112133 - DNA, 6069 bp, Cannabis sativa
aatgattgcttgaagtctatcacatgcctagtggggtttcacacctttggtcttgaacgtgaaaccatttcttgaattttagtgcgactttagacttgcttcacggaagccaaagtctgccacataattcaacatggttgtcataggcccgtgtgtttttaccgtgcgagaaatatcactaggggtttgatacgtcttcaaccctccttcttgaagagaaggattgcttgaagtctatcacacgcgctgtggggtttcaaacctttggtctttaatgtgaaaccattgcttgaattttattgcaacttcagccttccttcaccttcacgaaagccaaattctgccacataattcaagatggttctcaccggcacatgtgtttttacctccgggaaagatcacttggggttcgatgcgtcttcaacactccttcccgaagagaaggattgcttaaagtctatcacatgctgggtttcacatctttggtcttgaatatgaaaccatttcttgaatttttgtgggacttcatcctttcttcacggatgctaaagtccaccacataattctacaaggtttccataggcatgtgtgcactcgctgtgtagtttctatcttgctgacggacctttttccaaactttttgtcaaaaatattgcttgggggtccgacgcgtcttcaaccctcccttcaagaggaaggaactgcttgaagtccatcgtgcgcccaacgtagttttcacctgtagttttgagcatgaagcccttgcttgaatttttgtgtgaccaaagccttccctcgcggaagctgtgagaccattgttaaattaacccagccctcaccactgtttggaaaaagcccttcacggatagcactagatggagaggacacgaatggggtatcagtgtaagtctgttggggcctcccaaaaatgggccagctagcactttggcgcatgttattacccagattatgttttaaacaaatgatcgagaatttgagggtgtccaaaattcttagctcatttgggggtgttatgcttggtagtgtataccctaagaaatggatgatgcaaggaaggccttgtctgcttgaaaaggtctggaataagaaaatctgcttgaaagtgttatcacggttccagcccaattcttggataaggagtgactcctagaatcgataacatttttaaccagtactctagggacctaatttcacaaggagcaaaagttggagaacacttagaatgtgaaagttttcccattcgcagagtaaaccatcttcgactagcatctcgtgagcaacaccgtgaaaaggcagttaattatcaaagacatatgaaaagcactaaggctatgcgaccatttgatggaccgggaaaaatttagtaacctgctcgtaatgtcaaaatacttgattagtcgaggttcgcactgactaaaaagagactatgggtgatcctacctaaaaaatatgaaattaagtgtttggactgttcctaaatcaactgagggattaaaaactggtgaaaaggtttggcgtgttggtctttgtaaccacacacttcaaaacaacctaacgtgacaacccttaaaatagtctaacaagccaacgaatcaagagtaaagcttaaaagaaaggtataaagtcataaagttattacaaatgcccccgcatttatggcacaattaaattttctccgcaaaatgagaaagttaaagaaggaaacagttattgaaagaaacagaacaatcctagtctcaggaaggaccaccacctgggccggtcgcttagaggtgggtgctactagattgatgggaagattttacccctggcatcctctccatggtctctttgtaaagacaatgaacggctctcatacgccatatgagacgagtttgttgggcatagctatcttccaacaactgattatctttctttaagccttcaatcttagtcttggcttttgcgagttcggcaggaagagtcttcttggctttatgcacttcgcggttgtcacccttaacatgctgaagctccatgaccagcgtgccaacctcttctgtggcccttttggccaacaaagcaacctgttgcaataaggaaaaataagaaaggtagaaacaatggcagaagttgaaatagaaaagttcaaaaccctaacccaattgcttgttatttggtagcgtgagctagggaaaaggcatcaatgttgacgcaagttgcccaggcctcaaagggcaacctagacccatcgtcggccacttagtccaaaagctccactacaaaaggcacagtctcactccccacattgggagccaagcatttctctggggcctctacacaaatttttgtcctggtcgagactgaggcatggaagccctccaagacttcggcgctcctcacgactgagagtatgtcagcccgcctatgcaaaaatcccttttcatcctcaagagattcatccaaagctcttttaatctcgccttccttctgcatagcaacgtggtcgagaagtacagtttttatggggaacgtgaatcccacagaggggattttttgaagagaagatgggggtgtaggcggtgttggccttgcaaagacggctgaacatgatgatgggggtggttcccatgggattatggtgcagacgaggacgtagcaagaaaggcagtgtattgccttttcctcttcccacgaggactgttgttgccatctgcatttgaagaaccaatgtccccttttgggcctagcatgattaatcaaaaagcatctgcatgagcagttaatatggaggtaagttggtctgcatagatcaaactgccaagtttctctttttacaacaggccacacaaatgagatcgacctcctcagagaatagagactcgtatacagtatacaccatttcagcctcaatatattttgcgataagtatgaagtttaatgcaagtaataaaaaacactttctaaatgattgacaaggatgttacgagggatggctcaactacaccgtgtccggttatgtgcacgactgaggatggtgtgattgatcgagctttgcaaagtaaaaattaagatgacataaggagtttggtgagaagagagaaaagtttgaaacttaaaaggtgatgagaattttgtgggcatttaatatgtaccaggaggagtgccttccacacaaagcgaacgacatagatcattcaccaaaatggcatctgaagatctcatggatggggagctgagaagactgcattggcccaagcatttgacatccattatgacacgtcttgtgaaaagtgtttattaagtgaagggtctattcaatcaacttgccaccattttgatgtctcccgagacatgccctaacatgcaagaattgtaagattcggcatttaatacactgacagtttatgatgctaatgatatcctccgtcagtgacgtatcagctgacgaccacttgcatttcatgatgacatcacaaagcagccccacgtgtcaaaggttaatcatgaggaaacaatgcaagcccccggaccatggatcgtcctgaaagcttggggagtaaatgttgtccatattttgcaggcatgacatgcagaatctaatcgaggaagctaagataatcatcagttggtcaatggcttcggacccacctcccacaaggggcattcacaaaggatacctcctttgcaaggttggaacacgtggagtatcaatgcacatgacatctctaagtcttgggagtagaatccaagcaccctgcggaggctggggagttcctcaagtacgcctaggtgggttgtggaaggacttacaatgagttgtatccccgtacaatgtttcaggagagctccgtcagtacctgtcaaattacagaagtgatgtccatgctctttttggtacgacgcaaggttttgtcccccacgtcaggccatagtacaaggcatgcgcaccatcgtacttgcctatggtctagcggccattcgtaggggcattccaaaaaggaaaggtctttaagtgacacgtatggaatgtccaaatggtatgggttgttatctcgacacaccgtatgatggagcggccacctaccagatcaataattggatctcttctagcaagagcagcccagaatgcacgtgaatgaagagatcgcctataaatacccctacatttcacgagataggggatgactctagggagtctaatgaacaaagttttacttactaaaactctaatgaaattccaagagagcttcttcttcaagaggaacaagaggaatatagagttcaattctgtaatgtaaacatttgtaatattcatacttactgataaggccaataaaatagactcgtggactaaaaatagttaacgcctgaaccacgtaaaaagccctatgtttattattattttttttatttctttctccagttctaattaattagttttcgaaaatctcggtaaatattggccagcccaagtggacaaatattcacaatgatctcgacccttaaagtttctctcttcaatgatttactatctcgctactattggagcttgaattaataggtttcaagttgaaaattgaagaaaatgaatagagggagaagagggtttcatcacacgaaggaaaggggagggtttcgttctataaattttgttcttaaaagttaatctatatatattatcatataagttttaaaaaaaattaataataataatataatattaataaaacttaattattaataataattattttatcatatcttaatcactaagaaatctttagtcctaggatattatgtcaactccgagtaccctaaaatatataaacaagtctataatcaatttatttcaagaatcccatcaatactactaactaaaatcattgtgacattgttagcctacaatcgggtctccagggtcgccaaacctgaaaatatttttatttcacaaataacttacattatatccacatattccaaattaatctacgtaattaataaattaggtttatttattcacttatagcaaaattgataatttatactaaattagcttagtaggaccataatccttctcattactacctaattaacccataatacaataacaaaccctaaatattcataatacgtctttgggatattacaaccatcccctcttaatagaaattttgtcctcaaaattcacttgaaaattttatgatactgctctttcatttacgactctaactctcaagttgtttcttcaaccttgttgtttctctagagcacttttaactagtggaattatcttattccaatgtactttctcttccgagtccaaaacctggacaagattttcccaatataaaaatttttcttaagctcaaagttgtcacaacttaaaacatgggttgggtctgaaacatactttctcagcatggagatattaaacacattatacacttcgaacaacgcaggaatcaaagctagctgatagcctgcttggcctacttactcaaatatctataggtctaaggaatctagggtttaactttccttcctacgtatccctctcataggcaatactcgtataaaaaaagaatctcccatttgggacttgatattcctaccctttgaatcagcgaagcttttctgtgtactagatgaggtgagtatatagctcaaatttactctataaccttataagttccttgtatctttcttgtctatcgtattcttttctcacctgcttcattctagtgaataggtgccccatatttctctcgtaccacccttattgagtgcctaaccaatggtacatctaattattacttttaaacgaacactctgtcacggggagattattctaagataatctaacctttatcaaatatgtctacagcatgttttctaatattctattaatcttctcagattacccacccttcaagaatgaaaaattgtattatttttgctttaattcagaaattagcatataattagaatttaattatggaaattatttattaattctaaattattaatttatgattatttatttgaattcagaatgcattgtatatg

SEQ ID NO: 112134 - DNA, 2297 bp, Cannabis sativa
atatatatatatttaatttttatgtttcttttaccaaaaatcccatactacctagataggcattctcatcgacttcttaagcaccatcatcgtccaaaccaaagaggccagggaccttgccaagctggccaaaaccaagaataaatttagaacatcttctcagaccaaagcaaagcaccagcacccccaactaaggtgccagaggctattctagatgtttaggtttgggaagctacttttggatctcaagtccaagaggtggcagtggaaggtcatgcctaggaggaaactgctcttcatgtggaacctttgcatcaggtttcacttcctattcaataagtcatcactattgaaaaagatgatgaagaggatggaaaaggaatggtcttcaataggaagaggctagggtccaacattgacaaggaaggcaagaaattaaagggggaggctatttaacaactaagctaacgccataaaaataaaagagaggaagttgaacggagagaggcggagcagagggaaatcaagaggagggacgcgaagaagaagaagaagaagaaaaagtcaaaatagaggaaaatgtcccatgttaccaaggagattactaatcccaagtcttgggaggctagacctagtttcaggacacacattcaaagtcctttcgcaaagctaacacttcctctacttccttccgcaaaaattaatgacaaaatacatcgataatctcttttttctcatgaaccgccaaacctaaacaatcaaggataaaaaaataccattctttcttcttcttccagaatcacacttatggaagtaagaagaatctttgttccctaatttcaaccaagaacttttgccacgagaagcccaatacttttcttttttttttttcattaagagcatccaactctttctcaattttcctcaaatccttgcaattagattgattaaggtgagagtcaacaagtaccagctctttcttttttgagtaatggctttttcgtgacatagatgaatattatacccaagagtaaagcttggtagccacgacaccgatattgctagacacattaagtagagggtcgacgtgcttcactctccattcttgtttaataattttaatgcgatcttccttattagcccatgaattctcaaaatgaatgcaaaattaaaaagacttttttttttagaaaatgacacaggtctacccacggagaaaaaaaaaaaggcctatgatcagaataaacattaatgtgttatattttagattaaaataaatattttggataaagattagaaaattattctgggtttaattgtaataaaatatgatcatatttattttttgatttccaatttaaattcaaatatataataaaatttttatctaaaaatataaataataaattagtaattaatgaatccaatttatccaaaaaaatccaagtttataatatttaaattataattattattttttagagattcatgattcatgtccaacattattggacatgaaatataataatattaaattattatactttatgtctagcattgctagacataaaatgggtttcagttgtgggtcccattgtcacatccaaaattgctaaacgtgaaaaatacacatttcatgtccctacactactaagaaattcagaattcctgatggttttacaccgtctagtaaagaatctcgatagtctataaaattgtcgcctatacaagtgtcgcaaatactggcctataatagtcaacagtggaaaaatatcagggaaaaagaattctcgacgttttaaaactgttcgctatagtcgacactataggccacggtttaaaaccgttgactatactatagtggattgttccaaaaaaaattatcgtcttcatcctcctcgaaaccacttctcgcatatgtcgtagccgctccaaaacttttacaagcttcatcctcctccactgtcattgtgcttgtctcatcctcctcgaaattttctttttacaaactttgggttacttttcacttgacaatcctcgtaaatttcttcgtattgcaagcttcagatttcttttgcacacaaagagatcatgattaagaaactaaatcatggctaataaaaatttaaacaataaataagagaatattgtgcttacctttgtgctgacacgagagagtagagggaagagacaaagaggaggagacagatggtgtggattgtgcccgcggaggagagagagccgggaaataaaacaaaaattacaaatgactttgaaaaaatgagatatgatttttt

SEQ ID NO: 112135 - DNA, 7095 bp, Cannabis sativa
  modified_base (34)..(36): a, c, t, g, unknown or other
aaaatatagagtcaattttgtcatttaacaaaannnagggtccaattgataacttttgtaaaacacagagtccaaaatggtatttacccgaagaattatgtgcaatgcacaatagttatgtacctctctttttgagtccaaatcggctaatttggtgtttgctcaagaattgcgggcgcatctactaatctttttgggtaagcagtcagtctccataaaacaacaatattgctctccaagggagtgtcaacagctaaagcaagggctatatctgaaattatttggatgaaaagtatgaagaaagatgcaatctacttggatctttcgctccttagatctatcaataggactaaagatcaaccataactagttgaccggaactgattcgagcccagagttggaagacaaagttgttatccaatgtcggaagagcctgacttactcaagtcgtgggtttttacatggccaattatgtcgctacctcagatgtgatcattactacatttgctaagaaagtggactgctatttcaaagaattctgctgggggattcaagctcaaagagacattcacgcagtagtttagcaagctatttgcaaaccgaaagcttgtgggggattgagctttagaacacttagaaactttgaataatgattttcttattaagtgggcctggaaaggtgttaacagacttagatagcctttggagcaagagatgtagactttcttaaaacagggctatgtaaacaaattgggaatggacattctacttcaatctggtttgacccatgggtccctaaggggatcacaaccttgattctcattaaagactatagaagttatcaatacaagactatcaagaacacaactaaataaaatgaattgagttacaaagacttgcaaaagcttaactcgtctttgagctcaagcctttatttatagagaaggtaatacatgattgagagttgttacaacaactattctgtaactaactttctaactaaaacaaatagaggatgaaacaaactgaaaaataacataattgtttattctgtattatctcccctcaaacgaaagggtgtagaatacacgttaaatttgaaaaatctattttgaattggcaaaatagtaatttatttttgaaataaataattttttttttaaattaattaaatagggaaaagataaaaagtgttaagacaaaatttttcaagacaatatttgtttagataaaagttgataggacaaaagacaccaacattcgtttgtctttttgggttaattaatttaattagataaatatttaaatttgaaaagtagttatagatatttcaaagttgttgagatattttctcaagtagttgagagattctctcataaatatcaataaccgaatatattttctcggagcttttctacttctacttttaatgcatgtgtgcactctttgtctagcagttttcttttctgctatacgggacaaaaattgggatcaatgttgagggcatgagaaattacggttatatcgatcccgaccatgtcttcgtgcggtaaggaaaaaatgttaaggtttgctttaacaaattttatcaaagcggattttatttcgagaaacaaacctttcccaattttgagcttcctggtcggcatagtaggatcaattttaactttttctaattcttctacagacccaatgtttatacttggttccctaaagcggggatccatgtcttcatcccccttgggcagatccctatatggcaatttatttgcctttccttgagctttggctgattgtttcttcctttctggcctttatcaaagtgaggttatatcatccatgtgcatatttttgattgcctttcagatgccctacaccattcctagttagaaacttcatgcataggttgtaaattgaggtaattgatttttaaatcatatagagatagttggcctaacatgacattgaatgcgaaaggtacatccattagtagaaattgttccataattgtgctggctattggagcttttcctaccatgagcggaaggtgagtgtgtctaagaggagctatattttggttggagaaattgtacactagctgtgtttagggaactaagtctttgagttggagccccatcttctcatatgttgtcttaaaaagaatgtttgaagatccgtacactagcgaaaaggtcctagtgaccctaaaacaatgaaccataaagttgaggatgtcacgtggacatcccagggactcaacttgggtccaacatcaatgttgggtgcccaggttgacatcatgtgcgccttctcgcatcaattttaattcatatcaactacttatgggaaaatgcttagccattgtcctaagatacatgaaagacatgcccaagtcaagtttcagacttaggagataagtctacaagaaacaacacctgggcaccatgaagccctattgggcgcccaggttatacatatagttgatttggacccagatgaaaagttgggcgcctagggtgacaactccccagtcactagatgcccaggtttacataaccacacttctggtggttccgccaatccgattacaattctatcttaggaattattcttgtttagctcccaagacaagatatgagacttggaatcaggagaaaatagtgtccaagtagtgatttagtccttaggtatcaccgagcgttagcatgcaagcacactgggcgcccaggttgacattgggctaaggcttaatgttttgtccttcaaacaacagctttattctgggtatcggtcttatttttccccaaaaagatatgatttgaaggtttctgaaagtcaatatctcatgtacatgtgtcatgcacaagtccaccgacacccatatgcactagtgatcagccggatgtcacctagtcatcactagcgattcaccgggcatcacccatgcatatcaagtaaaattgccaagagaactttcccaaggtcaaaaaataatctaaggatagctatcacatcaaccaagtatctaaaaatatgtctaaagcccaagaaaccaagttttgggtgcctaggttgacataaactgggcgcccaaaggtcaacctgaccttgcagtcacttttcagcaaatgaccatacctctcaattttttatccaaatgacgtgattcaagtggccaatgaaagctcttttcaagacagatctaagtgcgtctcacactcctgccataattctgacgtttcaagtctaaaaattgactcacaagcttgtgtagaatttctaagcgaattttctgttattttattgtaatttaattggacatccttccctataaaaggattgctcccttaactcactattcacactttacacattcctcatcccctctagaaggttagagcttctctctcttcacacttttttttttctaaaaattgtgaagtgaagctagacttattcattttttttccgagttctcttataaagaaattagttttttgagataataaaaattctaagtagacgtagctccattactttcgagtcaagaggagggaactactataattgttgtgttctctttttactttatgttcatacatttgttagttgctatcgcttatcagacggagttgatcacttttcagcgtcaatggcggtatatcaacaaattgtcaatgcaggggatattcagaaggataaatcttatttattctaaataaaaatatataaaatcattagtgattcttgccatctcttgacaggcaaacttggcctagctgacaaaacaataggcgacataaagttgtggagctgtaagttttggttgctagtcataatactgatatatgattgtttcttgtaacttagcatgcagtgacaaataatttgagtgatatatcaagcttttctaaatagaaaggagttcatgcttctcttatgcttctctttcttgatcttttcaagttattcaaagattatgtttcttcttgcatcttgaacactatatgtacattgaaaggtttgagaatcggaaacaatgaatttacacattcaaatttgtaacagtacacatatatcaatcttaaaaaaaatcaacatatatgtatataaatatagcatcaaatcgagaaatgttacatcatgttttgactggttaagatataaaagaaagtatacacacaacaatacaagggactttatttctcaaaggctgagaatccaaaccatcaaaatttaaaatccctatcttggggatggctgacttccatcctcttttataactgaacataaaacctgcctcgaaatgtaggtctcaagctccttcgacacatctgtcagtttcaagtcaaaattgcttctgtacttttgctgtggtgatgccaaaatggaagaaactgtagatggggggcaagaaaatctccttcttgggcttgaaaaccttcctggtgatcctccaagcctaccattagaaactagaggtgttaaaccagatgctgaatctggaacatttatctgtttattcatcagcggaccacattttgtttctgatggcagtggtttcaatggaccctgttccatcattggcttctgttttacaatcctttcccgtgctctttcagctgctcttaaagctttctctttgctcagctttataagtttccaagggctgataccaacccggaagccttgtttgttggctaaaagagatgtctcaggatcaccttctattcttatggacagatttttgttactctgtaaatgaaaacgtataccattcagtagacaaactacattatatcttaagcttctgaaggtgactattctgattaatacctggttcaacccttgtccgctgcatataaaccgagatacaaaagttggcttttctggtgaataaaattcagcactgtcatctgaagagatgcctgaatcatcgtcaaaagaatctaattctgcgaattggttctcctctttcattgccaatatatagtcgtatgttcttattccctgtaccaacaatccaaggacactacttatattaatcatcgtcgagagcaagagcttttctaaagcaaaaagaaagagcaagcagattcatttggttcaaatctatgttgcctaaacacaagaaaaacaatgcaattagatttaccttccttatgagaaccacatgaaagaaaaagagttgtcctaatgctgctgaaccgtaagctgtcatcaatagcaacaaaatctgtagcatttcaatggttgagttaggaaatttgcattcaaaatgacgatcatgagaagctgactgcatgcgggtatccgaacttaactgatatggtggcaagaacctctcttggaaacttcacatagagcttctgctctagttccttctccagtccatgtttgtctgtaaaacatctaacaaatatggcaacagcagttcctccttccatgattagctgtagttttagaaacaagagtattttaacaatctaatagtatgcatatttcgttgtgtaaagtggccattcatttccacttttcacttagagaatttgagagattacaaagcaactgaccattaacaagacaaaaaccattagaagaataaatgttgtataattccttttgccaacgcagttgtttaaccactggaagagaagaaaacaaaagaagtttgggattggtgataagtcataaattaaaaaaaaaaaacaaaggcacgacaaagaaagtttttaagggatgcaacagaccctgcaatggtgatcaaagccttccacacatcggttgcaggtgcggcagtgcttgctacgttttttgacctgaaaagacaaaggtgaaatgaattagaaaccagtgatcaatgggagcataagatattaagttggtatgaaacatactataactatacctccatatcacagagctggcaaaaggagatgtcgtcttggtttggattgggagtgttgacagctgcatcatccttgaggacaagaggaaaaggaagaaatgggtccaaatgatcagagctggtactccatggatccagatacttcctcctgatgaaggacctaaggatcttcttctccactctcctaaaaaatcttaaaacaatctgacccagaatgaagccatagttgagcttgatctgggacttgacttttttcttggtcctcttcctcctaacaccagttttgtcagttgggtcaatggcagtgcaccttatgaagagtcccatcactgaaagagactgcagtggaacaggaatacagtctttgttttagtttgctttgttcttgatgatgaattgagtgttgcatagataagatgataagaaaaggtgtaccgcaatggagaagattgtggtgacagtaatttctgcagttctgtttccaagaaaaagacccaggaaagcatagaatgccaccaccaggaagctgaaaattgccattcccacgatctgaaattcgtagcacaatcttatatatatatttttatatataattcaaggaaaataaatgcattcataatagtacaataaattaagagtgaagtgtaacctgcaaagagtggagaggacgttgccagccatggcgcctggtaataatcatttggtcactctcttctcctatcttctttgccactatcttcttgtttcttttgctaactatggcttctgttgtagtagttgacgctcttcttcagtccacgcttcccctccaacggtcgaattttgctttcaatttgaaatttgaatggcgcaaatctagaataattacaattattctattattgccccgaaattcattattaagaagcttaatgaaatttaaaataacaaaataactttgaaatttgaagcttaatgtcaccttttgaaatttgtttggtgtgtgtgtcaaaagaacttttaaaaatttatgggggtttttatgaaagtatgataaaagaacaaaactgaaaggggtgtatataaaagcaccccttttctttgctatgaaaataaatacatagaaacaaaaaaaaaaaaaaaaaaacaaaccccctaatatagtagcaaaataataaataaaactaaaaaataaaataaaaaaaaaa

SEQ ID NO: 112136 - DNA, 5576 bp, Cannabis sativa
agaaaacaagcgtaattctatcccaacacagcgaaaaacgcacataaaatagatccaaaatataggctaaaaatagcctaacattcaacacgattaaaacataaattcaatcaactttagttatttagtttccttacgaaaactagtttcaatacttctttttctactagttatgttaatagtgtttgttgaaattagtttcaattatcagttatgccatgatacttttttgtgtttgtgtattaatttttaatttgttcagtttatgtaaatggttttgtcctatactgtaatgtggatactctatttttatagtgtttgtctattttttattttaaatttatcttattattttttttatactgttaacaatagttttataggctttgttatgattgtgtatgagtttacaagttttgttatactttttataggtcaaaattagtttcacaaggcttgaaattggttttcatacttatattttgtttttagagttttattatgtattgtgtgttgttttgattatatttgtgaattttttgtgtgtgtgtctgtgtttttccatttggttggctgatgaacttggtttcatttatcttcactgtttatcatttatgttttgttatgattttttatatggtcgaaattgggtttacaagatttactggttcaaaactagtttcatagagtttactggttcaaaacttgtttcacaaggttcacaggttcgaaactcatttatgtttcttagttttttaatttagtttccttacgtaaccaatcttttgtgtaagatttttacttaattttttaatgtaaccggtttttctgatttaatttataagccattataaaaaatcattcgatggtatatgttatcgtacatagtttttgtatttaatttatcttttgattattttaggtgtcttatgtttgttcactttttttgttggttgtattaggttactagtttttgtatttaattattgcttttattttttatgtaatttatttttaggttttggatttttgattagttttttaatgtaactaaaatctgtgatttaatttataagtcattgtaaaaaaaattctatggtatgtcttattttatgttttattatattttttcattgttttagatgtcttatgtttgttcactttattaatttgttatattaggtaattagtttctatattttattattgtttttgttgttttagataactggttctaagtttcagttttttaatttagttgatttacataactggtttctttgtgtcatattgtttaaataacttatatttaaatataattggtttatgtgtgttagataccaacatttaattttagtgacaactttgatgtctaaacaactctcatttctaacttcggtgacttttcaatattgacgacaactccaacgacatttctagtaatttttccaccgacaataacaactctggcgaatattctcattctgttttctactttttttgccgctactattttattttaatggatggtgtcaattttggatagtgggttgatggttgagtctttgagcttctaagaagtttctaactgcttttagttttgatattgtaacaccctacttgcttaggtcgctacagtgattttctattattgtgcacgcctttactaatcaaaagatttctttgaacatcgtgaaatttaaacttttaatttaacattaaactttataaacatataaccttacataaaatttgagattccgtttaaaaagtttgcaacatcattgaaaatatattttacaaaagtgtcgcttcgcgacaacaaaatgaagacccatgttgtctcgagaccgaacactccaggtataaccatcctaatatgtacaatcatcctcaagccctgaactcactagtgttcaagtttcgtcttttccttatctacacatgtaaataatatctgtgagtcgacagactcaataagaaaagcataaaacatataacatattactgacttgcatctaggtacccatacacctatttacaaggcttaacagatgatcaagaacgttcttaaaaaaagtacagcctttgtaccacatgcactaagtactaatcccatactagtattggtaaggctgaatcacacctcgagtacaactgagtgttgtaccacatccactccgtacttgtcccgtactagtgttggtaacgttgtgtcatacccctttaacatcatatattgtaccaatacactctgtaccacaactgtagtagtgttggtagtatataaatcacatattatagcatccatataacatacatacacatatacacaaatatataatatgctagtcttacctcgtttcgtaatttaaatgtgccggtcaacttgaatagaaattatgcactaaatggaggccctatgtcacattgacataaaatgggtaaataacctactaaaatatttttgggaacctaaactcaaatctagaagtttttccatcgataaatagcatggaagtaccctaaatattgaggaattagaaaaccaaggctcctaaaactacctatactggtaaaccgaattcctaaaacggtaaaccgctttctggtatcctgcctgggaaaacggttcaccatttctagaaaaataatggaccgtttttctatagaaatccccaagaacttcgaatctcactcaattcttccccaattttcacaccaagctccagaacacctaattaaaccataataaacataatctaagccataaccacaagcaaaactcacaaaatccaaatctttcattgttgagtcaagtttaagttcttgaactccaacttgctgaacaactcaatcagccctcaaaatctaaccaaataatttttaatcaactcaaacgaacctcgggaaataattccaaacactcaaggtttgaacaaaacctaatgcctttaacttgcatgcttgaactaattaaaacctctaaaaactcaaagaaaaagaaagcaagagcttactactgatttgaaccacttttacatccaaacttgaagttcaattccacaagaattgatgaagaattggactggagcttctagtacttctagggccgaaaggaagaaagaaaaagggaagaggtgggtttttgatttttttttttttcttttcttaacttaaatggataatggttgatctaaattaaatggataatggcttacctaaattattttattccaatatcaaaattagaatagctgattccccaataatccactaaaaataaacttataacctttgggcaaaattactattttccctttacttcacccaaaagtaaccttaagttaaggcttaggggtaaaatggtctaataccataatcccgcataatcccaatattctaaatatcacgtattattatcccactaaataaagatcctaaatattatacccatgtgactctaatggctaaaccgttgcaattccatcgttaccgagcaaaaatcacaaaaactataagttctcacatataacataaaaatacatttagagtttataaaaccttcaaaattgaaaaattataaccctaatgtctattttttaaaaatataggacccacaatacataataatcacatataatcataaaatataaataattaatgctaattgcctctcaaaattatatcctaagtatgcgatcattacagatattgtgttgaatttgtttaatattccatacataatacaaacatgtaaaatttatttataagtcttagtatttataactgatttttcattaagaaattgattttgattatatggaagtaactgatttattaatttattggtttaataaaattacttttagtattattttaacttttgtagtttgatttttatatatatataaaataaaaattataaaattttgttttttttgtaatttttttctttatgtaatttttttcagtatttttttatgtatacttttttaaaaataatttttacaatcatgattttaatgtttttttatggtattcttctttatgtataataatttgtttcatagttttaagtttttttttaaaaaaaaaaaatagttatatttaatgcattaagtgtacaagttatatatattaaaactcttatttattttttctatattttgtaaatagccttagcaagaattcattataacaatagaaacaaacaatagaatgttgtcctattacttattaccattctaatttcagtccacaacactaaataattaaataaatagaaaaatattaaaagtaccttaaacagggtttatactatggtttttataccatatattaaaattttcaatttttttatttttttttactgtaaggcggaattttttttcaaaaatagtgtgttttttttcaaaaataatgtataagttttatactgtatactgtattaagtttttactgttgttccacgattattttttagttgtaccactatttttttaattgttctgttttgttattttacagttgttttatatgaagacagtatttttgtaaaaaattcagtgtgacaataaaattgtaaacttttaccaaaaatccaatatgtttgtaaaaaccgttatatactttacaacaaatgttggtcttcctttcgttgggcccaattcgttcatgatggaatataagataagaagagtggtttggaagcatagattgttgggttttatacaaatgggtccaatcctgagttagtaagtaaccacaaaaccttatgggccaaggaggaaaatgatcataaatggatagaataatggataatttacatgtatataccctattttacaattaaagtgcacaaataatgtttctattaaataaaacttaatttgtaattagtttctactctttctacgataaaataaatttgaaatatattttaaataataagatattataatataatataaaaataactaacttattattaagatgtatacaattaaattttacaggaaacaaaaaaatatatctcaaattacatactgattagttaccattctacaacttttatttagttaacaaatcaagtatatttttaaaattcaaaatacttatataataaaaaaaatatgggtgagtaaatgtatattacataattttatttgaatattactataaagtatactaaataaaactatttcatatatatagttacttgttatattatatgaaaactaattagtttctacaatataaatttaaaaggtaactaaaaatataatttcaaaataacaaattagcaatttaaatattaaaatattttaccagtaagttatgtgagttatttttttctactatattgtgatttattatatagtttattaaatgggcttgaatgtaacatatatattgttataaaagaaaaataaaaaattaatgtaaaagtatttaaacaacacaacaatgtaatataatttaaaaataaacacataggtttcaaagtaacaaaatatatacaattaaatggtatataaaaatagtaacttattatgttacatgacaactcatta

SEQ ID NO: 112137 - DNA, 3506 bp, Cannabis sativa
  modified_base (1380)..(1384): a, c, t, g, unknown or other
  modified_base (3432)..(3467): a, c, t, g, unknown or other
tatctataaataattttcataatcagtcataattaactgctgatttccaaattaaactaagcggtctttacattgttccttcttgataaaaaaacaattagcaataatacaaatcgaaggaaaaatagggatgaacagagcagggccggtcccgagttgaaatgggtcatagacaaaaaaaatattttttgggcccttactatatataaatgatatttttaaaaattattaaaataatatgcatattttttaaaaaagtattttttttatttggacccctaaaatgagtgggccctaggcgcgggcctggaacagagtatgaataatcagaagctaattgaagcactaaaacgataaagaaaaaacccagatatatactggttcaagtctgatagatcgatgtgatttatgcatggctttactccagttctggaacaccaccaaatcctctttattaattgagcaaaaataggtacaatacagtcgagatcgattctctgatgacttctctcaaagtgttttaactctcacactcttactgaaaaatattattcatcaacagaagattcttcttataacacccacactcaatctctctcttttctctgtacctctctctttctacctctcaatcttatctctctctctatatatatatgtatatctttcaaaactcaatttgatccttctactaaaaataataagtgtgggtggtatttataagcttaggatcaagatcccaaagtcggtggctacaagaagttaggttgttaagttagttaggcaatactatgcctaactaacttaaccaactctcttttgagcgaggtctccacatcaacataagtaggagtgcatccaggaacgagtatgagggccttcggagacacggttcaagggactcactgaaggacttgaaagagagccagctgagtctactatctgggactatcttctaggaggaacagctagccatccgaaactcctatttagaggaggactagcattcctgaaggcccttctcaaaggacaagaaagccttctggacctgctttcgcgagttcacaactttccaaaaataaaaaatagctcctgtagaccttttttttggataccacagttagtaattaaaatttaaaaatagcatttttttggtaagaaaattttgaaatcaatgatgcctagtcggaggtatcatatatatgggagttggtgttttttatgataaatcttatatatatatatttttcttgacgtgataaatctcatatattttaatttaattacttcaacaaaacataattaagatattattttacaaatacacaaatacaataataaataaataaaaatacagttgtacagaattttaaatatttnnnnnattttatttacagaaaatatggtcttttgatgcatttttttattgtactcttattaatttgttgttgatttttcgttattttttagttgttgttctgttgttattttgatattatttttttgttacttttatgtaattttggtgttgtttttatagaaaacctttaaactgtgaaaaaaaaatctttaaatgtaaaaatataaaaaaataatatattatgtaattatctcaattattaattatactcctaaaatataatctcataatgttatattaagcatttttaatttttaattacaatactctaatactaaatatataacaattacttataatttttacatgtaacaacaattgtaaggataaggaacaagttcaaaagatatttaattaattgtagattttgcctaatttactccactgtctagtgtaatgttcactttcctttgcaacatcattttttttatataatattttggaaaatataatatatataaaaaaaaaattaacttttcacttgttatactgcaatatatataaaaaaaataagcgaaaggtaccataattctactttcttttaaatttttatattaatcgttaagttccacttttgactagattaatagtttaaattaatataaaaaaatttacgattaatatacttaattttttttatttccacgtaaaatacatatatactttgtgtatatttaaaactaaatatatcataattttttttgtgatgaaattatcaaaaaatagaacatttatactcatatgtaactattaattagtcaaaaagtaatattttgttattttcaccataaaaatagtattttttttaaatgaaatatcaacttcgaattaaaagcattatgaatacaagagagcctttaaattaggcctaacgttatgttcgaaaatgctacaaccagaagaaaatcgagcatgcctagcaatagcatgagaaactcgatttgctaatcgtttaataaaacgtaacttaacatcaattagagacaacaataaatcatgacaatcttgagtaatcaagccaaaagtggaggacatttcctggacaataaggagactatcagtctcaagatcaacattttgccagttgttgctcttaatccaactaagagcttccttaattcccaaagtttccatgagttcagcagagtaagtgctagctttgtaacatgttttagcttcaataagcttgcccaaattatctcttgctacaataccgaaaccataagaattttcatgatgaaaaagtgcaacatctatattaatcttgatgtaattttcagcgggtttagtccaaagctcggccccatcatcactattattgaaagatagagatgatagagcaaatttatcctgagcttttcgccaatgatcaagagtgacagaagctgaggctaaaacatcatttgtggtagatttttgcttgttccaaacagtatgatttcgagatttcgatatagcccaacatagcattgtagccctataaacctgatccgtatcactggtttgttgcagattttcgaaccagctgccaacagtagatgaagcagctatattaatcgacactccaaacataaaccagtaggattttgcaaaattgcaatgtaggagagcatggattgcagtctcggggtgtgcatctggatattgggctgaaataggcacatgttttgtaacaaggttcacacacgtgggtagggaatcagtaatagcacgccattggaaatttgacactttaggtgggatcttcaagtgccaaaatttacgccagaaaccagaattatggcctatgtcattattgttgaatgaatgaatggttttaaaaaataaaaaaaataataaaataaactaataatacaataaagtgaaattatggcctaagaataatttttcttcaacaacttgtgcggtgtttgtataatcggggatttgagggtccaaattaggcttttcctcatacgagatttctttgattttaaatgattcatgttacaccctaactaacataggcgtannnnnnnnnnnnnnnnnnnnnnnnnnnnnnnnnnnntaatcaacgaggtttatgaaaaatgtgattaattaaaat

SEQ ID NO: 112138 - DNA, 1980 bp, Cannabis sativa
  modified_base (1943)..(1944): a, c, t, g, unknown or other
aaaaaaaaaaaaaaaagatttagaagtgtaaaaatgaaaaaagtcctaaatattatgtttatgtgtgtgtttaaaatttattaaaagataaattgtgtctattttgtcctatttgtgagatttatattacttacgaaatcttaatattgtaatagagttttaataattattaaataaatgatatatgattaatcaaccaaaaaaaaataactatttaaaataaaaaatcatatttaaaattatttaatcgacattagctcttgataataataataatctgtataggcaatgagttttttgaaattaatactagacttggtcaaaattgtgtcatatatgttagaatattttataagattttttttttttgtgagtcagatacttttttttttttttttttgaagaaaaagaaggaaacataatacacaacataggggaaaggccaaataagccatgaattggcatgataggcaactgaaggaaaaccttcatcccacaaaatagaatccttaacaagtaaggcactctaagcatatacaatgggccatcctattatatagtctaggaacatatttgaccccttaacatctactcgaagccaggccttccttaatgtcattgaccaaaaaaaagtagcattctcgcttactgtggtcctgctacttacatcaaaaatcgcattctagcaatcaaaatggatgtagaaatcgttaatacccgtatctctggcgatagagatggcttttttgattgccttcagctcagccacaaagggaaataaggaattatgtcaaaacttgtgatcggaacgcacgcacctgccaagatgatctcgaacaatacccatcttagtatttccattgtgactttggtactcatcaagaatgtttgtagccaattcaataacatctccatatttaggggagaagttattgtgtagcgacaagtttttacaataccaaagttgcgacgacaccatcacaaaaagatcgaagtctctgattgagatattttccttcatggtggagaagaaaatttgcaagtccaggttctcccatctcttgatattcttgtataattaatccacaatttttccatacttctttaacagtcgaacgcctccataaagcatggttaattgtttcttccattttcattcccctacagcgccaacaattttcattgacttccatacccctacaaaacaaaacactgttagttgggagcaacttgtgactaactttccacagaatttttttgacttttggtggaactctcaaggtcgagaggtgtttccaccatctctcactgctttttatgtctgagttttcatcgataattctttccttcatagctgtagtatacccactccgaacattatattccctattctttgaaaaattccatattacttcgtcctccatctctaaagagccgcattgaatctccaaaatgaggtctgcatcatcctcacaaaagattctcttgataaactttgcatcccattctccattagcaaggcgcaggtcagccaccttgatatcagtaggaatatcggggttgataagtgatttgaaacttaagggtctaggcagccacctatccttgacaatatatcaatactctcccatgacccaactctccatctagctcccttcacaatgatctctctaccccaaagaagagtcctccacaccgaggatgtcgttgacccgttcttagcatcaaggatggtagaattaggaaaatagttgttctttatactacaagaataaatgggtattggcacaattaaattagtgccaatctttagattagcacgacatgtcgtgcccttttggtggtgccaatatgttcgtgccaaaatgttacaatcggcaccataattggtatcatgccaacaactagagatggaaatttataccgcggggatgggtaaccgnngggatccgcccctaatggggtggggattccccatct

SEQ ID NO: 112139 - DNA, 4257 bp, Cannabis sativa
ttgaatatgctttgattgttatggatacaaattgatttaggacaaaagtatttagattatttgtatgattttatgagttgttttgtttaatgctttttttgtgattaaacttttccataggaatatggtgagatttcacataatttgggtttgtaagtcttaacaagattatgaactacttaattcaacttgtcaattgaataggaagaagagaaattgagtaattgcattaagaagtaaaataaaggatagttggggatcataataatccttgtttttctgattcattatttttctaatttttaattattttctttatttatttttctaaaactttttacttatacaaatagaaacgaagaaaaaattaattagtaattgatatcagtcctcgtgggaacgatactctaccgtatcattatattacttgattcaattgtatgtacgtataaattttagcaaacaaacatgataggcatctatgctctggtgaggagcaatcaaaccaactttcctaaggttgactgaggtgacaagcttctccactttcaagtcctctggaggaaaacctatgtacaaggcttctctttcgagcaagaaaggggtagcaactagacgtgtaattagggctggcaatataggtcacaacataatgacaaaactcaaaataacacgaaataaatgggtatgggtgacatgtttaataattgtctcgtgcttgtgttgagtttctgacacgtctaatgatcacgccgtgttcgtgtttcagtttttgacacatttaataattgtgttgtgttcatgtttatcttagtcgtgtcgcgtcatagtcgtatcgacacatttagtaatcgtgtcgtgtcataatcgtgttgacacaataagacgaattaatttgcatatatttcataaaaaagctcaaaatttttgtatttataatgataatcgtgttatcgtgtcgtgtcgtgttcgtgacatgtgacctactaactaatcttgtcatgcttgtatttgaggttttgacacatttaataaatatgtcgtgttcgtgtttgaagttttaacacgtataataaatgtgttgtgtacgtgttttaccttaattgtatcgtgtaataaacgtgttgacacgaacacgacatgataacacgaattacgtaccgaccctacgtgcaatgttgtttgatattgaagaaaaggattccacatcagatatcaaactaaatgatgggatgaaaattagaagagaaaagatagtgtcatttacctgcaacattgaaatcccaagacagagtttgaaccctcttcaacaggaatccaatattaaaaactagtagttccagaagtcatgcatatacttcacaatgctagttggatagaccaatgctctgtatattttctcaagacaatagaagttgcttttgctcttatttttctgcatggggttcgatttcacttggtaaaagtaaaggatttcctccggtgacagaacctccaccttcttggttcgacaaagcacgaaccatgtcgccaacaacttgtagacttgggggataaattgtaatagaataatgccaacttccacatagaagcgttcaaaatagctcttaaggaaaatgtgtgctcccatctcaacatggacctagctccaaacgctaaagtcatccacacacttgtatgagtattttcccaaaatagatagtctgttccaaaacacacctgaaatcttcatgaggccctaatcatcttcatacgcccgaagagctctgtaattcctaaatttgtttgtgtatggatccatctcccaaggagatgaattatataccactattagagtagcaacttctactctctctctaaaacttcaacttcatcagcttgaatagcgccagccatggtaagaactagaaaagaataaaaaaataaagtcaagcagttaaatacccacactaaagaagatagtgaaggtatatgagagttctcccctaacactgcttggagaggtccccccacgaaccctacatctgaaagtaaaattcttgaagaatattgttctaggatgatcaaatcaggaagaatgaaatgaaatgaaaagctacaatatgtgtcatccgaaacaaggatgttaaacagaggaattaagtttagtagtacttagtgttaaatgttagttatttcaagccaccaacaaaaatagaggatcacaaaacttaataatgtctacaaacaatatgcatagaaagtatccatatttcaacgaaatgttcagagtctctcctacgacctaaatcctattttagaaaataccaaaattacttactttatgaagaatttggggaaaatgcaggagttggaaaggggattcaaacatcgtgtgttggtcctaaagaaattcatgtttaagaaggtttgttaaggcgcacaagcatagtctgaaggaaaaaggttttgttgatgagcgcttcaatctcatcttgaagatccagtagttctgatggtgtagaagaatcagttgtcaaaactgggggtggtgctcttagatattctcgctcacaaattcaaagaagaagataataaactcattgaaatagtggttcattcaccaaaagtaatcttcactcattttctctctgaaaattcaaacttatattaaaatttgggcaaaagtggtaaaggggcaaattttactgcatctaaacaacaaagatggtgatctgcatgaactcaaatcaatggccaagatgatatccaagaaaatatattgtacatccaactgtccaaaagggcttttagatttgcattcaatgtgtctcttggaactaagacatacaaatggtgatattcttcttgggacactcgctgacatgagcaaccttcatttagtagatccatgttgcacgtgctccattattgaaagtaatctccacgagccaaagaaatagttccatgtgtcacttcattaatttcaaaaagcaagtagttgtcaaccataaacaatgtttttggaatttaaaaaggaatctgccttttcaagcatcacctgtcctctagccatctggaaggaagaatgaaagcctacaaagccctttaagtttcaaaggcatgggaagtaaatgttatgcgtgtttttagatggaggacacgaataattccaagagggtttcaacttaattgttccaggcccaaccgtaggtccaactaagataatggattggatccattggcaaagtcaagctgtccagatgttggacaaatgacttgtccaaacaaggtacacctctggcacaacgtatctccgaatgacatcgagcagatctctgggatgggtaattaatgggcatgcggatatctagcttcgtatcatagatatttattaccaaatttcacaacatcaaggctttatttctaagattcgtatctttcgaatgaggaaataaattaattgccaatcaactactaatgtgtctttattatccataaaattagggcacaatttgacagctatcaacgtgatgtggcttccatgtcagtagaagattatagcctaacgggttgggccttactaagtcagatcaaatgttattatattatttgtatttactccctcaatgggcaagaactctagtactataaatataagaaaacctatttatgcaaagggttagaatctcaatctttgagtgctcaggcaagttcttaggttcaaacacgtgtaaatcataagactttttcagtcttattataataatattgactcgttaacactctaaccacgtaaaaactttagttttattctttgtggattatttttctttagctttattttattttattagtttttaaaaattttagtaaaaatttgggaaagcaaaatgtgagagaaggatgagttttatttgattattatgtagattcgataatgcccaaacagacgatgtgactgtagatttattatcagttaaatatgtcttggtgggtgttgacaaactttatgaaattgagcaatttaagtggatggacaacaatggaataggataatggggagagaagatttttgttcagcacgtattttcaaggtcaaactaatcaggcggtcgattagttgacttatttttttattctaattctagttgtgtttttaacagaaaaatgtttggattaaattataaattattattttaattaattgctattaggggtggccatccgatccaatccaaccttttttcctcatctgatccaatccaattagtaatt

SEQ ID NO: 112140 - DNA, 4459 bp, Cannabis sativa
taaaaacaacttcaatcgttctcaatttaatactcaaacgggtgcgactactctaatcgtacatctgccgttaatattcttgataacatgtgaactcgatgattaactcgtgttaccacatgtgcgtgcacgcataaatctctcgagagcttttatagatccgtgaacctatcgaatttttgtattatagaatgtttgtgattatatcgatcgcgtattaagtactcatgtattgacaacaaaggactcgtgggtccatgacgagttgtcgcgtacagtagtcatttgaaccaattgctataaagatgtgatctttacatagggcgcatgggagaaacatcgggtcatcgtatatattcgatatacgttttgactgtgctttcttctctctatgtcccgtgtttattctatctactatgcaacacatagtgtgtgactagaccctgtctcggtcacaccttctcgtatatttttgtcatgcaaggaaaatttataagagtttatacccttgacgtaacggaaattaggcctacgtgtcaattaaatacaagactactcattattttagataaaaaattgatcttataacatcttggaaaatattattgttataactctcactactttaatatattggctcgtgaaataaaattattttaaatttccaactacataaaactcttattaatattcaatcattttctaatctctataatcatttgaaaatcttaattgccgaaaaattctatcaacaaaccataattaaaatttgggaactttgtttaaagactgagtactctttaatcaattgtacaaattaccctattaaaaatgcaaatttgagatgtattggtattgttaaaagctacttatatcacatatggctaaagaaagggagatatacagaatcaactatttattattattgttatttaaattaggagtatctggctcaatctaacatctttttttcttcatctagtctaatccaattactaattagattagattattttttaataggatatccaattacacacttaatttttaatattaacattaataatatgataaaaaataagctaaaaactaaatatcatcattcattaaaatttaatactccataaaaatatcattgttacaagtgcaatataactaaaagtttaaaataagtaaaacaataactttattaagtaataaaatagaacaaactatcatgaaaataaatatacaaaacaactaaatattacaaattcaatacaaaataaaattgactaaaaatataattaatatatattttttattatacataaataaatataaataattttttaatatatataaatataattagatgagatcggtttttaattagattttgaaaataacacctaataagtgatccaatccaattaaaatttaacttttaagatacaatccaatctaattaaaattaaatatctaattttctttattggattagatgttgcccactactaatttaaacaataaattttctaataagttgaatgaaataaataatttgagtgccttttttgggtctgtagcagttaagtatttttaaccaacttttttttgattccaactcttttttctggttactcccttcaatccaaagcagttttcttcaagtaaccgcttatttctgggttctttcccctgttttctttttctttttcttcagctttttcccatttcagcaaccttttttctcgcctacttccttcacatggatcctcttagtcgctcactacatttcaatctttcactcactgatgaggaaagatccacgctagtccttactgatgaggacacgcccgctgctttatccactgctgttcatgttcttgttgctagggttgttactgctttttcagtccacaagccgactttctacagccaaatgtcgggacattggaagggcagatatccggctgttattactgaatttcaagatgatatgttcaaaattacttttggctgcgcaggggataaattacgagttctcaacaaggagccttggcacttccaaaatcacctcattgttctatgctcaccagatgctctgcaaaatgtctgcattagtgatttagcctatactcctttttgggttcaaatctatcgattgcctttccttagcaaatctaaatcacttgcccgagcaattggaaatatcattagtgaatacatagatgttcatgaagattcgcttgctgaaggatggggacctttttgagaattagggtgaagttgccgattgccaaacctctcccccgtggacagatgattagtctatcaaggattaaagatgaattctggattgatttccattatgagtgtttgcctgagttctgttttgagcgtggtcgccttggccatccttttgaaaaatgtattgctttcatggagagaatggatcgtggaaatgatgatgactttgattatgttccatggatgaaaggggccaaacttcccacttctgcataggatacttacagacaagactttgcaaagggcgatgcttggcctttcttgactcgacttgcccgtaactctattacttccacattaccacaactgaatatactgccaccccccattcccaatcatcctattgctggggaatcttcctctcgtcctgcaaatattcctacccccacattatcccatggtttccccccatcgatcactgccacttaccctgctcttgcatcccagctttcaccagggttttctacctacttgggccactcgcatgatgtattacaccagtcccattgtcctatcactagcaacctggatcaaccttttatggcccctttcctcctctccaataacaccacccactgacatttcctccactcaaaacctgctaagccaaagcccgactgtgctttctgccccctcccacaacaatttgaagttaaaacaaccaatgtcctctaatactgtgctcttgccacacatctatacccctgatattggacttggctctcccagccatatacccgtggatacttaccctccatctgcggacttcactcagccacaacaatgtttaaacaaccatgtttcccttccccgtaccttattcataactatcacaacaacttctacactctctaaggctccaatggctgctaataaggaaaattctaaccccaacaaaatgccaaagaggcagaatgatcagctttctttacgacaagtcttgaaacgttgccgaaatcaactcgataccacagctgctccttcctcgtcccaaggagattacttcaatcagaatgtttcctcctatatgttggattcagatgattcttcagacgattcaacggaggttgcgttgcgaccccgccagtcatcatgaaaatattaagttggaacgctagggggttgggaaatcccaaagcatttagacacttgaagctgcttgttcgtcagcagtctccccaggctcttttcctcatggaaactcgtctcggtagtaactcaatttctaagtttcgtcactctttgcaattcaataatggtcttcaatctccacaggtgggtttaagtggtggattaatgctactgtggaaagacaatattaatgtttctcttaatgtctttggtcctacttactttgatagcttcctatccattgatgctggccccactttccacttcactgccttttatggtgcacctgcagcttccaacaaatcctcctcatggactctacttcaaaggttaaatgatattgctcctgctatgccatggcttctaattggtgatttcaatgaaatcttatctcaaagtgacaaatccggtggccctttacgcaatgagtcacaaattgaagctttccgtaaagccttggatcactgccatcttcatgatttgccttatgatggggatcgtttcacttgggtcaaaaacagaaatgccatctttaccacaaaggaaagattggattgggttttcactaatcgtttatggaattctctctttgacacgcctactgtctctcacttggatttcttctcttcggatcaccgtgcagttgctgctgttgttactcctttgaatactgctgccacttcccatcgccaacgctcaagattttgctttgaaaagctgtggttggctgatcctgaaagtaaggatattattacagcttgctggtctcatggttctcatagtgatcccatctctaatatcattcaaaagcttgaaagttgtgcaacatcccttcagcaatggctcctccacaagtatggtcatatgaaaaaaggatctctgaagctcaaaacaaagtaactgacctcaataacatcagttctcactcccctaagtcagcggcctctctcaaaacctcagtatctatccttgatgaccttttggaacaagaagaaatgtattggcaacagcgatcacgcattgattggcttcagct

SEQ ID NO: 112141 - DNA, 1006 bp, Cannabis sativa
tgaaatataacatattttgggtggggggcaaggccactctaggcttgtatgtgagtacaatattcatagcttaacatatttaaagtgggcccctttatcttttttatgaatggactatataatcagttttgtgtttggctaacataggaaaagataatagttttgttaattcaagggagtaagcttagcacccttgttttgactctttttttggttggaagcataaaagtcacttcacttcacttcaagtttttttctaagtgatgaagaaaatgagaagagtcactcagacgaccaacaattttttattaccaaattttgtgtgacatacctattttgatattggatatgtataaatggatgggacctgaatctgtcaatacagtaatatgtaatgtatgtgttgatcgaaggtgcatgtaataaacttaagaagtacttgcttcttacatgtcattatttccttaacaacaattttattacctgaaaacttaaagccaatataatataattaagaaccaaattaaaccagagtgaccaattttgaatcgccacttgtgtatattgttcggactacccagatgaagtagtagggtcaggtggggttggggaattcgtattcggagtgagagagctttctcctcttctctcctctgtcgacgttgggattattctttgaggctgtaagactctgaagaatccctttttagtattttttctcgccttgggataaatcgagaattcaggttcaattggtggttttccatttttcaaaacacacggaatggaagtggaattagagacgggaatcataattagagatcaaacttggaaattcagaagaagaaagaaatgacttttctttctaaaaaaaagaaaagaaatgaatttgggtgtgattagagacaggggtgtttattggatcacatttaatatttttaggcctatccagattcgatccaatcatatattggattttagattttatcattcgatccgatccaat

SEQ ID NO: 112142 - DNA, 8087 bp, Cannabis sativa
  modified_base (8059)..(8061): a, c, t, g, unknown or other
ttttctaataattccatttgcgttgctctcatatgcccaggtcaaattctctttattccatttttatcccaaaatatatggattaggctattccaagaaaataataatccggaatacatgttaagcgccttgaatggaaaaatatgtacagaaaagtaacctagtgaagtgttacagaatctcctaaaatacaccactttcttttttgtttttggtttcgaattatttctataatttgaaacttccctaaagtaatatccccagaaaaatatctgtgtgggaaaaaatattagttgaactttacatgaagaatcattatgggaaaaagaattaagtgaacaagtgcaattcctaatgcaagaaaggaaaaaaaaaaaggtgtaaaaaattttctgctaagaattgtcatggtattgtactctccctccattgattgattgacagtcttgcaaatgttcaattattcgtggatgttgcattgttgcaaataagggtgatcaaacttgacaaatttgttccaatattgcttgtacttcccaattgctatatctaaccaaggcttcataattccatcgaagtgtaacactgctgctctctccacctccatactaattaattcagactcataacccaatccagtgatatgccatcttctatccaaagccactgttttcttataaaaggtaacccaccctaagggcaaactcccagccatccacaaaggtcgttcagaaccctgcaacaaaacacacccgaaaaagataagcattagattataattaacttttaaggcttaattgaaactaagtagatgtgtgaagagattttgatgtaccatttgtaagtatctgtggtaaagggcagtcagattttgttttctccactcctgtagatcaaatagattcaacccaaatgcccaagtgcaggcattgatatcaaaacttttggctacaaaagggtcggaaaagttgagaaaggagtccatccggcgatatgaagattttcctttcagacaagtttgtaccgctccaactacttttcccttcatgtcaagatgccatagaccagttaggtctttttgtaccaccacatcatggtcaaagagtactaccttatccagtgcagggaagatctcaggcagatagaaacgaaggtggttgagttgaaatgtaaatctagaatcactggactcttgcttcaatagtggattgttatacttggtgaacaaccagtcaaaactgtctatgttctggatctggattgtagctttgcctggagggttcaatatgaaccacattgagattgctgggaaattgagggaatcagtcaccacatggaaaacaattttctttggttcctgcacaatttcatgacaacaaacaacgatcaaggtttgatgtgaatatctcataccaacaataccatggaatccagaatcagtagtttcaagtgcagaatgacataaacgccaaaaagctgcagcacaaccttttaccttggctcaaaatcttcatatttggaggaggaaacatggaatattaggacttacaaaataaatctataattagaataaaagattgatagagatcattcaaattaccgctgctgcagaaacagtggagctgacaaccactgcacatgccagaatattatcagagaagacaacgtaatgataaaggtttggatcatgcaagtttcttagcttctgttggctgggaagctgcctctcttctggctccaaagcgaagtattcggaagtgaggcgcatagcaagacaatggagccctttcggggttgtacgtgcagcaagatggacaagatatgttgcttgtttcttttgcgaccgaacttgctcttcggttgtgtgagccatggcacggagcttagcagtcatagcagaacagtcggggtacaccgcactggctttagacaatgaggcttccatgtgtctcattttctgcaaagcactgtaacatcatgggtcttagaatgaaatgaaactctggaactcactacatcagagaacaattaaaaaaaaaaaaacaggactatatacctccttgacaactctgaatctttcgtacgctcaccaactgctcgttccacctctttaattcgtaatctcaactcctttactaaatgagaattactacctggcggtgcaaaattcaagtatgctttagcccttattagttgatctttcatctctcttatcttctcatcagtaactctttgtgactgagtgtgtacgttgcgatcatggtgagcttccttattatgtagcaaatctctcgtctctttcatccttgcttcagttatttcacgcaactgagagttaaattgcccctgcagacaatgccagtggagtgagtttttctatttagctaaaaatacgaacgtttgccaatcttactataatcagagtcagagtcatgtcaactttataatccccagcatagagggatattttgattaccgaatctacatcaagaattattggaagaaccaagaatttttttaaagcttttcttacagtgttattagggatctctgatcaatatctcaagtgactaacacaattatcaccagcccgttattgtgtaagtatttcagattatttatatgacaagtccacaactcaatatcaaggagtaattcattatataataagttgacacctcaaccgtgttctttactctagaaaattttgattgccccctcaatttttctaactccagtacaagatttctaacaggccttcacaattcagatgaccaaacagcacaacctagttatacgagggggtcacaaactttaattataatcttgtttcaaaatcgcatctttaattataaaaatcttaaactagtagccgaagacaaaaagaagcaaaggaacatttgcagtgggaggaaaaaaaatcaagtaataaattcacacacacagacagcggaagctttacacttctccttatactttttttttttaaaaaaagattaaggatgtggtgaaaccacagcatgcaccagaaccagccatgtaaaaagttaaaaactgtttcacataagctaaacaagtctgttttacgtttaataggcattttttaattacaaaccttttcttgaaacacgttcgatatccttatctgctgaacttgttcatctccttgttctttctcattatcggtttctgatatttgaatacaacagaccgagagtaaagaaaatgacagaaataaaagtagcatgcaaagaaataaaacacatacacacagactgagtaccaaccgtttctattagccaaagcatttgtcgtctccccatcaattgcagacatctccaaatcacgaatatcttcggatgaactgtaactaactgtagaattctgatccttatccttataaacaactaggcgtggctctttcacgccttcgccactttcctgttacaaaaatagtaaggcaattacaaaacagtagaaaaaaaaaattgaagcacatccagataacactaatgaatcattactctacctgttgaatagatttaagtctcaaatcatctcttctatatttctgcaaaaaaaaaaaaacataacaaacccatcttcaatcttcacaattcatcaaaatggaaaacagaaacccgaaaaaggcagctggaatgtaataaaaaaaacctacgaactgagttgataactttcatctaacgacagtctagaccaattagcaacacaatgaaatttcttatgagttcaaacagagacttaaatttgcttgcactaaattataatcaattcaggattctgaaatccatttttctatttctctcatttcgattagcaatccagtagataaaatcgcattattgaacaacaaaaactgagattaaggaagaaagattcatacgatagtcgccaaatcttcaataaactctttccgccctgcgaagcaagttaacaagtgcacagatcaatacataaatatgcatatctatattcacaagaatgaaatgcatgtcatagatgaatattcaatagtgaatatgtatacaagtaaaaagaacataatgtcaataccaacggaagcgagattcttgagcctatgggagacgaaaaatacgggagctaaaacagagagggaaagcagagagaggatgagaatcctctggcatcgtctaaactgcttcatcaatgatccaatggcagactgcgaataatcacaatgacactactcgctcttcgctctccactcttccaaaaacacatctcacaaacttctcagatcacagagaattcgatgcttcgatcacaagcaaaccaaaaatatcaaaatcaaataaaatcgaaacctagggtttctgatatttcttttcgggctctgcgttttcaagaagagagagaaggaaagggaaatagagaaagatggctccgtcggccatgttctgtgcctgtaaggaaggtggtttttcctccttggactttttttttaaataataataaatttttttgtttattttattttttcaagacctccacaaaaaaaaatatattttaaaaatattaatttggatgtatgtagtttagaggggtttgccttgagattgaggacaacggacggtgatgttgggtcctacgtgtaaccatctggattataacactgataatcacaacaaaggttccgcgaatcggcaaatttcgggtcccacctatcaccgctttacacgtgtcaactgtactcatacccttttttttttttttcctttcttgtagtaatactgtagtcttttctgtttgattgatcagaagaattgccttttttatcttttaagaaatatttatggcctaaccgttttcttaggcaaaatattttggacagaactcaagcaaatgtgtttttttttttctttttttttttgaaacaaatgtgtttttcctaatacatcagaggagatgcagtagctttttacagaaattttgaaaaatgactgaaactattaaaaaatatttaggtctgcccataataggtgggaggaacgaatgtatgcttttcataccaataaagaataaaatatgcacaaaattacatgtttatcaagtaaaaattttctggcaaagggtaaggaagctttagtaaaagttgttatcctagaaatgtcaaattaccaaatgtcatgttttattattccaaaggaaattggtgaagagtttattggtggggatcaatccataacaaacaaagaatttattgaagaacttggcataagatgggtcaacctcatagtaatgggagtttaggttttagacgatttagaatcccgctaatagtggcttaagtaatgaaagcaagatattttagataagagatcatacccatcatcaacttggcaagaaatcttatggggaagagatttattgttgaaagggtagtttggaaatgctagaaatacaaggacgtttagagacccttagttgctaagaccaccttcctttctcccaaacttgcatccttcgtgtgatgtggcaagagtgtcggatcttattggcccatatgggatatggaattctacagtgatgtttactgagatttttgaaaactaaatatttaagagcttaagaaataataaataatagcaataaagaagataaaattttttacgtagttcaggcgttaatgaaccttagtcaacgagtcagtttattagcctcaaagggcatatttgatgttttttacagtgtttatgcaagaaactttaactttgtactctgtgtttctcttgaagaagaagaaagcttagagtaattttagcagagctttggctatgtaagttgtgatccccctttcgtatggaaataaaagggtatttacaggttgtagggcgagcacagacatgcccatgacccgcctagaatttctgcaaaaagcccacaaatggggtaaaatacatgcagaaagagctgactgttgggcccctttgaaggatttgtgctcgtgcattgaagcaactgaacaataagggaccactgtacgtattggacacgtgtcagcaaaaggtttaaccttgaaaagaaaatgccaggaataactatttggcaaaaaggtgtatgaggtgcacgcactaccatgtcctggcacaggggacaagacctgatcttgtgttaaaaaaagcataatcgccgatgggtgattcaggtttatatccaaggtagacgtctgagaaccttttgggcagtcaacatcggtgacagaccctttgaatgtctgtccagatagcatttaggcagactttgagcttgggctaatccaagtccaagagtggtactacgtcttccgtgtctcggagactaacataaagtaagatgatatctatcggtcttgccagattctcggatctaagaaacttctctgtgacttggtttacttgaggggatttaattagtgagatcatgagattatatctccctttttatgccacatgtcacccacttagaaacacgggtaatatttacccttaagcttccgggaatttttgagttgcgagagcttggagtcttctttcagatcttgaagacatactcatgacacgtggtgattgctgggaacatggatgtatccatgtagctgtcatcaattgaaggatcaagaaccaatgatgccactggcatggcacacatgatatgtcttcaatacatctgttgataacacgcgcgtgtagcgggcacatctttcagaggaagttgcaatgatgtcaggtttattaacacgaccctcctttaatacacgatgggcttgaggcaggcaatgacgaaaaatgaatgctctaagtaatttttaaatgccatattttcatcttcccatctgttagatcaaatcgtgctttttggagggaggatctagactattcattttaaattgcatggatttggccaaaatataatcaaatcactttttaatttttacttctttagacttcttaaaacttttgctttcaaacttcaaaccacagccccttattccgaaaaaactttgacattgcgatcgtttccatcggtgaatgcaagaggtttcaactacttgatctagtacttcttgaaactttgtttaacctgttttccatacacagagccattaaaccttaaaatgttcctcccttagcccgacgaggatttcgacgttcaagctggcttcgatcgtgtgattgattgggtacacaacttttggatagatttccacaacaaccgttcttttcccactcacacatcaagtaagtatcctgacggttgttgaaacttactatttcgtatctaggatagaaatgttaagttcagactaggtctaggatatctgatatatgtgaatagaaaaatgatgcccgtagagttacatttttaggacagggttgaaattttcccactgagggagtgttgatgctgcctgaacagttaggatatgacaatctgaattttgtatacatttgcatgttcttaggattctgaaattagggtttggactatgcagaatgaacttttgagtgaatgttaaggttgttcatcttctgcacgcctgtttggagttattaggactccaaatgagcttgatttcaggaattttcttgaatcttgttctggtaattttttcctaagttcctggcctgttgctttaagtttcctgacgaggataggtttatgggagtgacggggtcgtcggggacctctcctggaaatgttatgggaggccgtcctcgatgcccatatagtcataggatgttgggtgtctaatttcttggtttttcctttcttttttgtttttccagtgatatcaacgacgaattccatcttgaaacagtggatattaaggaaaatccaatagtggtcattgaggaaaatctaactgttgctctcaccggggaggtaaatattgatgaagtgccggcaacagcctttgcctgggaacttcaacaggaccctgtcctagagactactctgagaactgctccatttggggtagtcgtaaaatccaaaggaaggggaaagccaaagctccacctgttgggttttatgcccnnnataaaactctttacaatctgattagt

SEQ ID NO: 112143 - DNA, 2935 bp, Cannabis sativa
  modified_base (2393)..(2400): a, c, t, g, unknown or other
ccacatcaatcttaatgggtccgtcctatatgacccatattttattgtttattccttttagtttacatgttacaatcagtaattaattagtataatatattatatagcatattatattaactctacaagaaatttatctgcaacttttatataatgtatataaggtggattaagtctgcactaagggttctcaaaattattatttttctttaaaaaaaaatataaattatagatttagtatttttaaaaataccaatatatttcttgaatagtattatttttatcctaaaactcacaatatttcaaaatcggccctatcaagaatgtcgtaaattatatatttttcaataagaatgtttaagctttgctcataacaatataaatgcacaaaaataatgtatcaaatggacaaattgataacattattatgtatatgatttagtgtttcatataataagcattattgacactagtggtatttaccattatgagaagtgaattctcacaaatgatgtcaatattttatatgataataagatattttaaatagtattaagtattaatggtacctatcatttttgttatataattagatgtaattctaacatactatctcatgacacaataccccacattaaccaaaagaaaaacatatccactcacacacacatagaaaaattattcaacttcaacaagattaaagattatatttttgatctccaaagctatctagattatatgttgcttcttgttgcaaagtaggtagcaatgtgatatgacacctatacatatatcatatatatgtaaattaacatgggcaatatacaagagatagccaataatttgtgtttttgttgcgacacaaataagcagattgaccatatcttctacacacacaataattgaagctatagcatattaattatataattcaactcaactcataattaatcttatatacaatatatatacatatatcagagagaagggctaaaaagtactattagtatttaaaaattctcctcattgccatactattatcgaatcccatataacttaaaaaataatttttaaagaatatcgctaactaattaattgtagggcgccagtagaatatgttggatactactgtacccaatagcaatattttatattttaagagcattgctattggatatcagtggtgctcaataccttttataggtagcatctcacgattagttagcgatgttccctaaaagttattttcttaaattatatgagatctcatatttaattacactaataataatatgacatcaaaaagagcgataaatgtggcttaatgattttcatatatatatataaggcatttgcatctaatgggcttgtaatttaatttatatatatatatatatttatatatatatagtggtttacatagtggtcatttaaaatattacaataatttttgaaaaaattcaagtaatttactttgtggaaaactagtttcaaattaacttattttatgagtgtataaataggctttataataatttattttggagttttaaaaaaaattgtttaattattttagtagctcaatctaaattgacaacattgtattgaagaggtctaggttggttgtattcattctaagttgttataattgtgttatttttcaaaaatagattctttatggtattattttagttttagtcttaaaagtggtaattttgtgtctttgatagaaattattatgagtgttgaataatttttcgtagggtaaaataaaagattcctctgaattatatgtactacgtacaaaaacatatataattgatcttttttttgttttgtttttgtttttttaggtatactatattccctagccaaaatatacatagacaaaaaaatatgttatgttatgttacatcatcccaaaaagggcataaaagatacaaaagatcaaatgattttgcttttgaataaaacaaaattgattttcaagtggatttgtactacataaaacactaaattaccaaattaccaattaactaacattggtaattaatgaaccctagaaatggttacttagttacttacttccataacttaaaaaaaagttgatttaatgtattaatatgtatgattctattaatctttgataagagatcctaataataataataaaatataataaaaatatattgatgaaaataagtataaatagttttggttagataattttctaagacaagttttttttaaaaagaaatacttgaaaattttacactctaaggcaagacaattgatcacttgtaaaattaaatttgattttgaggctcttttaataaaaatgttaaaaaataatggcaatttaaaaaggaataatttcataaatacacaaaaannnnnnnnaaaattacaaaaatataattttatagaattttacatattttacggtttttaatattttatttatagaaaatataatttgttgatatatttttatgttatattcttgttattttggtgttgatttttgctatttattttttatttttaatattattttgttgttgttttcctgctagtttcatattattttcttattattctatagaataatgtgaatatatatataaaaactttaaagataaaaatgtaaaaaatttaggtatttttttcccttaggcaaaaaagaccatatgagtcctagccctaaaactagggctaggctggcttctttgaatataactatgtataataagggaaatcatttggtgcctccaatgttcgtagtcttatattcccgtcacactaatatttgtggtggcgatattatgctgaggaaattacattctatactttttttatattgttctcttttatttttaccttctattttaaagtctatcattttttttaaacattgtaccaattttgcccctgt

SEQ ID NO: 112144 - DNA, 2294 bp, Cannabis sativa
tattagtaatggtcatcagggtggttagaggtatagatgaaaggtccaactgtgtacagagccataaccttctgaggaaggaagcgatatgaagagagtggggctccactgactccattgttaacatcactagcaattttacaagcagcctccattggacaaccttcaaggaaaactttgcactctttgagtttcaacatatcattaacatctgaaccaagtacatccgacactaaaaatgttgccatgaagaaaccattttcattacttttatggctcaccatggagaatggagttctctcgtacccattctcatcttctgctatgcatgtaatcctagccaaagctcctagatatatataaaaaggttaatgtataaaccagtaaaatcattaaaaagaaaagtgaaagtgaaactttgaataaatatgtaaataatcatataccaactagtggggtgtatttttggtttgagttgcataaaatgaggccctgaacaccaatggtattgatgtagttattcatgagatgattattatcttgatcatgatcatggtcattgtcgtagggttctgattgatcttctgattccagtggaagaagatcttgattatcatcgtcgtcgtcgtggtcatgtacttgatttggttttggagcattttcgtaattaatagccgataccactatcaataagaaggacaaaagaaccatacatgttaagatggaaccacccattattataagtatatatatatatatatatatatatatatattattggcagatttttaataaagagagttagggagaaagagatgaattagctgtgtagtagtgcaattaatatcaactcttttcagtttatatataatgctttttaaaataaatataaatatataaattaggtgtattatgctagaacaggacatgcaatgtagtttggaatacgatttttttaggaaaattaaataatgtcaactgcgatggttacaacatcatacattgatgcatataaacgtgccgccaattatataaaatttgatgaagtcagccatgatgccccaatcgccaagtcaactatattattactttcctacttttcattgatacagcagcctttttatattgggtattataaataaaaactaaaattagaccaaatggtcattacatacaatatcagcatatgattcagcggcgatagaagaagcctcaataaatccaataacgttcatctccaagggccacttagtaatattgtgaattgaacttaggaagagttttataaaaattacaacctaaaaataaattagatactcttttacaagcagtgatatatgatttgaaatctcccatctaagagacacatcgttgatagcatatatcactatttccaagtcactttcatcacttacaaaagagtgcactttataataattcttcttcaaagccatttcacacggctgcctctcaaattaattaacagtctcaatcataatcttgtctcgatcaaccacatcacaattaatctttatccaatatattggtggaggatacaagccatcaattgagttaagaattggttggtgtaacaagaagggaacatactctgcaaaacaaaaatacactgaaaaaatatggtgtgaaaaattattaagtacattgctagtttctcatttttagtcctccatattatgtcaactacattaatcgatgcatatataaaataatttcattagtatctacccctctcgacttgagagcctataagaatttaaccaatcccaacatctaatgtaattttcacttattggaatgagacccgatagaaagaatctccacaaatgattgctccataatttcatcctcatatatattcaattagtatcatcactatgcattctagaggcaagaaaacatgatggtttttaataaatatgaggtagattttattaaattagagctgcataccttttttttatttagagaatatactaaacttaactataagtaatgattgaaaacaataatcacctaacaatttatcaaatatataaagggcacaaaaaaatatccttctatagtaaggcatggtacgatggtctaattagaaatatcaaatgtatatattgatctctttttttatgagtatgttaattgtaattgtgatgactcgagatagctagtggcaaatatataatacagtagaacctttatccaagaatacacttgagactaagaaaattatattctaattgagaggttataattatatagaggtacactaggaaaaa

SEQ ID NO: 112145 - DNA, 2095 bp, Cannabis sativa
ttatataatgaatagaagctcaaccaaccttaatttttgagtgaaaaatgaatttatatagtgtaggaataaaaactagccgtttatagccgttagcacatttttttaggccaattttgctgtgattcaaaattttggattggttacaaccgaaaatctagttgggatattctggatgggaaccgaaatttcggatggctaacatgggcaaaaggttcatttttttgaactaaaacgtacataactttttacttgtttatccgattttaaaaattccaacgttctcttagttaaataatatgtaatcttaaaatcaattaagaaaatttagatatcatttttgtgaaataacttgtcgctcaagttagtgagccaaacttttaaacttaaaaacactagtgttctatacaaatcactttaacaagactaaagtaaacttataccacttgattgtgtgtactcttaatgtatttgagattcctagcttgatttgcatgttttgattcaaagttgatttttctccgagagttgacttttgactttgagcttttgaagtcctcttttggataaggtcttgaattcttgatctcttgataaaaattttgcacttatgaagtacgaaatacttgttagttatacttgttgaatctatttctttgattatgtttgactttaccgagtaaatattgatactttgtgaacttgcttgcaaaatgatcaagaaaaaatcagtaacaagtaataatcaaatatttgtttatcatcaaaataagtgagtgaatgacttttgatcaacaagatgaacatgaagaggtggttgaggaaaaagggaatcaagatgaccttagaagctaccaactagccaaagataaagaaatgagagaaagcaagctaccaaacaagtttggttatgctgattttattgcttatgcactgactgttgctgaataagttgatagcttagagccaattagatatcaagaagatgttagaagtaaagattgtacaacatggttacaagcaataaaagaagaaatgatatctttatagtataataagacttaagtgccagttgagaaatcagaaaagtaaaagttggtaggctgtaaataaaaattcaagaagaatgaaggcataccttgagctgaaaacactaaatacaaggaaagattagttgataaagtactcacacagaaggaaggtggggattcaatgaaattttctccccatggtcaaacaagcctctataagagctatgatgacaaaggcagcgagaccgaatttagaagttgaccaaataaatgtgaggacaaccttccacattgaaattagaaggcttaaaccaaacacaatcaccgtagataggttatttacagaagatgttgcataagtttggcatgagagactacacgtaagggtgtacgtcagccggtttgtcagtttatatatactatatttttctacccaatgtaaagagtgagttacaaaatataagtgcaacccgctcaaataaagaaaaaaagagtaattgtgatgtaagtccaatgggttggtctggttaacccgcccaaaccaaccactaatatatttttttttaaaaaaactagtttaatattttaaaaaattgtaataatgagagaaatatactttaaatctaaatgcttgaaaactctagtttgtattgccgatcaagagatgaataaatacattttcttttggccattcaaattgagttatgctctttattacttgttccatttctagttttatagtttgtgttcattcttgttttgtttcttcaatttcttcaacactgttatagccataacataacagtagagtttagggtgatctaattcaccacaatttatataacataactaatatatattcacaatgaacaattccccttcgaaaaaaaaaacaaaaaacaattcaagtacatcctattcctataccttgaggaactgaaaatgttggttgtagatggtatagactctgccccttatgcgagatgagaaaactgttggaatcgtaaaaatgacataaaaacatacatttatgaaaatgctaattaagatttttgccgaacttt

SEQ ID NO: 112146 - DNA, 5809 bp, Cannabis sativa
aaaaaaaaaaaaaaaaccaccacttaactcttacttgagggttttccattgcgtcacgaaccatatcctcatgattcacttccagaggatcatatcccaacttcgcttttcttacagcctgaaacaataccaataattataaactttctagtagtgaggacattaatagtggctcgattttaaaatagaaagaaatgaacaatgtcaatcttttttcttttcaggaaacaacaaattcactaagtaaaagctattgaacgatacagttttattcccagttcattaattgtatgagcatattacatgaaacacactccacacaaaacaaacacaactgacaagcaaaagaggagaagcaccgcaagagaacaaaacatatggaagatactgtttgatatctaattaaaacaaaaagaccaagatatcccaattgatagctatatataaatataaagaaaataaattatgagaataagatgatataaaacaacacgacgtacttgcaattattggccataagtcccaaaaccatcgcagcaaaccaggacgagctctttaaatccatggaaggacttagcaaggtgagtgaaatcatacttagcgatagacatgtgcttgaggtaagccttggccatggacgtgacccagggcgagaaatttcagctccacgacatcggcttaaaagggaagcagcgactatcgtcgtcgaaatcaaagcctccaaccgccatagatgccgcacttcccattgcacaactctgtcaacaacaatgaagaatgggaagaaggagatgcagcagttaatttagagaaagggaaaaagattaagagaaagtgtattcccgataaaaatggagttgggcagaacacgttcttcagtgtaattattcagaagtcgtataattgccacagaaccgtgtttgtgtattaaattttattttaccatataaataaataaaaaaaatgattattagtgtataagtgaaaaaggccctataaaaaactattaacaaatttcttacacaaaagataatttatgttcttatttatcatgcataccctctaacaaggtgaaatcatgttggctatcatgacaccatgataagaaacataaatccaaccaagtcgagaaagcaaaacatgatttccttcttgttctatgttataagcaccgttaattaaaagtaatgaaaagaatcagatatttaaaacaagcagaggaagaaaacattttcaaaatgcagttgcctaccacagcaattagcaaagcaggtacagaaattctctcagacaggatgtattgttggagaaaaggaatttttgtcagagttaaaagcaccagagctacaaagtcagatttaatagctcaaaatgtacctgaggaacaaaagtttgtgtgttctggccaaagcataccccataggaatcaggtaaaacttcacccgggtagcaagctggtgtaagttgaacagcaaaatcaaattgagaacttatttttccccttttaagaactatatttgagatggaaggaccaatgtgtcgtacctcttcagctttggttatctttactggattctactagaacaacagcatatacctcctgctgctgtcagtttaatcataaagagctgctttatcaccaccaaactttcattctgttcgaaaaatagaagaaaattttcagttagtattacaatgtctgcatttgtccttatctaaacaaaataaagcaacatttcttcagtaactcattataccgaattcccagtttctgtaatcagttgtaaacacttcattactttcatcctacctgaattactatcaatccgctataagtttacaatttttgtcatcgttggaactcgtacacattgttgtttaatatatgcaggaaggagtaacaaataatcagttcgcataaattagtgataaataccttgaagaagtagtcacaagcaattcacattatgggaaaggagctccaccattgattaaactagccaaagactcattctactattagtcttcttactttgcaagtatttcctttgctaaattactagctttctgcagctccccttttgaacaaagagaagcaattttcgagtagtaattgtcgaaattatgaaactgatatcttcctaaaagatcatgatctttcactattttctttccctttgtactgaatgatccaatgagcaaatcatttccttcagggacagttactgactttgacaggtcagaatcatcccgttcataatgtggttgttgtataggtgattcactgaaatatgtactacacatctgagatggataaagtatggacgcaacttcattaagcaaagtaagtgcttcttctatacttccttgctcacataagtagatgagcatagtttctacagattctgtttcttcctcagtgtcaactttgtttatcagctcgattatagactgggtttgaagcatttctctgatgatactcctgctttcttccatccttcctttggcacatagacctcttatcaaatacacaaaacccaagaaatcaggtaatacatctttcttcttgcactcgaaaaggtattcgagagcaccttccatatcaccattatggcaataaccatggattagtgcactaactgtaaatccatcaggcttaaggcctttggactcagaatcataaagcagctttagggcttcctctatttgaccaattttgcaataaccataaataactgagttatacacacggatattaggttgaaagcccataaggaccatcctcttgaacaactgcatgctatcttctagaaatccctctctacataaagcaccaattagaatagcaaatgtcacttcagatggaaataaatcaatcctctctaacgagtcaaataggcgaaatgcttcaacaaggcaaccttggcgacatagtgcaccaataactgaattgtaagatacaatatttagagtaatcccctttctcttagcaaaaccaaaaagatcaagtgcctcactgatatgtccttccctgcataggttgttaacaacgtatgtataatcaaagatatccattgcaggtagattgttctgagcctctgttataagttgatacaaatctaaaactcttccatctcttataagttccttgaaaagaattcgtggcaaagtgatagttgcacaattgtattttgttttttctaaaaataaaagggcaatatcaacatctttcagacatagataatgcgctaaaactttgttaacccgaggttcactaacaccatattctttcaaaaagctatttaaaagagctaaaattatctccttatttccaactacaagtagcccttttataagtaaatagtaagatttgcttgttaaagttaatcctttccttttcattattgtgaacacttcaagtgcagcctcaggataacatctcttgcacaggacactgatcacagtgtcgcataaaatatcatacacatctgaacccatgttctccatcctgtaaagtaaatttgaaatcttttctgctccattcctttctatgatttctttaattaacattgtacatatacctgcatccaatggcagattcttctcattgagttcaataaacaccttagtggccatatcaactacaccccgactgcagagttcactgataagacaattatagcaggcaactgaagaaattgccgtgctcctaaactcatcaaatatttctactgcctcatcaattcttcctactttacaatatccctgaatcaaggtacaatatgtaacagaatcagcaaacaaatccttttcttgcattcccttgtaaaccatatacgcatcttcaaatgctcccaccataaacaaagccttgataagtacattgcacataacaacatccatacagacaccttcttcttcaaatcttttttttgtctccaatatcccactgaaattttcttcaatcatgtacgcatgtaatagtgtagtgtaagttattgaatctcccgatatactcttggaaacattatctgcctcagttgtccttccaaacttgcacaatccattaatcaaggtgttgtaagtaataatgcttggactgatccctatcttctccatctcattaagtagatggaaaacacgatcgaaatctccaatcctgcaagtaccattaatcaaagttgcatacatgaattcatccgctttaatccccaaatcatcgacaattttcaaaacatcaaacgcctcctctaatttacctttgttacaaaatcccaacataatggcagtaaacgtaatcaaagtaggctggagtccaccactcctcatcttctcaagaaaaccaattgccttctccacatctcctaatttcgaaaaagcatctatcagtacagtgtaactaactgtatctggaattattcccttttgcaccatttgcctgttcttctgaaatacctccaataaaaccccttctgaaataaacccacaaatccaactactataaaaaacagcatcaaatgccactccttccttctccatcctatatactaaatcacaaacctcattaactttacccattttacaaagagcatctactaaagtggtataagtcactacattaggctgcaaagctccagaatttgtagcattctcaaaaaatctcactgcgaattccggcttccctattctacaaaaaccagccataaccgaactacagacaaaattgtcaaaagggtatttcacatctgtcataaactccaagacctcaatcgccttgctcatatcaccacgggagctaaatcggtaaatcaatgaacaaaatgtgaaagaagaaggcaaaatacctctgtttttcaagcaatcccgtaacaccaacaatgctctttctgggtcctcgtgatcaatgcataggccacggatgagagagtcccacagggtatttgtcgaagaattgaaactttctaacatttgggtcctcaggaactgctctgcttcttcaaacctccgcaattttagaagagcgcgtgtaaaaatggaatttgtatgggagtttcccttaatttggttggagctcaattgagagaaaaagtggatgattaaattgagtttacgagattgggataggaagatgagaaattgattaatggattcgacggtgggagtgaaccctcttttgagtaaagtctgaagaggttggagttttgaggaaggaatacaagaagaggaaaaagaagaatggtgaagtttgtagcgaagaaaggttaacatttggtccaagattaagtgtgtcagaagaagagaagagtaaagaaggacgatgaagttagccgagggagactgcccgggacaaaccggcgatgtaagctaaatgaccctctctcaactttttcttttagggaaatttactattttacagaatgtagcaacttttgaccacagtttatggtttcgggttggtgcaaaggatcacaaacccgtatttggtggaggccaaagcagtctatcacaggggtacaatggcaccaaatatagctgaagctttagatattaaagaggcgttaagttggatcaaggatcatgaatatcataatgttcaactcgagttcgattgtctctcaattgtctaagctattcgaagtaacatcaccatggtttcacctcttgagggagtggtgatggactgtcgatagcttctatctattttaaacaatgtttctttgtttttcattaaacgatctgctaatatgactgcgcacagctttgctagagcatcatattcttttctagatcgagtttttagtgggagaga

SEQ ID NO: 112147 - DNA, 2309 bp, Cannabis sativa
tcttctaataataatgtttcacctcagaaaagaatttcttgacttgttgtctagacatgtctggaggagtgatatttcagcaaggtaattgacataatcagcgaaccatgggaccataacatttccttgaagtaaacacaatttctcatcagggaactcatcatttatttggattttctccatatttgaactctcttgtaactctagtctcagtaaatgatataccaagtcttttgtacccttcttgtcttgaatctctaaatcaaaatcttggagaagaaggacccatcgaattagcctttccttcgcatccttcttagtcataaggtattttaattatggctgaatggttagtatacacaactaccttattcctaagcagatactgaacttatcacaaggaaacactatggccaacatctcattctcagtagtagcataattcaactgagcatcattaaaggtcctacaagcatagtagatgatacgaaaaaccttgtcaactcgttgacccaataccgctccaacatcatagtcacttgcatcatacatcaactcaaataaaaattcccaattcggtgcaatgactatgggcgtaaaaatcagcttctccttaagaatttaaaaggcttccaaacacttctttccgaactcaaaaggcactccattcacaagcagatcagacagaggcttggagattcttgaaaagtatttaatgaacctttgatagaacccatcatgtcttaagaagctatgaatccccttaactgacacgggagggggtaagttctcaattgttgataccttggctttgtccaccttgatgccttcctttagaatcttacgtcccaatacaatcccctcctttaccgtgaaatgacacttctcccaattaagcaccgaattagattcctcacatctaatcaagaccagttccaaattactcaagtagtgatcaaacaatgacccaaacacagataaatcatccataaaaacctcaataaaattcttaattaaattagagaaaatagccatcatacattattagaatgttgctggtgcattacatcacccgaatggaattcttcaaaaatagtagaactcttaacccgctaatctatccaacatctcatcaatgaatggaagagaaagtgatttttccttgtggccttgttgagcttatgggtagtcaatacaaattctccaaccagttacagttcttgttggaattaattcattcttttcgctctttacccccatcaggcccctttcttaggcacaacatggactggacttacccacttaatgtctgaaattggataagccaccccaacatttaaccatttcactacctcctttctcactacttccttcattggcggattaagccttctttgtgcatcaatggtcggtttgactccatcctccattaaaatttgatgcataatagttgatgtcggccaatatccatccaatggccttcatatgctttctcaaaactctcaacaacttcctcgtctccacatcagaaagtgaagttgaaacaataactggaagtgtcttgttctcacccaagaactcataccgcaagggatcaggaaggacttttaactctaattattgtggcttctcaatagatggcaatgatcttgttggaattactcttagctcttcataatactttatgttcaatggcccataaaaatcaagccacatagcatactctattgcttctgttccatcttggtcaaccacttcctcttgcaccaaacttggagtaagaggatcttcaatgggttccctaatacattagaaccaataggagaaaatacatctttctcacacagaaaaaaaaaatcatttatagtttattatttacgataattatattatatagtccgagcagtagtttttcattgtggtgtttcaacagttttctattgtgcagtagagctccaatacagtggtattttgactaggttattttatcttgggaacgactgataattttttactgcttgcacatttctgggcagtgcaacgaacgtcgtaaagagagcgacctagtccatgactcaacccaaaaattttattcggtaatattattcctgctgttttattttcagtagcagtttactcaacattacgaaggcaatttggtgtagactttcggctcctaagcatagattcattctattggcaagaatcgcctatcatatttggcctaatagaaatagttgtctatacgataaaaaaatgttttgctttggactgtcattacaaaaaatagctacttttagtgacatcat

SEQ ID NO: 112148 - DNA, 3283 bp, Cannabis sativa
tttgaaacatataatcacaatcaccttccactgtgttgacatcactgtaattatgaataacaatatgttctggatttattagaaattgtatattaaaccattatcatgaaaataatatgctaacttaaatgacttctaatcttctattgataacaaataactaaaatgagttttatttaggaaaaaaatcccaatagatcttaagataggcgctctaagatttggtgagataatgaattagaggttggatcttaagttttaggtccctctccctaggtctagatgatatgcctatacaggacaagggtttcactacccatttccctaaaatctgcgagaatggttgcaatggtttaaggctttacatttaataacaataaagaaattacataaaaattaaatatcttctctatttttgggggtggttaattatttgaatgtcttctataagcttccatcttcaagaaatatgttgagaaaatgctgaaggaaggaagagtaccactgtgggtgaatattgacaccagattagtgccattactcgtgtaagacaccatatgtgcgagtattgacacttgggaggtgccagtacttgtgtgatatgttgttggggctccatccttggagaaaagtgtccttgggcgagtactaacactgggagagtgtcagtactcatatggtacatagttgggtgagtactgacactatgttggtgtcagtactcgtgtgaaacttctctatttgggcatcttgagttgtctttgacaagtttttgaagattggtagacattttataggatttgagcgtcaaaacacccaagatttctctttgaactagcccacacgattactacgaaaaaaaggagtgtcagtactcgtgtaagatacttctacaccctttagggacttcacatatttgttatgtgatcattaatgttggaaagaaccatttggtcaccaatctcttcatccttcctcttaggcaagtacagacacatcctgagggtcaatactcatgtgctatgtgagtactgccacttagggagtgttagtactcgtgtattatcattttcctcctttctttgtgcaattttgactttaggtatcaagtcttagtgtatgcatgtgatattttgctcaaagtgtcaattctctttgggaatatcttagtatgcgactactaacattaggaagtgtcaatagtcatgtatcacatttcccttagtatttggtgatgtcatcttatccattgtactcttttattctcaaaaagttaaacattttagcctccttgttggattttttctcgaattagggctttaaactgagtattcatttctcagatttgttagagagacacaccctaggggtgcgactactgacactcgaccctttcagggcaatagtcgcatgcttccctctttgtgccacatggcactttgcttcaccctttgtcacttagtcaaggtcttctttgttaacttttgtgtctttaaggtgtattcttgtcttatggaccctcatgtaaaatgatgggtagaattttatttttatttttttattttttttgcaaaaattaggtataatagttgtttttaagcttttttttattattagtttttaagattatttttgtgttattttttaatttctttttagttgacacaatgtgttgatatcttattgatttttataaagttggattattttttggttgtttgtttgttgtcatttttcctgttaataaaaaaatgataatgtatttggtctttaataggtatgttttttagttataattctttagttttttaagctattgttgtgttatttataaggttttatagtgctgacgaaataagttgatgtagttaatttgtattttcggtacccatatgtttaattgaagagaaaatgggaatgaaagagaagtttggaaagaagagtggatgaaagaaataaatgaatgggaaaaaaaatgtaagtatgcatcacaaaattttttctctccaaatacaaaaataaataaaataataataataataaataatgaagaaaaaataattcacaatttatattttaactaaaatacttgactatccttatttttaattaaaataagttatatatataattattaaactgtaattaaatatttacatttttattccttcactcgtaccaaataacataaagagaaatacaatttcttttctatcaactcaattttctatcttccctacattttcaactattccaattttgttttctaagggttaaaatttacttttattaagttgttttgttattgttatttaattgtttttgtgttactgctacgttacgctactttgcctaaacttgccatgttgtggcctttatcgtgttctgacgcaatagctttgcgcacattaaccatttttgatggctttatctttcatttgtatgtgagttttactcacacatatagttcatatgtgagtcttactctctccttctttgattaggcattatcttaacaatactatttaaaataataaactttaaaaataatatttttgtaaatattagtataaatgatatttttcccttgccacaatatttttgtaatttctaaaatttatatggatatatttgtaagaatttgaaagtaaaaatattttttaaaaatatgtttcgtaacactatttttctttttttttttttgttaaatgagaatcaaattttgaaaaagaaaaaagatattattttaattttttttttaattatagtccatttgtattattttttttttcaatattttgaaccctaatctcataattaaaccttggattgggcttggattaagaaccccgacacttgggccagaatcggaccagaaccccgaccccaactcccagttcggacccggacacggcctggacccaagaccacgacacctaggccaaattggaccccttcctacacctagccccagcatggatatcgacccctgacccaaacacgaccctcgaccactagcctgaactcgacaaaacccaacctacacttcgtccccttcttggacctcggccccagtcccgaatccgaatcggtccttacttaaataaatttaataataaaaaacacatttttgtctttatttttaatataaaaaattaaaaacaattacaaaaaaaattttacttttagggtctgtttggaaataactgtgtaattactatgtagtgtaattactatggtagtaattacactgtatagtaattacattgtattttaaaataca

SEQ ID NO: 112149 - DNA, 1833 bp, Cannabis sativa
ttattatttgtatattatttttgtgttattttattattttaatgttttcttattattttcatttgattcgtaaaaatataaacaaataaagaaaacttttctgaaaattaaacgtttaggttcatttattttcttacaaaatgggttcccctcacaattaatgttttagtttttattaaatatgttagaatacacttacctactcaaaattttaatcatacaaaatgcaattgaaaaaaaaatgattaatttttggtgaaataaataaatatgaattccccaacaagcattcttctctaatcttcaaacgttttcattacaaacccccaacaaatattcttgccaaattgtcacatatgccaacggattttatacacatttttagttataataatgttattatttttaaaaatacatatttaatttattaatatcattatatcaatttatatcttaatttgttagttttttttgaaaccgagttcatttatttatcttaatttgttattacacgatggaaaattattataaatattatgtaaatatatcattagaaaattttataatgcatctctttaaaagggatgtactcatatatctttatccgttttagtatctgaaataattttttaatcaagttttttatcatggtcatgtaaattatagttattaagatattctccaaaatttttaaaaatttgaaaaagtttaatacgccaaaaattatatccaaatagtgtgttgattattttattttataagcgtgtaacatagattgtttgaacattattttctatattgtaaattattctatatttctcaaaattttataaaatatcttaaatagctataacgtacatgaatataaaaaaaaaaaataccgaaataaatagagggtacatgaatacatctttttaaagatgtgcattgaatcactctatatcatttacttatatttttaagctaaatttaatacatttctttgaattgtctaatactaactatttggttccttacgaaaaataaataataataataatactaactatttcctttgtttgttaacttcataatctctacttagtgggcattagaatttgaaagtgaattatagccaagttcctaaatcaccataattttgttaattttgaaagggaagttagtttaatttgttgttcaccttgaattaattactctgtttaagcttttcaaattaataaatttgtttacaatttgctcctcttatttttcaatcctcccattgcatggccatcactttatgatactggcaatatcttgttttaaatgttattacaaacatctttgttctattattaagagatacaaaaaatgtgcattatatatacatatataatcatataataatgtgcattagagcatatatatatatatacttataataatgtgtgtgtatatatatatttttggcgtaggagagaagttggtttgtgtggttatcataataagggcagggcaagaatctgatactaccaaaccatgcttttaagattaactcatgctctgtgtgatcaaaaaattgatcagtgttcttcatctcatctcggggacgataatgctttatctgcaaatattcctgtttgttatgctaatttgactgggcaaattccaaactccatgggaacttatatagattggaatcatacctgtctcccttcagaattctacaatgttaaagttcaccaaaatggatggggatcactctttccaatctaatgtttcttggtttgagctttgccatcttcagattttggacattgctcataacaatttatttagaaagcttaaaggcat

SEQ ID NO: 112150 - DNA, 6342 bp, Cannabis sativa
ttctacttttaaaaacagaaaactgattaaaaagtgttactaaacgccaccaaagtatatttgacgatccttaaagtttttcaatctacaaaacgacaaattacattgttcttcttcccttattcttcattgtaacatgcaccatgttgagtatgttgagtatttcaagttatttcttctctcttatacaatgaaactttaatacaaacatgtctgccattattaccgcttctgctctagaccccaatggtgccctttactctcgagccaaggacaaagccatcactagaggcacctacactacccgcgctccgctcctccttcgccggctgcgccttcttctatcggcggctaagctcaggctacttcttggtttctgcgtcttctgcgtcctcgttttcgtcacgtcgaggcttagctatctgatgggttggatccctcatcactcttcttcggtctcctcttcttcgaggtttgtatttatggtttaaactgaactaaccaatttctgaaaagtcggtttctgtatgctttcttcttgattatatgattttgattaccgttgtcccatttgcatttttttaattttgaataattgaatagggatgaactgtgttaaattactcgacgatcaattgccctgaacccctcagaattagataagtaggaaaatattgggaaattgggaatacctggaactttgcaaatccgtatctgttgttctctgttaaaggatttgtcgtttaagattacttaatattggtgttagtaatgagtttggattagggaactatcgctttgttgtgtgatgaaatgcaaggaattgactttttgttgtaattttcagaggtggctacactgttcttattaacacttggagaagaaattctcttctaaagcaagctgtggctcattatgcttcctgtagtggggcggatgctatacatgtggtttggagtgaaagtgatcccccatcagatagcctgaaaagctttcttaggaaaatggttttgtcttattcacaaaaggctcataaacccaatttcaaatttgacattaatgaagaagataatctaaataatagattcaagccaattaaggacctcgcaactgatgccattttctctgttgacgacgatgtgattgtcccgtgttccaccttggattttgctttcactgtatggcaaactgcaccatccactatggtgggatttgtccctcggatgcattggctggataaggaggttagtaagtttgcttccgaagtggaaacttttccttttctttgttaagattctgctttacatcttgaaaggaaatactactttacaagttttttcaaaaaaaaaaatactactttacaagttcattgatatctacttgcgttgctatataaaggattcttagatgttacttaggcattacgtccttgatttctgatgagtcatctaagtactccattgctatacatgcttgtttgacatttgtaggacctgattggtgttcattttacattgtagacaaaaattttaagttttgtatctgtgactgaatcactaaattagttattccacaaaattctttccttatgttcttgccaataattttcaccattataaaatatagtgctcctacagtactcatatatattttttttttgcagctgtcttgtatttcaagtaacatcatctttagtggttttatttttaaaaaattattccagtaactagctggttgagctatagcaaaaccatactctaaattgatttcatcacttgtttgggaactgtcacaataataatgtctctggttttgcaacatcttatccatctgataggatttggctaccaacagagagaattaaacagtaaataaaagcaagagaaagtaatttgatgaaaatggagtgtattgataatatccaggaacttcgagagtctggtctctcccttcacaatgatacaattctcatcaccctcataaagctaaacattacttatttatactagtactcaagggccttactaagcaccccactctacccaaacaaaacccccctaacagaattacaaaacagcaactacaccttagcacgatcccctgctccacccccactcttagctgtcctagtcctcttcctggcatacacaaatgttagaggaggcccatcaatactgccgacctgaagttttaccttgtcctcaaggtggaaattcgagaatttggtgtgtatgacagcaaagtcttcccaagtggcttcataatcttcttggagattcttccatttgatgagagcttgagggctgaccttgtgagtactggggcggatggccaacaacgattcgggtcaagcatccattccaaatccgttgtgatgcctggaggaagcgaggaagcttgctggttggtacctaaagcagcacgcagcagtgacacgtggaacacgggtgaattgtagcagtaggaggaagctcaaggcgatatgctgctgtaccaatgcgttctaggactgagaaaggcccaacaattctgggggagagcttctcattaagtcgtttggccaccgtatgttgacgataagggagaagcttgacatcccatgtctccaacctgaaattggacatctcgatgcttacggtcagcttgggctttcatcttttgttgagcacgagtcaaattttgcttgagcagggccacatggagtcatgatcctgaagcatagtctccacgggcaaagctttggtgctggtttgctcaaaacggagtagtggtggtggttcgttgttgtacaaagcacggaaaggagtcatgctcgaagaggaatggtgagaggtgttgtacaagtatttaacccaaggtaaccatttaacccactgattgggtttaaagctcacaaaacaccttaagtacgtgtcaagggagcgattaacaacttacgtctggccatcagactgtgggtgataggaagtgctgtgcttcagcgatgtgccttgcacgcaaaagagctccttctaaaacaagctgagggaaattttgtctctatttgaaacaatagacctgggaatgccatgaagcttgacaatttatttgctgaagctgttgaccacggtaggggctgaataaggatgacagagaggaataaagtggctgtgtttggaatggcgatcgaccactaccaaaatggaatcaaactcgttgaaacttggaagaccttcaataaagtccatagaaatatcttcccaaacttgctcgggaataggcaatggctgcaatagacctgttggagattgggccaaatatttgtttatttattttttgatgaatcaactacaatcttcattactccaaatcaacttttttacaaactaatagcctcaccattatgggagatctaatctgtcatctatacaagtgtatacaatataatgagtaaaaccaatctgaatccatcacactaaccttcttttgccacgtacaaaatattctttgttttacaatttccttgactctacaaacaactctgtcagtatcctcactagaagaattccatagcttgtcattcctagccttccagagatggttcactaaactgaccattacagcagctaacaccttcttttcgaacttttgtatttagctctctcaatccatctgagcaaccttgttacagaagtagcttgcactttccattggagccatttcttcactatcagcaagcataaatgagagaatgagcactcaaaaaacagatgctcatttgtttcatcttgcaggttgcagaatagacaactcacatcctcaattattccaaacttatgcagtctatctcttgctctcaatttcccctgcattactatccacagtataaaattgtgttttggagtatttagtctcccccaaacttcatcacactagtccactctgtctacagaagagcataatagcttataaccacaggaaacctggtacttattctgttgaaattgttgtagatctaccagatttttaacttggtttttaagtgctacaacctgtttccagtactatcttccctgagctggggcagtatagccccaccattcttcattctttatgtatacactgtgaatccacttaacccataagttttcttccttattagccactccccatacatacttgatcatagtagccttgttccattttgcaattctttttgatgccaattcctccattttttttggtttgacatacaagatcccaagtaaccaatccagacccttgaaggaagtgcttactcttccataggaatgctctacagattgcttcaatctccttgatcaccttttttggtaggagcaaaatttggccccaataagcatgaatggccattaatacaaaatttataagtaatgttctccctgcaattgataggtttctagtgctccaagtcttgattcgagaggtcattttctttgccagcactctagattcctgccttgaaattctcttagcacatattggtattcccagatacctgaaaggaacctcttgtttgcaaaaactagatgcaattagtattctctatacttcctcatcctgcatgccactgcaatacatagctgttttgcagcattaggctgcaagtcagaagtgcaggaaaacagttttaggcctttcaacatataatagatacttttgaaatctcctttgcaaaatagcaatacatcatttgcaaaacacagatggtttagcttcaaatctccacacctttcatggaactgaaagtctcctttagtgccaatatttttcataattcttggcatatattccatttcaagtacaaaaatcagaggagacatgggatctccctgccttagccagctttttgattcaaaaaagccatgcactataccattgaacataagtgagaatcttggtgttctgatacaattcataaccaattttatgaattttgcttgggtatctgtaagctaataagcatttcttcaatgaaatcccactcaatggtgtcacaagctttttgcaaatccagctttatcatgcagtttgctttaatgtctaataaggtcatggcatatcatcacattgtgtgctatataccttcctttaatgaatccaccttggctttgatccacaagtgaaggtagtatatgctttagtcttgaacatatcaacttagtagcaattttatatattacattacaacatgctataggcctaaagtcttcaattgtattagggcatctaaccttgggaacaagagtgatgacagtagagtttatctccttcaaaattttcccagattgtagaaaagaatccactgcttcatagatatcattacccatcgagtcccaattatcctaaaagaagaaactagaaaagccatttggtccgggggacttcatgccaggtatttcaaataatgctttcctaacctcatcttttgtgaacttttccaacagcatctcaccttgttatggattaaccagtggcctcatcttaaccacactagcgaggactggtcttctgttttccatcttactccccagcagagcttggtagtacagtacaaaagcttcaataatctttgcagggtcatcaattctgacacatcttgttgttcaattgatagaattctattttttcttctttgatctctaatactggcatggaataggccagtattatcatctccctctttcacccaagataactttgctttttcttgcatcaaagcctgtaaatcctgatgcactttcatatacttgtttttggcctccggctcattagcatgtaattcagggttaagtggttctcgttgtaacttgttttgactttcattcaaatgctctttgagttgtatgtctgcaacatgtaagtcagaaaatccctgcttgttaatatcttttagaactggtttcagagccttaagcttggtttttacttgaaacatctttgtccctagacaagattgtgtccatacttctcgaactcttttgtcgtactctggatgagacttccacattctgaagtatttaaatggttttcgaccactaggtacctcaggatggaaagtaagcaaactaggagtatgatcaaaaagcctatcattcagaaatacaacttctgcattagggaatttattggtccaggattgattggctagcatcctgtcaatctttgagtaaatcctctcttttccatgctttttattactctaagtaaagaaactaccactgtatttgacatcttccaatttacagttttcaacacagtcaatgaattctgtggctgaatgatacttaactttgtgaccaatcctctcttccttggcaagaa

SEQ ID NO: 112151 - DNA, 1986 bp, Cannabis sativa
aaaatcacgtaatacgcctaaggtagttagggtgttacagaacttctagttcaaggattacgatggagagtgggcacaggtgatcaaataaattataaagaagactcatggcttcctggttacacttgtttcactccctattgttttaaaggtaccaatgctgctcttcaagtttctgatctcattgatcagcatagaagatgggatttaacagctatttctgcaaactttggccatgctgacatcaacagaattctctccattcctctcagtatttttcccactaatgatgtcatgatttggaacgacactatctcagggaactacacagttatatctaggtatcactttgctacttcacttattgatcaacaagacacaaacaacaactcttctcttgaaaattggtggacaacattctggaaattaaaaattcctttgaagcttcgcatttttgtttggaaagttttccataatgccttacctgttgctgcaaagcttaattgaaagcatattgtagaaactcctatttgtcccttgtgcaaattacataaagaaaccattaaccatgcacttttcttctacacaatagccaaagaggtgtggcgcctctcacaattgacctttaatttaaagatggctgcaacgactacctctgaagaattcttgctatatgtctctgccaacacatcaacatcatagtttgaatgtttcctagttctttattggagtatatgttatgaatgcaatgccaaataccatgataaaccagcaaagcagccggctgcaattctgcgttttgctactgcatagcttgcttaatatcaggctattacggcaccattcatgaactcttcaccacatgttgctgctgatatgtctctagtagctgtcacaacaaaagttcccgtgaagattcaatggacaacaccaccagcaaggatgtttaaactaaatactgatgcagccgtggacaaagcaattggaattgtaggtattggtgctgttttgagagattccataggaaccatcactactgccttatctaaacccatcagaggttgtttcaagcctgaagagatggaagctctagccctctctctaacacttaaatggcttctcactctcaatttatctgcagacttcattgaaacagactcacttgtggtggttcaaggattgaaagctactactacttgtaattctgcttttcacactgtcttgaaagatgttaactttttagtatcctttttcctaagagcacaaatcactcatgtttctagatctgctaatacttatgcccatgcaatggctaagtttgctcttacggtggatactgactgtttttgattggaggaatgtccacctccacttatgactgttatgtaattttttccaatttatataatggtatttttctcaaaaacaaaaaaaaactttaattacccttatttctttttggtggacaaataccagcactaagataccaaaaacataactcctaatttaatctaaggctataatgcttgggtcaaacacctcaaaaagatgatggggtattgtataatttgccttattattattattattattattattattattattatataaagtagttagaagtagtctatatatctacatatatataaaggagagatataaggtgatgacgtgacactttaaaatctctttaattagtattatttgttcttttcttaattctctcttttttttaattttttattaactttataaatattagttaatataaaatatacaattttatttattttctcctttttatttttatttttttaaacaataacttcaaatcaatatatataataaatctaaaattttatatgacgtttttttaatttttaaaaataataactatgtatattatttactataaataactatatatatatatatattgtttttttaaaattagaaaattttgagtttttatgcttaattttt

SEQ ID NO: 112152 - DNA, 6675 bp, Cannabis sativa
agagcaatcttattcaataggcaactcaatttttggaacttaaatttctaaaagaaagagaaatgaattatactcttttgtttggattcagaaaaagtaatcttttcccaaaagaaaaaaaaaccaaattgaaagttcagttttattttcttgtttgctgaaaaaatgtccaacttaatctatctcttaccctttaaatcccaacgtcatattttcttgtatttaaatctccaaactttaaaaattaacatcactagttattttcacttttctatctaaagttctgtcaaaatttaagactttgtaacaaaattctcaaacatatatatctgtttgcacttatattaatttttcagtaaaatatctataaatatacatatttttgaaactcaagtataacatagctgagtttttgttcataggtttctagacaaggctgccatacttgaagaaaaggatcacattgaacttgaccaacaaaaacaacaatacaatccgtggagattagcaacagtgacaagagtagaagaattaaagctcatattgaacaccatccccgtatggctaacttcactggcttttggagttactgtgtcacagtcctcaaccttcttcgtcaagcaggctgccactatgaacttaaagttaaacgaaagcttcagtattcctccagcctcggtatctagcttcggtgccattgccatgatcatctctgttactctatacgacagaatcattgtaccgtttttgaggagaaccacgggaaatgagaggggattaagcattctcaacaggattggaatcgggctgatcttttcgcttgtggcaatgcttgtttcggccttggttgagaaaaaaaggcgcggtgttgaggccgagaatgggaaattgagtgtgttttggttagttccgcagtatgtaatactttgtgctggggatggctttactctggtgggcttgcaagaatatttctatgaccaagtgcctgattccatgagaagcttagggatcgctttgtatctaagtatacttggagttgggagctacttgagtagctttttgattagtgttgtggatcatgtaacggagaaaactagtgggaaaggttggattgggaaggacatgagtaatagtcgtttggataagttttattggcttttggtagccattaatggtgtgaatttgtgtctgtatgtgatagttaccagggggtatacttacaaaaatgtggacagggacactgataagaatggggttagtggtagtgttgaaaatgggattgaacagatatagtttataaaatatgtaataattttggtacatttcaccaagaataatgtaatgtagaatatatgactgaacaatcacttggctattgcattagatctttaatatatttatagagtttagttaaagaatctgtaactacgtggtataacagctaaacccattataaacagttatatcctctacaatctgaaccatggaagggggcatgtttaataacagttattattattgttgttgagtgtgcaaccaaagtctcatcttaactagaaatggaaaggatcgtgaatatataagggtgaacaatatcttcattggtacgaggtattttggggaggtgctcaaaaataaatttgtgagggcttatgcccaaagcggacaatatcataccaatgtggaggtacatagtgtttcacggtcctaacaaatggtatcagagccaaatctcaaaattagctaactcatctcggtaatgggatctgtgtatgtgctctagtagatagatggtgtactatggaggagttggcctgagaaaaaagcaagaactctcgaggtagagtggatggatggaagattgtttgaagggagacaatgtggtccttagtttgaaggaagaattgttggcataacagtgacttgatttttcttcattacaagttcaggttacaaagattatgccctcattacatgtcaaagatgtataattatttcttaaacctccaacaaccttttggttaagttagttcattaaactaacgtaactgtgaaatgtgacagctagcatatttggtttcttgaactatataaaaagacctattctattcattccaaggagagagaccataagaccaagacaaaaaagtgagggactaagagagtgagagagaaagctgggatggggaattgagtaacattgatgttgggatttgccacatcaatccctacaccaactcaagcacacattagatcatcaagattaccattgaccttcacattcaattaaacaatttatgatcatgataaacagtttacacaaacatgaattcttaatctttaacagaaatatgattaatcttcaaaaatctaatttgcaaacaacacggttaagattaataattcagaggtaaacaatcaagatcatagacacaaaaagttacaaagaaagtaaaagagaacaaacagagaaattttctgagattcaccctaaaacacagagttacatctccattaagctcgccataagaattggtttgctcttgcactataatcaatcaaatattacatcaaatggtgtagaaattataaatcgcaagttgactgataattttttgatctcactcttttgctttcaatctttctttgtaacactttcttacttttcctctctaactctcttttgttttctttctctcgagattacttctctctctagctctcttgtagctcaattctttgctattaagtgtgtgtttctaggataccttgagggaactaaaagttatagactatgattagggagaaacctagtttgaaaactatactaagtaaatatgtgaaatttaaagaagatatattttcttgtgttattaactccacctctagtgcaggcgttagttctgaaactaactattaaacccaaaaattagcactattaactctcgatattagccaactagcagatatttgctcctccaaataccccgaagtgatttggcatgctcatagtggaaatccactcggcatacacatggtgaaagctcactcagcatgcatgcaatggagagagtcactctgtatgcttggaaacatgtcactcggcatgcttgggaacatgtcactcgacttgcatgcaatagagagagtcactcggcatgcttgaaaacatgtcactcggcatgctaaggaacatgtcactcagcatgcatacaatagagaaggtcactcgacatgcttggaaacatgtcactcagcatgcttgaaaacatgtcactcggcatgcatgcaatagagagagtcactcggcatgttgaggaacatgtcactcaacatgcatgcaatggagaaggtcactaggcatggtgaagagcatgtcactcggcatgcatgcaacacataaggtcattgagcatgcttggaaacatgtcactcaacatgcttgagaacatttcactcgccatgcatgtaatagagaaagccccttggcatgcacacagtgaagtcactcggcatgctcatcatgaagtcactcggccatactcatcataaagtcacttggcatgctaatcaggaattcactcggccaccatgctcaccatgaagtgactcggtcattcatatgcattcaaaattgactagcatgctcgagagataccctatatgcacactcaacatgccctcccacaacaacatagttgtacttagtgaaattttcctaaatgttgaagaagaaggaaataagagtacgatcgcaaggatgaggcgtgcatgcaaggtgggtacaaccacgtctcctataagatttgagggccgtgaggtacaagtagtgggcgaacaacacctgcaaggcctaacaacctgatcaagggtgcacagtagccactaatctcctgcaacttgggaccatgtgacaccaaataaaggtacaaagcacaagagcaccatctacaacctacagcacatagaccatggattttaccatgtccttgggaccactagtgtaccctaggccattagagcatataaatacccctctctcaaatgtaagaaggggttggaaaatcaatcttgtagtttgaaccaatacaaagcattgttttctctctactctcgatacccactctagtttgagtttacactttatcttcatcttatctctaaattttgaattcaaactttgatttttttggccaaaagttggttgacgggtttctaccgtcaacagtttggcatcgtctgtgggaacagcaagctaaggttacattattttccttacatacaattattgcaaaattcttagatgctctcgtcgtctccaagatatggaagttcaccttgacgacacttaactgatcacttcaaggcgtgacctaccaccactcgttgctggagaacaaggtgcaaatggtcaaaggcctcaagcaagagaagaaggtgcgaacggtcaaaggcctcaagcaagagaagaaggtgtgaacggtcacatgcctcaagcaagagaagaatgtgtgaacggtcacaagcctcaagcaagagaagaaggtgtgaacttttggtgtattatgtgagttacttagacataatgggagattaaaagtagatggattggtgactatagaaaagcaagtatgtattttcttaaatatacttgctcatcttgttaaaaataaaattcaccataagttcaagcggtcgggtgaaactgttagtagatacttcaatgcaatattgagtggagttcttcgattacatgctagcttgttagttgcgccagaacctgtttcagaaagttgcaatgacgatagattgaaatggttcaaggtgtattagcaatttttaactaagaagttattagattttagaccattaaaatttagtttttatattcaaattaatattttgttgacttcattttgtaaggaattgtttaggagcattaaatgagacacatattgaggtgcatgttagtcaaactgaaaagtcgagctatcgaaatagaaagggcaaggttaccaccaatatgttaggagtttgcgatcgaaatatgaattttatatttgttttactaggttgggaaggttcggcattagattcaagagttctacgagaagcaataactagagcatacggtttaagagaacctgaaggtagagtttgttttgaaatgtgcaatgcactttaatttataccttaaactacatagagttctcaataatatatatttatctttgttaagttattattatcttgtggatgctggttataccaattgtgaagggtttcttgcaccatacagagaaataagatatcatttttcaaaatggcaacatggatgtgcacttacaaatgagaaagaattttttaacatgaaaaattcatctactagaaatattatagagcgttgtttcggtttgcttaagattcgatgggctatattgagaagcccttctttttatttaatcaaaactcaatgtagaataaggactacttattgtcttcttcataaccttattgggagagaaatgtcatatgatcctatggaagcagaattagatgcacaagatagctcacaaaaccaaactcttgatgatgtaaatattattctcactattgaatcatctgatgcatggactatggactacttggagagatgctttggcaacaaacatgtttaatgaatggagagcaagtagaggtcgtagatattagtaatttgttgtattaaatgttcttttcaatgttgttgattagtatagttgaatttatatgtctgcttattttagacttttgtttgaattatacaataaaaatgcgtttatatttattagttatacataattttataatatgtttcttcaattggtagatgttgtatatcattacttttcaatattttgtattatacaggaatggaaagtggagacaacatgcaaaatacttccaacccaaataaagggggtcggggtacttaattttcgaggaggaaccatcattgatagtgttagagtcatttgtgttgcgcggctatcattgtgacagtggcttcaaagctggaacacacccattaattgaaaaagaattacattttaagtgtcccaattctagattgaaagcaagcccccacattgagtcaaagataaaaatatggaagaaacaatatagtatagtatttgacatgctaaatgtgagtggatttggctagaacaaaatattaaagtgcattcaggttaatagtgatgaagtatgaaatgcatatgtgcaggtacttatattgaatttgtttagttggtttcatattgatgaatactgataaactacattctaattcatcacttatttcaaagccacaaaaaagtagatggaggggtaaacaatttcctatctataacaaattggctaacatctttggagcggatcgtgcaactggaaaagccgctgatgctccagctgatatggctaaagcagacgatcttgaagatgattatgatgacaatgaaatgcaagaagaatcatcattttctccaatatttgtcaaccaatcaagtggtaatcaatcccagtttggaagaaagaagagaggtagacatgttagaaatttatatgtatgaactgaaacatatatgattaagtataaatgcggaattaaatcaaacatatatgcactatgaataa

SEQ ID NO: 112153 - DNA, 808 bp, Cannabis sativa
ttcttctttcttctcatctattctatattatgttatattattttatagcagaggcctaattattagaaacaaatatttatattttttttaaacaaaaattaaagtcaattttaataaatttattattgttgtagggatttaattgttataaaaaacttttattggggcttatatactattgtggtagataattattaaattaaaaagatttattgtttattttttattaaatgaattttttcaagtgggggctatagtcccgtatacattaatatgagttcgtactttatattttatgatcagattacttatatttatatttatatcttttcatattaaaaattaattttgaatttgttttgcaaaaaaaaaataattaaagtattaaatttattattttataaaactaaataattttggctaaatatagagtactattattataaaatataaaatatagctacccagtaataataacagttatgataattacattcataattaaataccatatatatactagcacaaaagaaggaaagagaccccacagccaaataataataacaaaaaaaaaaaaagcaatgaaaatacatgtgatatgcgtaaaccctactagagagtaagctcaactaacctatctcaatcattccacataaaccatgttccatggattacaatacatgatcaatgatcatcagttcatcaccatattataactcactatcctcttattcataattggaacattatataatatatattatccaattattattatggggacttatgaagtccctcactttcattt

SEQ ID NO: 112154 - DNA, 1148 bp, Cannabis sativa
ctctctctctcaaaacacagcttggcttactttcaagttcatttacaaagctcaactcaaagttggtctcatactgttttctgggttgaacgagaggtttggtggtgaaataaaacgaaatgaatatcttagaaaataaaaagaaaggaaatgaaagctgggttggttgcagggtattgttgttacaggagaaagaatgtgtggagagagagagagaaagcattaaatgacatgaaactgcaacctctgaaaatggcctcagtgtaggtgaaagcaataaatgagaagttaatgcatatttgatctttccaagcttcaatttttttaaattttttttttaaaaaaggcaaacacactcacacacttacttttccaccttcctcgatttattactttgttctttctttgcagaatgtatgtatttatgtatctaaacttccctccctttgtacccagtttttcattttcttaatagttctacacataacacaacacaacactttagcgtaaagctctatagctttttcttcacatgtctcttcttgcatgcatgatttttgttttgtctctctctctctctctctcttttttaagagagattattttgtctcattattaacggttgcttttttatttattattttacttgtacaataagcttcgaaaaatggtgtatatatatatatcattaaaggatcacagtttattttgtcatagaatattaagggaactccgtatgagatacgatgaaatgagagagttaggcttttggaaaacatttctatttcagctgatactagcatgtacttttacagggaccattatttgttatttctttcaatgatcatcattactaaatctatagtttaatttagaaactaatctaccaatttgatctaacttgattttattttcttattttttttattcaacctagctatctttatgtataggtagcctttgtcatgtttttatttagcaatataagtctgcttggtttgtttatatatatggttactatttttttagggatatatggttaatatttactaatacaacaatatttttttgaaatttttacattaaaaatacaaaatattaattttattaccaaaaaaccactacacggttacccaaacatttatacc

SEQ ID NO: 112155 - DNA, 3962 bp, Cannabis sativa
tcctattctcattcccattcctattcttattcttatattttcattcctcccaaccaaacgcctaagtgttttgttaagggaaaagaagttgagttgtgataaactaattgtatttttcagttatatcttttcattcggttattaactgttttcaattagtcaacttctcttttagtttcagctcttgtatatatacttgaactctgtaatcttgttcaatcaatgaaatgctgttttttttttttatctttcttcattttctttctgtctcaacaatctttacatatataagattttatttttactcataacaccacttttgaggggattaatttttaagttggagggtgagacgatatcttgattctttcggtttagatcaagtttaatcaatttatttaatttttataaattaataaatggaaagaaaataaggtaattaatttgtatactacatgtgtccattaaactaacaaaaactgagtaggtatcaacaaaatgataaaaaaaaaaaattgagttttaaatatttgatttttagtattattagtaatgaaacaaataaaataaggatttgtggtgcaaattcttcttaagcattttttctttttaaaattattatattaaaaaattgtaaaaatttggagatgcggggtatcgaaccccgtacctctcgcatgcaaagcgagcgctctaccatgtgagctacatcccctgctatatcatctccaatcttaaaagaacacaaacaagaacacctttccttgtaacccacgacacgccacatacaatatcttgacttttataaattgagatattaaaagtttaaaaccagtcttctttgtactaaaaaccgaaaaaaaaaaaaaaccagtcttctttctctttcagtaattatcaacaattttttttttttgtcattatgtgtctcctaacacaacaactcccaccatattgcagaaacaagctagccagtgctcacatagctaatgtgaatcgaatatttaaacaaagcaattctaaaagcacacacagaacttcgtcatcacttacgacaccgtaccatatatctctttaaagtttaatctgatatatataatatttatatatttatgtataaatactacattcatcctcttaatcctcagtcctcaccaccacactcttctcttactattccactctctctctctgctgctgctacttcaatggaacccaatggcaccatcctcttcaccactgtaggaaggcctgaatacggcttcgatatcttcactgtcaagctccaatctcatcaactcactggcccagaacgccgcctcaccgacggccactccgtcaacttcaacgctcaattcctcgacgaagaagacgataccaacaccatcgtttttgtatccgagagaacaggttcccctcgaatctacctcactcgtccgggacttcctcaccccagaccattgcctttcgtctccgatagcctcttccatgaccgacctattatcaagaaagataggctttacttcatatctgctcatgaaaagcctgaatccgtttttaaaagctggtccgctttatactctgcttctctggttcaagataagggtgaaattaccagattgaccccgtacggatgtgtggattacagccctgctgtttccagctctggtaaattcgtcgccgttgcttcgtatggatcccgcacttggggcggcgagtttaatgagctcaacactgatattgttgtattcgattcatccgatcataaaaacagagtagtcgtttctgaacgaggtggttggccttcttggtccggtgattccgccatttactttcatcgtaaagccgatgatggttggtggagcattttcagagttgattttctagaaaatctcgcttcgactacggagtttccaatcgctccgattcgagtcacgccatccggtctccactgctttactccagcagctatgcacgacagcggaaaagttgccgtagctacacgacggcgcagcactaaattccgccacattgagatcttcgatgtggagtcaaagacttttactccgattaccgagacactcaacccgaatatccaccattacaaccctttcgtctcgccggactctcaatctctcggataccaccggtttcgaggtcagtcgtgtgcaaacggcgtttcaaagattccgcgcttggatcaggtgacgtccgcggtgaaagaactccgaatgttgagagttaacggttcgtttccctccgtctcacctgacggtgatctcgtcgcaatcaaccacgagtttaacgataacggcggtggcctttcgatcgttaaaatggacggttcaaaacgttggacattactcaaagggcgtacagtattctacaattcgtggagtccagctgagaagaatgtcatatacacttctattggaccagtctttcagtcagcgaaagtaacggtccagattgcacgaatcacatttgatctttcagatctttacggtgattatcgtgaacacacaatcatcccctgcgatttgaaagtcctcaccgaagaacacacagggaacaacgctttcccttcttgctcccctgacggaaaatccgtcgtctttcgttccggccgttctggccataagaatctctacatcgtagacgcggttaacggtgagtttgaaggtggtatacgacagttaacagacggtccatggattgacaccatgcctagctggtcccctaaaggcgacctcattgctttctcatctaatagacacaatcccagtgacgtatctacattcagcatatacgtcatcaaaccagacgggtccgagctgaggaggatccacgtggcagggcctgaaggatctagtgaggtggacaaggagaggataaaccacgtgtgctttagcgagagcggcgaatggctgttgttcgcggctaacttgagcggcgtgacggcggagccggtgtcgtggcctaatcaatttcagccgtacggagacttgttcgtgatgaggttggatggtagtgggttgaagaggctgacgtgtagtggctatgaaaatgggacgcctacgtggatttctggtgttgacgtggcaacgagaggtcttaacgttggagttaatgatgaggaccaagttggggatgagcttaggggtgaatttgacgagcctctttggataacttgtgagatataaagatggataagatggcatataaccacttaggtggcattacaaaataaaaggagaactcccataaatgcaaagggacatatgttttgctttctttagtcaattttcttattccaacccagtccctccaataaataagtgtcatatgttttgctttctttagtcaattaattatctttcggtcacttctattcttgttagctctatttctccataataatcacctcgtataattaaaaggaggagtgttaattatcatctttttattataattttttaatcaattttcatgctcgaaatcacatatcgaaatattcttttcaaattttttttatagcggtattcgttatagttacagtttatctatgtaaacttttgaaaaattccgaatagtttacagtaccaaaaaaagagttcctaatattccaatttacctcgcgcgttcaaaaaatttcaaacgtattttcgacacggtaaactatttgaaaattttcaaaaatttatagggatgatgttataagcataacgaacacccccgtaaaaaaaattaaaaaaaatattccgacatatattttcgggcgtggaggttgactaagaaatgtaatacaagttaacggtagcactcctcaattaagaattgctaaagggtattgcgggcccgtttggtacgcaggattggactggattggactggactggacaagattggattatgctgaaagtaatcctgtgtttggtttaagaataggctggactatttta

SEQ ID NO: 112156 - DNA, 6171 bp, Cannabis sativa
  modified_base (40)..(70): a, c, t, g, unknown or other
ttctaaatattggggtccacaattaaataaattcacaaannnnnnnnnnnnnnnnnnnnnnnnnnnnnnntgcctttactaatccaaattacctaagcggtcattacatcaaaggcactcctggccagggactcatgttccattctaacagtcagctccaactccctgccgatcgattgtttcatcttcaggccttctctgatgcagactggggcacttgccctgacacacggcgatcaattacgggtttctgcatgttcataggtgaatctctcatatcctggaaatccaaaaagccatccacggtctccaaatcatcggctgaagctgagtaccggtcacttgccaacactacatgcgaaatcctatggctgcacaacattctctctgactttagcattcattctactcaaccaacaacagttcattgcgacaaccaagctgcaattcacatatctgaaaatgtcatttttcacgaacgcacaaaacatgttgacatagattgtcacattgtacgggagcaaatcaacaagaacaaaatcaaattttcctatgttccatctcggcataatgttgcagatataatgactaaggctttatttcctactcaattcaaatctttattgtccaagatgagggtatccaatctctacactccatcttgagagggagtcttaaacttagttttttatttggttgttcactctgtcaagttagttggtctggttttatataatagatttctgttatggttgttaagtcaaagtcagccctttccctttgtataaatactgtttcattcatttaataaaacaacttttacattgctttcactattaattagtgacggattttgagtttgtcgctaataataattaatagcggtggacattaacggtaggatcaccactaatatatatcttgtgtcagttttgattaacaaaactgacaaacactattagcgccgagctccgtcgatattgcccggccaccactaatatattaagttttaaaaaatacaaaaaataaattaaaattaaataataaattatataaaaattaaatatctaaatactaaattatataaaaatcaaatataatttaacaaatgttttttttttttgaataataatttaacaaatgttaaatattataatttaaaaccaaaataaatacaatattcatattataatgtctcaaattaatctatataaataaaatatacttaatatttgtaatgtctgaattattaacatacttaaactaattactccataaattcatcattaaagtctcaggaaaaaagtcttgattcatattattatggttgggaggtactactagtgccaatgactgtaaggaacatatggttaatctaacgataagccaagcattagctctcctaattgagcttggttgagtattggggtagaataaaattattgcatatgcaaagaactccctaacctaccaaatattttgaagtcaggaaaatgtgaactgagcggaggacataggggtggcaattcgtgttcgcaggtcgtgttcgtgtcgtgtcgagacccatgtataacaggtacatgctttacccgaacacgacctgtttaataatcgtgtcaaaaaatgaaacccgaacacgacccatgtaacccgtttataagcatattttgtttaaacatgtcaaccaataacacgtttatgaagtatttaacacgtttataacccatttatgacacgttaaagtacttaaataactttaaatagatcattaacgggtcaatattgtgttagctgtgtcaacccgaacacgacccatttattaaatgggttatacgagtcaacccaaacacgacccgaacccatttaaggaaaacccaaacccgctaattctcgtgtaggttttgagtggtgtcatcgtgtctgacccgttttgccggtcctatgaggagattacaaagaggtccataaacatactgatttctctgttgcagagaagacatgtgttgctgctgcggagaagactggtgttactgctacagagaagactattgttgctactatggaggagcgacataactctgagaagatgaaccaccaggagtttgtgattgaccgtacgtttggataaagttatctaaaaattagttatataacttagcacattattcaggtgttagactacatgtgtcacgtatagtcgtaaacatatttgccacaatattgtatattttattaggggcaaaggatgcacaattgactgactttgactgtatatattttttttactttgcctttaatcttataaccaatgcctctttgataattaggtctttccccaagtacttttttaagtaccttgaatcagattcagtaccaaatgtatcactctgaaattgtctttcaagtcttttcctatcaagctccttaagtattttcccctattaaagtaaaatattattagaagatataactaatataatatttaaaatttaactatacaataatttgatacttatagaaattataattcaaattattttatagagcgtatacttatagttatttaaaaaaatttatatgttttgttaaatttcaaataatttatggcagtaaaaatagattataaaataacttattttacttgaaacaaatttcaaaattacgtacttatgttttggctttcggcacatttatttaatacaatctctgtaataaccgcataatttgacatggaaattaacagtggtttatttattatttatgataatatgtgcattagaaaaaagacaagtcttattattagaaataggaattagtgatataatttattaattacgaaaattttattgaattttaggtatgccatatatgatatatatgaattttagtattttcatattttatgtttgataatagtaaaatttgagtaaagaggtgtggtgcaagttgaatattctgaagcataattttgtgctttggttggctattcaagatagattgaagactagagaaagactgcttaatttcaagataatagatgacctgatgtgtatcttctgtaacttggcaatggaaacaaatgatcatttattttttgaatgccctttctctcatgattgtcttatgtagttgaaaatatggcttggatggaatgtaggctctgtttcattgcaggggttgttgtggtggattgaaagaaccagataaagcacgttcaagaaataagtattttcagctactgtagcagctttagtctatcaaatttgatatgttaagaacgataaaatatagaattcaagtactatttgcttgcaacaacaaagaaaatgattaatcaagaatagaattacttgtgccatgccaaagaagattacaaagaaggatcgggactggtttgatacactataaatgttgtatatgtattatttactgctgtatagattcttacatgtcttcattcttgaaggtgctcatatgttgtataaaacattgattggtaatcaatgtcatatcattcattaaaaaaaaaaaaagtagaatttgacgtttgtttggccaatattgtcacttaggtatggtttagtatcctagaattagtgcgacaagatttatggacagttagaatatgaggttatgatgggtacttggttatgactattttacctgtaggtgaaaaaattacttaagggtggagtaaagggtattttggacatttatcaattaagttttgttttatttttctcagtggattaagttgaaaaataagtatatttatgctgaataaaggttagattattcttgaagattttaaataacctcaaaaatcaagttagaagcatttctctttcttttctaacctaatctctcgaccttagctggaaatcaagaagaaacaagctaattctagaccactccaccatcttagtagggatttcaacttagtctctaatggtgattgaatttaaagacaaaggtaaaccctatactcttctcttctctttaaaatttttgatggaaagttggtttgggtgagtgactttgagtttccggttatgtataaatttaggtgagttagaagctattttagggtttggtttgtgattgtttgtagctatttttaaaggataatagcagctgtagtttcagttgtgtgagtttgagtttaagaactcaaacttagcttaacaatggtggtttttaattctatggggttttgatgtgtttaattggttgattgtgtttgttatgccttaattaggtgttctggaaagtttagggtaatattaaggaaggaaacctcgagtttgtatttcttgctatgaaacagtccaccatctttctagaaacgatgaaccgtttcccaagcagaaccccagaaaacggtgaactgtttggggatacgatccactggttggggtgattttgggtaccttagtttttgtattttctccatatttagggtattgtcacgatatatattgatagagaaacttttaattttgagtttaagtcccaaaaagcgtttaagcgagacacttactggtttaacgtgaatgtgacttagggcctctaatcatcgaacactttttacactcagtttgactaacaaacttgattatggaattgaggtaagattagtataacacacacatatgcacatgtttagcatacatgtttatgtttgccaattagataacatatctgtaagagcagtattggtgtacttagagtttcacttggatattgatgagatatatgtttgacaattcagtaaagtacgaattgatactaccacatcaatatgactagaatactgagtataggttggtattatgattaattgtacttatagtatgaatattactatcacatcagtacgagtagattcttgagtataggctaatattatggtcaatcgtactgtagtcaagaatattcaagactcatacatgtttcgcacgggttagggttgggaaaaggtgtatgggcacctatattacaagtcaagttattgttaacctcgaaaattggcacttgagatttctaagattagctgaccaaggcttgaagaacgacatgacgaaagtcgcctaacccaaaaatgacttaatgtcactcatccgtgagagtgacaatatcacttgaccatgagagtgacaaagtcatttagcaagaatgacaatgtcactcggccttgcgaatgtcaatgccactcatcctagaggacgacaatgttacttggccatgacattgtgaagtcactaaacatgcatccgtaaatgtcactcagcacacattcgtgaaatgtcactcagcatggacattcacaatgtcactcagaatgcatccgtaaatgtcactcggaatgctcccgtgaatgtcactcgacatactctgcgaatgtcactcggtaaagacattcacaatgagactcggtaatgacattgtaaatgtcactcgacacacatctatgaatgtcacttggcatacatccatgaatgtcactcggcaaggacattgtgaatgtcactcggcaatgacattgtgaatgtcactcagcacacatccgttaatgtctctcagtatggacattcacaatgtcacttgacaatgacattgtaaatgtcaattggcacacatatgtgaatgtcactcaacatggacatttataatttcactcaacaatggcattgtgaatgtccttcgacatgtcttcttcagaagccgctataccatgacatcgcaaatgtcactcagccatgaccttgcaaaacatggtgaattttttccaagcaagaggagagtgaagcgaggaggatacgatcacaaggataaggtaagcatgcgaggagactacaacaatgccttttacatgctctaaatgtaaggaggtgcgagaagtggaggcaccacacctgcaaggtctgaggatccaaccaagggtgcactgcagccactatccctgcaaattgggaccacttgacaccagacaagggtatgaggtgcaagaccacctcttgcaactacgatttacagcttgaaagtgacaccttgtctctttggcaccaccatgtatctcaggccattaaagcctataaatacactactacaaacaaaggcctttaatcccggtttttaaggctttttatcccggttttcgctaaaatgaaa

SEQ ID NO: 112157 - DNA, 5543 bp, Cannabis sativa
accatggctacgtaagacaagtaccgatgcttggctctcaacgggagttgatgaggcagttgatggcactgatggtgttttgcatgaccagggggatacatattgtgttgtttgttatgaaaggggttcccttgaaatatatgatgtgcctagttttaattgtgttttttctgtggataacttcatatcgggaaagtctcacctagttgatacgtttgtgcaagaacaaccgaaggatccccaaaatgaaatgaataaaagttctgagcagttaagtggtcaaggaaataaagaagatgttcagaacatgaaagttgttgaattggccatgcagaggtggtctggacagcatagccgcccttttctccttggtgtattgactgatggaacgatactttgttaccaggctttcctgtatgaaggtccagagagtgcctctaaaacagaggaaaatgcttctggcttgggaaatattagtgcatctagactcagaaatctgagatttgttcgagttccattggatacatatgctagagaggaaacatctgatggaatgccatgccagagaattagtgtttttaagaatattgctggttatcagggattgtttcttaccgggtcaagaccagcatggtttatggtattcagagaacgtgtccgtattcatcctcaggtcagcattttggaattaacatcattcatgaggccaatctaaagattagattgcattttggttcagaattgtggctagtgttgtttttatgtttcatttgatctttttttctttcagctatgcgatggttcgattgtagccttcactgttcttcacaatgtgaattgcaaccatggattcatatatgtcacatcacaggtctacatagattacacttacgtatttggaggattatagaatgattgttggagactaactaatctgttgtgactttgtttaatatatagggtattttaaagatttgccaaatgccacctataacaagctatgacaactattggccagtgcaaaaggtgagtacttttcatcttcctattctactttgttcgaatacgaagttaattttgtcatcgtgagttttgatggtcatctgcttcctatcttgtttattagattccattgaaaggcaccccacatcaggtcacttactatgcagagaagaatttgtatccaatcatagtttcggttcctgtaagtatattctaccctcaaactttttccatgctttactagtacattctttctcacatgtagtagaagctcatgtacagaatttgataaaggaaatatttgcagtttattggctattataacgaacatcctttgcagttataattgtcttcaagtgtttccattgattttttaatataaaaattacatacagagaatttaaaagtttgttattaatcttttagtcgattcattgtgctgtgcctttagtctattctcctgaatcatctcaaaagaagtaacgatgcccctactaattttctgtaggttcaaaagccattgaatcaagttgtgtcatctttggttgatcaagaagtctcccatcagtttgagaatcataatttgagttctgatgatttacatcggacttatactgttgatgaatttgaggttcgggttctagagccagaaaaatctggtggtccttggcagactaaggccaccattccgatgcaaagttctgagaatgccttaacagttcgagttgttacattgtttgtaagtttatttcatcaattattgcttactcattgttagttttcttacttgtgtgatttcccaccaaaaaataaaaacagatgaccatgtaatgatggtatttgaaaactaaattgcagaacacaacaaccaaggaaaatgaaacacttcttgcaattgggactgcttatgtgcaaggagaggacgttgctggtagaggacgagttcttttgttttcattaggaaaagatggtgatgattctcagaattcggtaattgatcagactgtacattctctctaccaaatttacttggatgtaatcttgtactctttcttgcaacattctctaccaacgttcactttcaatttcaggtttcggagatttactctaaggagttgaagggcgcaatatctgctttagcttctcttcaaggccatttgttaattgcttctggtcccaaaattattttacacaagtggactggtactgagttaaatggaattgcattttatgatgcgcctcccttatatgttgtcagcttgaatattgtaagtgctaccttctacttcctattgtattattgggattccgaaggcattacattcgacgttttttgaaattcatttcatagaaagaacagcagggctttcaaagactgagagtgaagccagagcctatcttatagtagattaaaatctttaaagtagtgggtgcctctataatacaccccttgagatgcattgatataccctctacttgtttcggtatctagaataatcacgcttacaacacattgtttaaactatgtttttgacatgttaaattttttcgaatttttcgaaattttgcagaatgttttaaataactataacgtacatgaccataagaaattttttgactaaaacattatttcaaataccaaaacagataggggtgcatcaacgtattccttttaaggggtgcattgtagaattttcttaaagtatttattggaaaaaagaaaaatttgattactatttctgaatttttcttgtaacctattacaacattgcattgcaggtgaagaattttattcttcttggtgatgttcacaaaagcatatattttcttaactggaaagagcagggagctcaactgagtttattggccaaggattttggctctcttgattgctatgcgacagagtttttgattgacggaagtactctaagcctcgtagtttcggatgaccaaaagaacatccaagttagtgttattgtgtagtgcattgtttatataatgccattcaatttaattgtttgaagttcacttttaatgggttaaatttggcagatattttattatgcaccaaagatgtctgagagctggaaaggacagaagcttctttctagggcggaatttcatgttggtgcccatgtaacaaaattcttgcggttacaaatgctttccacttcttcatctgatcgaacagggacaacaactccaggatcggataaaactaaccgctttgccttactctttggtactttggatggtagcattggatgtattgcacctcttgacgaactcacatttcgtagactagaatcactacagaaaaagcttgttgatgctgttccacatgttgctggtctgaatcctagatcttttcgccagtttcactcaaacggaaaggctcatcggcctggacccgacagcatagttgattgtgaacttctgtgccagtaagtttttatgcccttgttcccgacattcattctgaattcaaatataagtttattgggatttccgcttttgcagttatgagatgcttcctttggaagagcagctagagcttgctcatcagatcggaacaactcgcttacaaattctttcaaacttaaataatctctccttaggaacaagtttcttgtagcctgtaatatattgaggtaaggctcttctacttagatcaaaatcaatttgggacctaacaaatatgttggattggatgtatgaacaacttaaacaaaagaaaatagatgatttaattagtttctctttattgttaaacaaaagatcattattccatggctatcatatttttttttttttgaacaactttaattaaaccataaaaatcatttggttgtgaatagaagaaaccctactataatcattattaacttaataaaaaagactcaaagctctgaggggtcactagattgtattgttgtatattatatttttatatgatacaggttaaattttgaattatatcaaaatcatttaattaataatatttttgaacgttcaaaattatcatgtttattgtatatgatatagtgttatcaagatgatatcctaatatataaataagacccatatttattattaaactgaattcgtataattattgaaattataagccttgtcaatttctgtagctttcctttagttcaaacagccttacagatataatatattgtacatacaacaaagagtcaaagacctaatacaaccacaagaaaaccattatactatatgactatttgaagaacagatgatcaccaccttattgatctaatttcaaacacttattgatccaagaatagaatctcaatatttccaaaggacaatatactaagtaaggtccaataaagaactttttttcaaagttacgaaagcttcgtgacattttttggtgaactcaaaagatcgatttttctctagtaaagaacaaaaagatttagagatttttgcgaaatttttaaaaaacctcttataaaaaacctcttaacaaacttgctctatccacttcaatgcatttgttagaaatttgtcacccaaaataacgcctttttgaatcatgaaatgatattttttttcaattgagcatcaagtttgtttcttcacatcttgctaaaacttgctccaaattagccaaataagtgtcaaaggactccaagccactaccattaccaccaccaacatttctctaaaatcaaacaaacaaaaaacatagatctagatttgaaaaaaatcaaaatcaaaatcccacaactctttttgatctttgttttgaagaactcctttgacctagcaatgctctccctcttgtcggaactccatacgacctcgccgacctcaatatccaaatcgaagctttcacaggtcaaggaccactgtggtgaggtccatttgggtcattaggccaaaggaccacaactggggcctcgtgctctctgtccttcgtagagaggagagagtgtcaccgagagggagtctaagtgagagaaactgggttgggtttttttggctagggggaaatagtggtcggagcacggcctggacagcaccgttacgcaagagagggtgagagagagtgatatcaggggagagagaggaaggagatggacaattgggtattttagaaagaagagaaaagaaaaaaatattcttttttattatcgttttatttttataatttttaaattattttttataatattttaataattaatattaagtgaatttattaaaaatttgtcagatgtgagcagtccaccatgatatgtaacaaatttttttaaaatagaagtgtaaaaaccacaataaaatggaagttcaatggattttaccgttaaaaaattaagttatagagttaagtgttatacactaaatttagatgattttactataaatatccttaataaatatataagggatgggaaagaaagagagcatgggttgaaactcaaagatttctaatttattagtggatagatgatatcattatactacattcaattgtatatttatatatatatatacagtagaac

SEQ ID NO: 112158 - DNA, 2269 bp, Cannabis sativa
ttaagtattctcatattaagatcttgaaataccatttcaaatccttgttaattcgttgatgagttctcaccgtcaacaatttagcgtcgtctgtgggaagcgacatgtaaaagcaacgtcatttctttacctagaatcgttgagaagatgacaatatgttctcactgtcaccaagatgtggaagtgcggcttgatggccttaagttgatcacctctaggcctaacccaccaacgcctactgctgggggatgaggtataggtggccaggtgacttagagtggaggaggcatgaatggtcgtgaaccctgaataggtgacccgaggataatccagtgaacaaccaacaagatagagttactgcctccataactctagaggaaggcaacggggtgcataggttgagggccccatctttgataaggtcactgcagccaccgaggccaggagaccctagaacctcacaccgctagttggggaaggtaaagtgagcctactcagtgaattctaggtctcggacttggctacacgatgaggagatgaatcagctgaggattaacaacttgtagctggatgaaattgtcacaaacatgaaaaatgcattagaggagctcctaagaggtcattcaaaggcacctttaatcgggtaaagaggaccaaaagcaggaaaaagaggagcaagtaggttggacgatgggggagtatcaaagtacttaaaaaataacacccccgaatcctccccatagagagcttcaacccaaaaaaatcttgaaccctcatcacgacccaaaaagaccgagtccaaagtggtccaaggtgacttaagagagaagctttgccagaagactactgccaagaagcgaagactctcaatagattcactccagaatgaaaagaaacaaagccagccaccgtggacctacgagagaaagctaactataaggaggaaagagttagataaggagatggaggatttacgatgaaggatagcatcagccgcatctgaacattgtaactaggacggggatgacttcgatgaagaatccacattctcaagggagattcaagcagataaagagcccaacatgttgccttacgaaggcataaccaacccaaagtaccacctaaatacttttaatgaaataatgaggatgaagacggccacaagcaaagcgagaggccaatgctttgtagtgaagcttagaggtgtagcgtataagtggttcaaacagttggcacctgggtatatcacctcttggaaagagttcactgacaaatgcttagcctaacaccatgcgtcacgcgactataccatcccaagaactagcttggcaagtattaaacaacgagaagccaaaagcctcaagagctacatccagcgcttcaatgctgaagcagccaatgttgagagactgaccaaggatgaacacaagatggccatcgttgccgttgcctgtccaaaaagcaagttgtggaacaacatcctcaagagagagctagaagacttggaagacttctacgaaagggataacaaatacatccgagttgaggatggacacgagaatctcacaatagggaagagtgaccctagtggattggctaactttcgcacacatgaagaaccatgaaggaaaagtgaattcgatgggggcaggagtgaccaaaataagaaggttaggagggaggaggagccccaatgtagagagttcacctattatactggattcacgtgcttaagggagcacatcttcctaacaaatgaacactaagtcccattcaagaaaccaccaccaatgagaaaagatagaacgaagagagatcctaataagttttaaaaaatttataaagatattgggcataccacagaagagtgcattcatctcaaaatggaaattgagtagttgatacagagaagctacctgggaggatattgtagggaagataggcaccccgaggagaggaggccagaagatggaaggcggaggactccacatgaggctccagaggtgttaaggacgttagaaccatctttggacggctaggggtaagaggagacacccgcaaggggagggacaaatatgctagggaagcaagataagccccaattatcatgagcctagaacaaaggctgctaaagaactctaaaggggaagttacactataacgttcactagggaagatgcctgttaagcaaaaatttcacatttaacatattaaaataaatgcaaaacacaatttcacctatgctgaatttatagcataagagtttatt

SEQ ID NO: 112159 - DNA, 2905 bp, Cannabis sativa
ttaactaagaaagtttttgttcttaaattatatgatatttgatacaatactctaatttttttagttttcaaataattataacaaatttaaagacttattttttaaaacgaaaataaagctcggtttggtcggtttaaatcgaccaattaaaccgaccaaaccgttgattaaaacggtcgattttttttacatttatataatagttagtcggttttcagattatactcatgaaaattgaaaactaaattttagatatttttttatgttaaaaaccgactaaaccgacagttgctcacctctaatttgtgtctcttgttaataccaattttattatttgtataaaatgatttttcctttaaaaaaataatcagataataataataataaataatataaataaacaaataaataaataatgaatagagtgaagtagaggagtagcggtttagtttaggattctaaatatcaaccagatgccggttactcactcgcatcgccctcctagtccgacccattcagccaaaatgctggagcgggtcctctcctcccgccgagcgccgccgcacagcgacgaattagctaacgaagacgacgcggccaccgctgatgagtccaagaccaagaagcacctcccctttttcttcttcatcactcgcctcatcaatcactttcgaatcggacccctttggccctgcgttatcgcgctctttttcgttcttttcttgatttcctccatcgtcttccagtctcgcaacctcgtttgcgtctctcctcacgaccccgcatatcgatccggtttcttcggcttcgatgctctcgaatccgactttggatccctcggcgtgccctggtgtaagtcttttctttttttctttccctgcccagatctaattttatggtgctacattgttgtctcatttttggttttccttttgagtatcaatgttagtgattatgactttgaaaatcagattgggaaatcaagtttgaacttttgatctttaagggttatgttttatggggtttccataggcttataaaagtatcgattagttaagttagccgatggaaaggctactatttatcaattttacttctctgagtttctcacaggtgaatgagaatttgattgattaataataagaaaactcaagagataggtaaattgaaaaagattttgaattcaatataactttccactacatttgatgtgtactgtgtagtttgaggttatgtattattaatctcaatgttcgcaatctggtgagtggtgcttttttcctccttatatgtatctattaatgtaattgctcaatatttgcattgagataatctgtttgaggttaacttctatgatggattttgtatttgttttagcttaacttgaactgtgtaacattatgaatgcttgagttttagttggttcttatttcgtatccttggcaaaaggcagatcgaaacatggaaaaacggttgaatggacatcgaaggatctaatcaagggtttggaagagtttgtaccgatatatgaaacccgaccaattaaaaacaacatgtatgggatgggttttgaccacagttttggtctttggttcattgcccggtggctgaagccagatcttatgattgagagtggtgcttttaagggacactcaacttgggttttgcgacaggcaatgccattaacacctattatatctattacgcctcggcatccagagaagtatctaaagaaggggcctgcatatgttgatggaaattgcacttactttgctggaaaggactttgtagattttggaagcattgattggaaaaaagtgatgaagaaacatgggatcattgatctttcccgggttcttattttctttgacgatcaccagaatgaacttaaaaggtagtcacggtatcattaatgcagtatgtttattcagcgctgcttcttcttttgaaatgcttattatctcttcatatcttgtgctttgatgaacagaatacaacaggctctggtagctggattccggcatcttgtctttgaggataactatgatactggaacgggagatcattattccttaaggcaaatttgcgatcagtcctatataagaggtttatgtcaccctatattgtcttttgcggctcttcgttagtgaattattatcttcgttcttccaactttagaaactaaaatgctttatttagattgcatgtgcaatataataaaagttattagtatgatttttgtagtatgggctttatgatttactcttatcttttactgattcaaaataattatggttatgtgcaataaatgctttaggaggtggccatagctgctataaagacagtgacgaagctaggatcaggtcaaaaagaaagaatttctgggaaaaagcagtagatatagaagaactttgtggaccaggtgaagcatggtggggtgttagaggatacatgagggataatttcaaccacagcaacaaggtgatttcctatgaagaacattttcagaacagtcggattgtggaatcgatgctagatgtttattgggagcttcctcctgtggccggtccttctctcactcaccaaactcgatatgaccctgctcgttcaccacctcctatcgttgaagatggtcgctatggtttattccagcgccttggattaaccagacttgataggtctgttttcaatggatacactcagatggtttacctccagatatccagacagtaatttttgtctcttggagctgtctggatgaagaagagtattttcagtagtgtgttgatattacgtgcgcaatttttttttaatattttcttttccacaaccttttacttagcaatttagcctggtcgatttcctttttttttttttttttgtttcatctcgctaaaattaatgg

SEQ ID NO: 112160 - DNA, 5264 bp, Cannabis sativa
  modified_base (4741)..(4744): a, c, t, g, unknown or other
atatatatatatataaagaaaactaccaaagcagcttttgtgaaaaacagaaccagctttaataaatgtcacacatctcataattttgaagttattattatgcgtccattttattaaggtgacaatagttttgaagtcactctattttgtatttctagtgtcatatacatctcatacgtgtgtttgttgcgtataaatattggcatagtgattataaagttagtacacagtatttgtgcactatatttgctatttggtgatggtgccccccacttttcctctccaatatatttatatgtcattataattaacgtagtctttttcttttggtttcacttttccaatgtttcgaatagcttcggttatttcgaggtgcttcttcgcatcctgccttcccgcatttgcaattgcaagcttctctcggggcaagtactttaccgccaaacttagcagaaaactggactcatataaatctttctatcagaaaactggactcataggataagcttttctaggaggtgaaatagtagatatatgtcattaaaaatcaagataaaatggctacaggcatgtacaggttttctatgcatgttaggattttttgcagaaaaataatttgagaaattcttactcacaccctgttttttgtgttcaaaggaatagaaacaacagttaaagctttattatatgtagtcaaatctcaaatgtactgtcatattacaaaattggtaagtaagatactagtttctaaatctgtcgcatcatatgccaacgaaaggaaaaaaaaaaaacacatctgatttctcatcgaaatggcaaaaattgcttcctttgatttctctgtgaacctaccaactataataactgttgttccaatagagtcacatcataacagtagtctatacaaaaatctttcacggttattcctccctcctaagcattgtcgcaatgatgaatgggtgatgggggcagtgtctctatatccatatctgcaacagtaaaatcaatcttcttctcaacagggtagttcatcattgtactaaacttccactttgactgcaaaaaaaaaaaaaaagacagaaaggggcttgagaccaggtcctattattaacatgtcacaaaatctagaaagcagtcgtatcttatttttgaaccttaggcggtgtgctgcttctatgcacttcagttgaacctacggagtagtacattgatagtaatttcttgtgatcaagttccagtgcagtgttttctgcagaaagattgttgacctgtgcaccatagctccatatcagtttataactagggatctacaaacaacaaataaaagaaaacggagaggcagagagtaaaggcaaaatttccacagtagggagtggttctaaggcctatcttgtctcaccaattcttcagctttacaaaggctcattttcagatgctccttctcagtctctactatcttcaactgagcagctattgacatgactttttgagtcgatggctttaaactacaaataatagcaaaattaatatgaaaaacgattcataaggataattatacaaactcacttattatagagggacttacgaattccacatttctagcaacttttgacacgactcattgcttctgttagcttccacaaacaaccgtccatatgcagcattctcctcattaaccaatgttcctaaaatagactcaagaagagtgtcttgagtagttgtgcctggagatgtatcagccttcaaaatcataacagaaagagaaaaaaaaaaaagaaacaaagtgagaagagggaggaaaaataaataacagtgttacatgactattacctagctagaaaacaatataaatatgaagtgagaatgtgtgctagcaatataaattcttataagaagtgagtgttattttataatctcatgcttattaagcagtggaaatttaccagcagacaaaaaaaaagttttatcatctactaaattttactttttaacacgtaaataactttctagataataaacacagggacagggtgataacttcttaacagtcaatacatgaatgatctaggagtcgcacagcttgtccaccacacattctcaattaaaagaataaaaaattattaagggatcttccagagcaaattcagttttaaaaaaagtaatggtataacaagttattatagtcttctcaatctattaacagaatgccattttattgtacggtgaaaacaagtcaaactaaacagtagatgtttaaagaaaataaaagaaaacaaaagcaaattgtagacattaccacaagcttctcatcattacatttgtagaacaccagttcctctgacaatcctttcattttctcatccaattcttcatttcgaacctcagcatccttagcacgtttatcagcttcgttcattaaatgaatcattgattccctatcacgatcatgtaacgaacactcttgttccaatttcttaccaaagctcaaaagacggctgcactcagaaactagtttctgattgttttcaaagaaaccaaaaagaacacaaaagaaacaaccttttttcagaaaattgaaatacatattagaaaaaaacaagtgacaattccagcctctgaatacaaagataaagaaaatgacaaaaactttttgtatacaaaagatgttcttggagtgcaaattatgcatcaagattcaagaatcaggaactgatactttagatgaaggaacataccctaacgcattcgattgttaggtctttatcctccaattttgactgcagtagaagtctttccaattctgacactgcccgatacttcacctcaagcgtgctagtcgacacaggaagtcctatgatgtaatcaatcgactctttgatgcggtcgtcgactatagaaagatccattggttcctatcaattcaaaaccctacataaatccccaaatacgaagattgaacaaaagaaaactcagaaaaaaattccaagtccctgaaatttaccagtgatatagcgcaaaaaaatcggagctttgatgggggagggagaaactccacaccgtgaggacgtttccgaaattgaaatcctggaagtagaagtccgtacagatcaaaacgaagaagaaaatggaaaaagaagacttggaagaggatttggggatgaaagaaaagggaggccgaccgttatagagcgcgcttgtaaattgtaattgctaagtcgttattggtgacgtggctaactaacaacattattatccaactatccaatgaatttatgtatatttttttggaattttttttgaaaacatggtaaatatgaataggaattttttttaaaataaggtaaatagttatcttatgtaattggttactattgacctcgctaaattaattaaagcgattagaaacaattaataataataaatatgcaaattaaatacaaaaagtattatagagatttggtctcgtgatgatagtaatagcatactattatttttcttgtattgacttgtgagaaaagaactacgaaattcttgatattcctcgaaattagctcttacaatggtcttagcagcttaagtgatctatggaatgaatgatttcagatccccgaatagtaaaatagtttcactattatgtatgaggaataaattcgtcagtttagtttctcaaaataaataaaaaataaattaggaaacttaattactttcttaaaacaagagaaatgaaaagaaaaactaagtaggttttctcttctcctgtcgaattgaatctatcccacaaaattagggatttgatcgagatttgtattgcttgaacatttagagaatatcctttaaaatattctagttgcatttactctgctcgatacatgcgagctgactgcaaaatggacaacttcttctttaaactagttgtttatgtcataaatcaccttagaaggtacaccatgaattgaattgtctgtccaggttacaaaatcctttccacgtgtcagctaaatagacgtcacatcactttatgcgaaaattgggataacattttctcccaagtccacatgagaacttcttgctcgcacatgaacttattcagccactaagttagttggatgggtgacacatgtttactcttcgtacaatctttgatctgatgtgactgaatgaagatttaattatttttttgatatcggaggcatttaatgttaccttgagatctggacctcaattggtgcactggcggttacaatatatgcatattgtcgtatgtacttcccaacatacgtgataattatactttcttaggggaaaacccaaaatttgaattttagattaccatattacccctctaactgccaatataataggtcaaaaattattttaaactcttttagctatttttattctcaaagaaaattaatgcaaccttgattttctctctgaaatctttgaagaactctctgactgaagcttgatctttaacattcattcaagcacattttagaatttctaagttgtgagtaaattctctttcttcttttcatgtaatttttttaagtacatgcattattattttgaattactctgtaaaatctagattcttgaaactgttatgattcgagactataaattttatggcttttgatttttgacgttaacacactcccatgacatataggtttttgaatttctaggttttcctcattgtttttgctaggaactatttgaaattaataataataataannnnaataataataatatatttatatatttacataaaagactttcactgttttgtcttcttttgaaatatacatatacatgtaaaatgtagataattatgaatgggctttatgggcccttgaattttgaaagggatgattttttttttttttttgaaaaaaaaaaggatgaattgagataggggaattttcataaataagagaattgagagtatagtttatttttttatagcataaataaataatattatagggttatgggttttttttttattttttattttatatttatatggtttttttatgccatatttttgtaaaaaaagtagaaatttcatatttgtaaaacaacaataaattttgccgaaaaagtcgtcgtcaccagaaaagttgccggaaaaatcattgccgccagaaaagtcgtcgtcgccgaaaaattcaccagaagtaaatgtctcatatgtaactaaaaatataactggttatacgaataaaaactaataactcaaactggttataattgaa

SEQ ID NO: 112161 - DNA, 1917 bp, Cannabis sativa
tccaaacacaccttgcattttaaaatatagtgtaattactaaagtgtgtaattaccaccctagtaattacacagttacttccaaacacacccttaagaatttgattaattgagtgaccctcctaatgtcttgattatgtctcatatatttcacatgtttccaggaatttccttcgttgtgttattaccatacttgaagtttttccttaatcactgtgtactagtgtgtggggggttgcattggaggttttggacacgtgttatttcagttttctttcaatgttttgtacaggtcacaacatggtcgaatttaaataactggttaatgccaggaggtcgtatcatggtgaattgtggtgggactagtgcgccatcagaaaatgtcttgtggatgcagaattctacaatcaaggcattatctataggtttcccggaacaagtaggactctgataaatttattacttggtttgatttcagttattgcaatgacagctattttattcctttaaatgttctataattatatctacatacaatccaaagtttaaatgtagaaaacatattgctatgctgcaaaattattcaagactgttgggatttttcccacagaagatggtgcaaactagcaatgtctcctttgtatagtaaatgactagaccgtggtcaatgtctcttatattctgagaaagttggtttttaatctctcaaagaaaaaaataaggaggtcttaatgaaacagtggtgttgtaattgaacaatctatgatctcttcttagcaactaataatccaacttttaaatgaaaaaagtagaataatttagcattattttactctgtttggtgttttttttttgggcatattatgatgtttatgtgctttgcttttgaatattgttaccaaagaaagctcactgtttgacatttaactgttcacagataagctggaaaaaaatgggaaaagaaaatggtgcaaattatcttgcccttacaggaccaatacccgatttagagtcatggtccacaatggtaccagagcctctgagcaacagtgtaaggcaatggaagtcatgtgaaggagaattaggccttaactagcttgttgtatggaaatcgcttcacaggttgctccaatcaaaatttaaacaaataaattcctctgctgtagaccatcatcacattggaacacgcaagcggaatgtgaagtgaacacatgctgaatcctgtaagttatgaggttgactttatcttattttaatttaattatttttttccgtgggagtaacgtagatgttggagatgatttgctattcagcttgacttttgttttaatatttagtagcttgtaaaatgatcaacaatagaatagacaaatataaactgatcattttcaaatgatagttgcattgattgtcatcacattcctcattccaatttgctgggggtataatgctgtatgtagtctggtttcttgtggtgcttgatttcatgttttaaatttcaactagcaaatacacctaggttgccttgcgtagacatgaattttctagaaaatgattgagaaaaggctcttccatatgcagtttcttggaaaacccaattagtgcacatgcatctataccactagagaaaaatcatgccaactagcttcatcttcactcagatgtaattttgtgctagaaagttaaatagaactagaagaataattgtttgaaaaaaaatcttattcttaatatgtagcatcatttctcaaccaaattttgccaagtggactctaccttcattgttttactacaggaagttaatgtagctctggcttggcatgtctttagatgttagctttttcttttgagcattgctattaggcaccagtggtgcctagcactttctcgacatgtcgcgttgcgattggctagcgat

SEQ ID NO: 112162 - DNA, 2717 bp, Cannabis sativa
aaaacaaacatgtgaaagcacttcttaactgtaatcttattttctaattttaatctgatggattaataatatgaaaaatttctaactaattaaagaatgttggtaaggttgagtacttaggtgcctgccaaattgttattcaatctataataattaaagaatgttgataattttaaaacccaaaattaatttctcaaatttactataaataaaaattattatttattttgaaataattaataattgattaattcttattaatctcttatttcactaggattataataaataatattttatactgatttaattttctttctctaatattgtttaagaataatatatattatatttaactaattaatatagttttatcaaataaaactaaatagttaaatttaattattcaattcataattgatataactatttaaaataatggtgtacacaaaattattattttacccaaaaagaattatttctcatagaaattaattctttctccatttattttttaaattaaacattctcctatacagtgttgtatagagttgatttagggaccataacctatattttgaacctctaataaacacttgattattattagactctttaatagaattatccaatttattgattctatattactccactataaatatataattgcactctttgataatagaattatatttacagaattcttacttgtagtccattgatataattaatatacgtagttcgccctccaattagtagttcataacaaaagttggtcaaaattactgttttaaccttctaattatcttttgatttcttaagtactattgattcattgtgaacaacaaatctataatctagttatagatttcgattcaactgttagcactcccaaaactaacactataaggaaattaatatttgatcctttcagaaagcttggattctaatattgtataatatgttcttattcactcatgttattaagctcccaaaataaaagttttaagaatcatcttttctgagaaactttaacgagtgaatcaaagaactcaatgaacacaaaccaaagcaatccattgccagaaactgaaaattctatagctctatagggtcaaacttcttcccgagatttcactaactcgggatctttcaattgtgcatttctaataaccatttctaataggttagactggagtgttaagttattaagatttttaaccacaaactctataccatacttagtcatctctgttgctaattacgaaggagagatcaacttggtactgaatacatgcttgggaccttttctactgaaggcatttgctactacattagcttttccgagatgatacaaaatctcacaatcataatctttcactagtcccaaccaccgtctttatctcatatttaaatcttttttagtaaaaaaatatttgagactcttgtgatcagtgtagatttcacatttttatccatagagataatgcttacatatcttcaatgaaaacaccaatgtggctagttctaaatcatgagttgggtaacattgctaattgacgaaaagcataagcaatcatcctatcagcctgcattaaaacacaccccaaatcctatctggaggcatcacaataaataacaaatattttcttatctgatggcaaagctaacactagagttgtaattaattgttgcttcaatttttaaaaattggcttcacacttatctattcatacaaagttctgattctttcgagtcaattctattaagggtgtggaaatcttaaaaaatcattctacaaaacaacggtaatacctagccaaatcaaggaaacttttaacctttgtagcgattttaggtcttggtcagtctctagctgactcaattttcacgagatccaccttaatgttattcttactcacaatgtagcccaaaaaggccatttatgataacctgaattcacatatcttaaacttggcatataacttacgttctcttaatcgatgtataaccattcgtaaatgttgctcatgctctacttctgactgagagtatactaggatatcatcgataaacactacaacacttgtactaataaaattcttaaatactcagttcatgagatccatgaatgatgcaggagcattggttagtccaaatgacataactagaaattcatagtggccatacccggtatgaaatgtagcctttagaatatcttcctcttggcttctcaattgatgataacttgatcgaagatctattttaaagaatattattttcaagttgttcaaacaaatcatcaattctagtcagaaggtattttttcttgattgtaagtttgttcaattcccaataatcaataaacatgcgtaacgatctattatcccaaatgttggctacctaagatggcacctcaacatggcaaaaagaaaaaaatacgttgaagacaggtcagcactaacctgccaggattagtgtcgtgcagtctcccagcctttgagatggctggacggtacacacaagcaaagagagatgtgcaaccctgccagtaagctctttgatggacctatagttggtcggtcaggagtgatagcttccaagcatcgggcagccttcaacaagcactacaataaatgtcacttttgccagcacatttttgtgctggcaaaagttggtattgcgttggtaaaatagaatttacttgtgatgtg

SEQ ID NO: 112163 - DNA, 7454 bp, Cannabis sativa
tggtaaaatatattccaacagcctgaaggaaaaaggggtggaggtccaggatttgtttctgtatgcttcaattgtagttgatacaatatggaaaccccgcaacgagacgatttacaataattttacatgtaatattaagcattgtgttgactttatttctatatattacgcagattttagttcttgtctgtttccttcaccgatgacggttgcgactcctgtttggtctccccctctagaagattaggtcaaaatcaactgtgatgttaaagttggttgtgactcaatgtgcgtggtggctttagctagagaccataaggagtcagttttgtgggtggttatcaacatgctcaacttctctgacccactcattggagaagcaacgacctatttgttagccttagaatcagcgatcctttggaagcattcgtttgtgattattgagagtgattctaaaacggtgattaacacgctaaaggggacttgttccgtttggagtattagtaactatgtgcttcaatgtaaaatctttcaaatcttttgattagttgtaacttttagtttatttctagactatgtaatttgcggcctataatgtggctaagtggatttttgccagtaatataactagtataatcgatctctcctccataccaaataaattattatgtaatgaccctgaagtgtaacattttctagttttgaagtgtaacattttctagttttaatatatctacttattttattaaaagaaaaaagaagttttattgtttgtgagttaggcctatatgagaagcccaaagccgaatataaataaaaaggtggttttatttcatccttccaaagtcgtagcacgactctctctctccgttactcaatctctctctctctgtcggccttttttggcttttgtcatcagcggtaccctagaaatattatcagcctcgtttaccaactgatcggagatcggagatcagagatcggagaggaggagttacgtttcacttactgaccggataaacaattacttcactcacaacaggtactgcactttttagaggcagctaatgaggattaaatacataaaggcgttggaactttctctagttgtttgatttttctcaagtgattcgctctattttgtatagaggtctgcatatgattcacctataatccaattctctcttttgtttttcttctttttaataatagttaggtttgtcatgattagtttataatgtttagttctaagattttgaaattgtgtatattatgcgttataatatgaatatgtgttattgatcatacgagattttgttctaatctggatggttccgagattttgttcaatatttttccatttgaaaaagtaagggccagggccaaagacactttcgtaattttctgattttggttcaattagaaaatttctgtttctttcgtgtgaatcccatttttatggtatttgttcctacatacattttatttcagtgctgtgtttaagtttgggataattctatatcttggtgtcgatgaaaatgtttggtgacattgataaacttctcatatctccaaataaaatctaatatatggtgtttcttggcaatttgttttaactactcatggtgacaattaagttacctggaacaatgctgtgttgttgatggagagataatttgtagttgtttcaaattttctggtattttaataggagaagcaacataggcaatgtttcattgaatagttaccaattaataacctgttaagagaagttttgaaccaaaatagacaacacttcattgaatagctacctactgataacctgtttagagacaattttggtttattcatttgcatctcttcagcattgttgtcagtatttgacatgtttctgttgaaattgacagaattttttagaatattctgttaatacacatggagttctgttagataggcatttgtatgacctttatgggaacttggtcgtttgttgaaagttataatattttgtgctttaaaattttcagctttgatttgtatgattgttgttcttgtttaggcattgagtatgagatcattcatatgtatgaaaagtactttagttgaatcagacttgggttgttacattcactgctaattgttattattggctgattaaagataaactcgtgttattaatttattattattattttttgtgtggcagtttttttatttattttacaactgagggagccaccgcagatatctgttaaaagttttggtcgcgtttaactttacagtttgatgggagagtgtctatgcatgctaagtgatcaacagttctgatgaaacttttggagctgggatttattgaagaggctgaatttttataccaatgggttctagctatatagccatctcggcgctctgtacagtgctaagttttgttagtcttcattggtggactgaatcatcattactcagtttgaaaccggatggactaattagtgataataatacctccgctgggaacacaagccatgtagttgatttacttttgggatcatatacaacagttgcgctgcttgctaattttatgctcaatgtatttgttttacttattctacttttaaaggtaagcttgctttctcgtgaaatttactgagttctcaagtacacgagtctactctgtttacttttattgtactattatttactttgcatattagtatttctgatggttgccatgtctgctttaacttacagactatattctttgtggagttgtatccttctgaatctcgaaagttggtagaacgtcttgttaactatgtaatatataaggtaaatgatttgtccctttcccctatcacagaactatctttaaatacttgctatgtccattgcctatgtaattacttcctttaagaatgacttctgagattttgtcaataatgttatcaaatgttttgcttgtgagttttcaagagtttcccaacatggcaagctgctatttggttacattttgataatgttgttgatattggtggtaatgagatattttttatatctaggtttgttctgataagtatgaatattgttattcagttccttgtattttttttttttatgatttgttatttttactattgctgtttcctagtaattgtgattaaattgctgtatacctgatcatatatgcaggggacatttcttccactagttgttcaagccacaatatatcatgcagggttgtggtcaatttggttgattgttctttgttttctaaaggtataacatattttcctgtgatagacatgctctgataaatagcttagttcttttgactctttgaaacattttgcacagatgtttcaagctttagctagagaccgtcttgaaagactaaatgcatctccatctgccacaccaatgacatatttccgtgtgtattcagtattgttgttggttctctttgttgacgtcttctggtattctcttaattttactttctgttgtggagattgtaaagtttctagtttgtatactcaatcaatataacactccttctagaaacatttaggcaatgaactatcctactatcttcctgaataaaaagatttgttttgaaatggtgaagaagcagatatttttttcccataccagtgaaatgtagccaagttagatctcttacataatctgttgtgtgcctacaggatacagctctgtttggtaatatatagaactttgaatatgtcagtttttctgctcttattgtttgagccactcagtatcgcatttgagacacttcaggtaatgttaatagaaaattttcatgacatctttttattagcttaatcattaacatttctacaccagttttctataactaataaataatcaacttgacaatgattcgggtatgtcaaatatgctttgtaggctattttggtgcatggatttcagttacttgatatatggatccaccaccattcagcatggagtagctcaaattgtcatagatttaaaatatttaacacatcaccagcaggttattaacattgtgctttgatcatccacatttgaaatagaatagatagatgttccaaataccttatgttatgatcctttcccgacactttgtatttttagttctaaatggaaactgttttcatttggtgttacctccaggttcattgctagaatggaaatgtgtacttactcgaaatttgggattttttcttgacatggcaacattgttaatggcgcttggtcattatttgcatatatggtggctacatggcatggcattccacgtggtcgatgtagcccttttcttaaacatccgtgtaagtattgtattattttctattatatccatcttacctcattaattttgcttaagagacaacttagtttgttccttaaatttatggattgagcaggccttgctaagtggaatcgtaaagcgtgtaaaaggatttagaaagttgagaagtgctttaggtgctcttcatgcagcacttccagatgcaacgcccgaagagctccgagcatatgatgatgaatgtgccatatgtagggtatgtttattatcattattgtcattattattatttcacttattgtttaccttctttgtatctttaaataatggaactggggaaatggacaggaacctatggctaaggcgaaaaaactacactgcagccacctatttcatcttgcatgtttgagatcttggtatgatgttactttttattttttggtttcttctctttctaccttttttttttggtctttgggaggtgattattgaagaatttatgcgctagtgctgaaattacacaacattggcaggttggatcaaggattaaatgagatttatgcatgtccaacttgtcgaaagccactttttgtctttagatctgaagaaagatctcaagatgatgcaaatccacgcaatgcagacattttgagtgatgaacagcttgctcgtcaaataagttcaggacttgatacacaaaataatgctggaaatagcctgcctacaggagtaatacccaatcagatacagaatcatacagaaggcggtccttggaggttcattttcttactttacaccagtgtagtttttagctgcaaaagctgcgaaaattggtgctctaatttagtcatcctcttatttttctgcaatagcctgctggccctaacattctagtgaggttgtagtggtggttgtctgttcgtttagggatcatcctatttacttcaccatttgaagagcttaactctttcattattttcctctcttattttctaaattttttgaggttgtggcagaatagtaaacttgattgggcacataagtcccattaacttgagacttctattaggagagatacgaaacatggttttgaaaaaatataataaaatctttttagataggctaatgattcttatagtttatgtaaacaaaatctaaaatagccgtataagcttttccaggaacttattattttgagaaggttgcaaacaaagggattccctttatatatgttgagcttttttctttttccttcctctcaaatataaaagataataattaagtttttcattgcaccataggaatgcaggattagattcaagttggttgcacacttggccaaatcagggaattgatggagctggtccatctaatgctattagatcagtgggtctggggagagttcagatgatgatgaggcatcttgcttctgtcggagaaacttatgcccagactgctcttgaagatactgcctggaacctctggcctatgaatccctctcaggctgccccaatggtcccaccaattcctcctgctgcaggtggtagaatccccagaggaactggtggtttgcatataaggactgcttcgcgatctgcaaatgacaacctagcaaacatgcttgccatggctgagactgttcgggaggttttgcctcatatccctgatgacataattttccaggttccgtttctattcttcactccatattatctgtatttgctgagttatttggtctggacgatggagtaaatcatatctgtggctttctaataagtttttcagtagtgcctatgttggtagctgttgtatagcctgccaaaacacgtgcaagaaactgcaaattcatagaatgcaattgtttaaacacaataatcttattcttttataaatttgactcaagatttatatagttacataggattccacacagtcacatgaccctcttcagttttcttgttaactgaattttgaactctctgtagtctatcctacgagtatctacaggtggatgaaatcacttcctttccttctatcattactgggttttcatttcaagatgtgtcgtgctatgctttgcaggatttgcagcgaacaaattctgctacggtcactgtgaataaccttctccaaatgtgaccagaccagaccagacacaatgtttcgtttttctccataaaagaaaggagctttggaagttgctaagtacttcagcaggtttggttaccacaggcctctctccctttgtccatgttttcctcttattttttttttgaaatttttcctccactcatattgttgagcttcattcactgtatatataggcagctcactaattttatgtaccaaaaagaaaagggaaagatgcaacagtatagctctcttttgtaccagcggtcctgtgagaaataaaatatcaaatgtatcatttaacataatgtatactgtatagtgtcataatttgcagggtggacctgatacgccaacatgatctactcttattagcaagttggcaatggaaatttagcttgtttcatttgaatggattacatgttttatttaatgtatattttacaagttcatgtttgaagtattcagccatgaagttcagtttcattgttatggtctctccaataaatttaagagtggaaggttgtataattccatttttgtttctttatattatgtcatcatcatcatctagccactgaactaatatgtttgtactctagttaacccagaaaagtatatcataataccctaacatctatttgaattcgaggcacacattgaatactatcatgagaaaaaaattgaatttaaaatgttccacgattgtcttattaaagatgatttgtaacggtacatattaagacttagtaaaattctataatgcactcccttcaaagagatgtattgatacatctctatccgttttggtatttaaaataattttttagtcaatttttttttcatggtcatgtaaattatagttatttaagatatcttgtaaaattataaaaaattcggaaaagtttaacatgccgaaaaatgcattcaaacaatgtattgcacacgtgattattttattttatatacgtataaaatagactgtttgaacaatattttttatattgtaaattat

SEQ ID NO: 112164 - DNA, 2938 bp, Cannabis sativa
acccgaacacaaagtcatacattctgaaataatatggccataaggagaggccatatgtttaaacttttgtatatctctgatgactctcaagcaatccgactcaaccaccacatttgtccatttatttgctttaatccaacttaaagcttcctttatgccaatagcttcaaccacatgtggcttcaaaatacccactttgctcattctcttggcttgtaacactattccagcagccgttctcgccaccaatccaataccaaaacgcctttcgtttgtgaaaattgcaccatcaacattaacttttattgtaggaagttagggagggatccaatgttccaaattcgtatcaaccgagtcattaatctcatgagtagggtggttattcttttgggcattataccaatcaataaagttcagtttagctaatgttacaacatcactaacctctggctttttagcgttccaaaccagttcaattctgtgcttccaaatcgaccaacacaacatagaggtctccaatctctcggccgtagtccatctgcttaggccttcctcgaaccaagctgcaaaagtcatggcagcagctgctacaccaggaacccgagacatacactagcactcttgagcaaacggacaccttacaaggacatgcaatggtgttttcggtgttgcatcacagaagggacaatgagtgttgataggcacatgttttgtcataagttgaaaccgagtaagtaagcaattcgttgagactctccacaaaaaattaagaactttcggaggaagtttcaactgccaaagttgcttccaaaacccagaacaaatcccgtaattgaaaactttgaacaaatcaaatgtttaattaattaggctatttattatgagaaatgctaaagggcactagtggtgtttagtattctcttatatgtcaatattgctattagtctaattaagtatcagatctcatataatttaatataatagcttttagaaagtatcgctaaacaatcacaacgcaacatgtcgcaaaattgctaaacaccactgatacctaatagcaatgctgatttattatatattggttggacaataatgaagatagaagaaactgacaacgatatatatggattcctagaacccatgttggaccaattaggacatattcaaagtcgtttcactcataaaattataaaatgatataaagacaaataatggaaagcaacaaaaaaaagtttctataatttatatatataaaactaccttaatacgcaagcagaaatgactttatgtgagtgcaaatgtaagaaacttcagctgtagtcagaaaatgttgaaaaacatgtgtagttaaagaatatatgaggggcacactaaaaaacaaaaaatactttcgtcacactataattttttttactaaatttaacttatattcataatataatatttaaatataaattattactaatttaattttaattacaataatttacctttaatcaccacgacataaaaataataatttaaattaattacacatttttcattattaatcacaaactttattgacaatatatgacaattgtagagaggcaggtggggagtgagattaataactaattagaatacattgacttgaagagaagtgggtgaattaataatgaaaagggtggtcggttttaatcaacatttctttaatgacataaataataaactattgtaaaaaataaaaataaaactaataaactatggcatattgtgttgactgttgagtcattgtgaaaattacaggattattattatataatcctgttgattagcaaactagttatactgggattatacatatagactaaagtgatatctattttgaatctatttcaatttggttgtgaaattaaaaaccaatatacttggtttaattagtgattatagtaacaaatgtctggattagttcaattactaaagtctagtcttacgcgactagaggagcaacagtacttttcattcattcaaatcataactaatccatttttcggttggtttcatgaagaatattcccaaaaaatcgaaagtttagatcctttggagataacttgtggccaagaaaacaacatatttcatgttgcagtaaaatgcacagctaatccacgaatagatccaatacagacttggctaagagaatactccttacttgcctttcagccgaacaacaaaggcgacacgcctttgcatgtggcggccaagttagggaacaagagtttcggggcggttctaatagaacatgcaaagagagttgtagaaggccataattatgagtcgtatagagatctgttgaggaaggtgaattatgtgaaggaaaacacagcacttcatgaagctgtgttcaacggtcacttcgaaatcgcaaagctgttaatcgaagaagacccaagtttgacatgttttgagaataaggatggagagtctcctctgtttttggctgtagaaggaaggttttatgatattgcttccataattttggacacttatccaaattgctctttgttaggaaggaaaggcatgaatgttatgcatgctgctgccattcgttcgtgcacaaaaggtaggaattaattatttgatataattaacgatttcaattttatttcctttgaacatttcttcaaaataaacaatataaaatgctcctatactataaatttatacacataaatttcatattgtttttggttattatactaattcacttctatatttgtcttatatagtagaaacattgctgctttcaagaagtgttaccaggggttttgacggtgagtttaagtttaattttgagttcaaaagaaatacttaactttaatttttaatagtaattaagtgtcaagtcattatccatgtgttattggtatattttaaactatttttttttaaagaaaat

SEQ ID NO: 112165 - DNA, 6612 bp, Cannabis sativa
  modified_base (6535)..(6552): a, c, t, g, unknown or other
gctgacgtggcacatcggtatatgcgcaaaaaaatttgttgaaggtatttttataaataaaatcagtttttggtataatattaaaaagacccctaatttaatcgggcatgccaaatgagccttgtttatggtgtcaaactatctatgacttggtacaacttaatattactccatattgaactacaccaataagattatctatgttatgaggtgttattagtataatttaacaattcttttttcttctactgatgggattttctttgggaaaacatggaaattatttttgtttattataacatatttccttttcccacaggtgtgttataacatattataacatattgctgttcattgatttcattctagggaatggagttgagcaatggtgtgttccaagcggcaatagtattaagattaatgttgatgcggctgtatttagtgataactctacctttggtgttgggtttgtggagagagattccaatggctttttagtagagagcggtacaaagttgttctatggctcgatttctcctgtggtggccgaagcaattggggttcaggaggctttgagttggatcaaagatcattcgtggcttagtgtagttttagaaacggattgtctttcggttgtacaagctattcgtagctccgtagttatgctttccttgtttggcaaagttattagtgattgcaaggttttatcaagtattttgcgtaatctttcttttcattttgtaaaacgatcagcaaatatagcggctcattcctttacaaggacctctatatctcaccctgatcgtctttttaacttggacactgttccgattgagctgagttattcgtttaataaatgaagactttcattttcaaaaaaaaaaaaagaatttacaaaaagacttccaaccaatttggccttgaaatactgatgatcgttcatgtgacattcaaatttcaaaagaagaagagaacaacaaagattgaataacaatacaattttttaaagactaaaatatattatcataatgaattcagaagcaccaaatgattagccctaaaaaattatggattgatcttcgaagcaaagacttatcaaatgccaaagatacatacatatatgctaaaagctacattatacatgtaattacaaaaataacaccggaagccaaaaaagaaaataatattattagttcagattaattttagcgggaaggcaaacacaagaagttttctcttcaggtgtaagagttcctaaagcaaccagtttcataacacgatggccattaagcacatacttttgctctgcctcagcaaaacctttgttgagaacctgttcaacccatttctccaccacccatttctcgtctgacaaccaagcagctgcaagtatctgtatcatgactttgtagtcaatctctagcataatctcagctcccaacattctcttcacatttttgttgatgtcttccactattttcccagcaagagcatcaaagtcgaatggctttaaaaccactttttcatccacttgatcaaggaaatcgtccaaccaggcttctgtgctttcagagatggagtcactgtcatactccccacaatcactttcttcaatctcctctacaggaacattcaagtccaggaaagatcttggtgccttgagggcacgttgttgttgctcggtggagttgcttgatttaatcagctttcttttatttacagatgaagggtttgatgattcttctttcagtgtaactttcacattcatactttcctttgggtttgcagtgctagcaacagatccaccgatttgtatttgcatttgacatctcttagctgctagaatcatatcttctgaaaattgcatcagatccttcactggatggtgagatgttttccccttaataatagtagtggttgccacaaatgtaacattgctaatgctgatttctcttccgcgagtgtctggaaacttgcctgttctaatggcttgcgacaagctattctggactagaagatcagccttctctatattttcaagaaagataactgcatgaggtttcctgcttaactctccagcaagataatcaacaactgtcttccccctaaacttcaaatcataatctgggtcctcacattcaaaaatggagtctgtctgacatcctctatcgtgagaacccaaatcaacagcaattaggctttctcttgagccatacagtatctcagcaagtgctaaagcaattttcttcttcccaactttgtcaggtccaagaaatgtaagccaaatatctcctctgacatttgagacatgatgtcttcccccaccagatctgctaaagcatacagcttgactaatagcacatatggcttcatcttgccaatccactttttcagttaagacacttttaagtgatttcagatccttaggatcatttaaatttgttgtagaacaggaagattgtacagctctaggcaaagtattcttacttattgcataaaactcaggtgagaaagcaccagacatgtattgtgggcgtacattatgatctgatgattttgtaggccgtggttccttgctacttgatgcatatattgttcccaaccccaaatctgtggtcacagaagtgacagatgaagacgatgtgtggtccggaagaaaattcatatcataagtaggtttaggggaataatgggggttccccatcgcattttggcaactctctgaagctttagtcaaattctcagaatgaagatcagcattcttggggtcagaagccactgttatcaaactgctctgctttgaaggaaaatccttttgcaagtttgttggtgtgttggaagatgacaatgtagatcgagattcatttacaatcaaatcttcaccgcagctttcttttccatttagagctccttgaaaaacctctactggggaaacttgggacgctggctggaaaacatcagctttatagaatggtcggctgtgatgaagacctagacaaatttcatcccactttttctgcaaccccagtattctagtgttcaatgtacttccaccatcgttggtctgcactgaattaagaagttcattcttaaggtaaatattgtcacatctattgcataatgattaacttcaagacttaagaaattctctacaatgtgataactgaattcagtgcttagtggtgaatttctgtatgcactaagacaaagaatcaaaagttcaaagggattactacacaccttcgttgcatccactccttttcttgcgtcaacttcagccatttgcaaagaaggcaagctttctgacaattgaccagcaacagaaagatttgatcctgtcttcagaatcgaagaaacttcctgctcatacttttccgtgcatgcagagcaacgggtaaaacattggtttgtgctactaacaggatttttcaattcagatgatgcagcaaagaaccctccaaaaggaacaaaggaccccatcaagctgtaagcatatcatgagtatggaactgtgagatccaatggggacaaaaacagttagagccaaagtgtatgccttaagacatacattcatttacaaacaagcatacaatgcacatttgttttaaatagaaaatggcctctttaagtgttacaacaagtgtagcacaaaatgtaagagcatgtgaaaaatatgataactacaacctttcggtaaacaagcatattcttcataaaaatggccaggcatggttacaaaataggtctggtagcttgaaatgactcaatatttttctcttttgtttcttgatagagccaaaaactgcaggttatgaccacagttaggcagcagaatagacacagagccaattcaagttgtaatgaaaaagtagtaacatcccaagaccaggaactttattggataatgaaccgtatatttgggacccaaaatgaaaaatgaatagtacgacactccagcttgcatattctacagagtccccaagtcgtacaatattcctgatacttcactcaagcaaagcttgcactcaattctctctacatttaaacatgacattctgtagtagttactcagactcactgattaaacaactaaccacgtatccctttgtataagttctagaactccaatactgctacatgaaggcgcttaatctagtcataaactcaaactatgcataatctagatgttatcaatgacactctttttaatcactaaaccaagcaatggctatacgtgatatgtttacagttgctgtgtttacttggaaagttcttacattctgtttcttttcccttgtactcagctatggtttggttactcaaacacaacatcaacatgattacaactttcctttccactttcattaatgtcaaacaccaacttcctctatatgagagaagtgtctaagaagaaaaatccaaaagaaatgagctgaaataaaatcatctaccactgaccttgatttagagtggactccttcacttgaagctttagaagacgtaatgggaagaagatgcaagtcccagtccttttgaatggtaggaaactgacccaaaagcttggaatagatttcataagtccgtgttgctccaatcaaccatagtttcccactgtgaagctccaccaagcttgttaatcgtgagaccacaaagctcagccgatcagccgagacaccatcagcaaccgaggtcttcaattctccaaagttcaataagacaccaggtccggagcattgctccaccattcgacccacctccttaaacttcgtatcaagcttcccctcactcccttcttcaaaaaaaaactcagaaacatctttctcaatacctattaaactcaatccagccattgcagctggcaaaatgcctgctttaccactgtgtacaccctcggcgaaaatattgagagcctcgcctgcgtaaacaccgattaacaaagggttcttcccactcttcctcaccaacacttcaccgattcgtctgcagttctcgtccccatcttcttgccgagagaacgggaagctgaaaccccgaagacccggatccgaatcagtaagattacagaggaacatgggtgggcagcggcctctaatgaatgaggaggcttgcctcgccggtgtcggtgggtgaagaatcgcgagcttgatatcgcagctcctaaatccggcttccccaaaaactcgactgacaatcgggtcgtcgagaatcgagagaatgaaatgcttgagctcgaccctcaaaaccgacgtcgtttgctgctgggagtgaagctggtgaaagtgaaaactctccggatggcgcctctggttagcctgggaacgtttgatggcagccatgagggagttcgaaacgggtggctcatctaaagttttagaagaaggcaaacggtcgagagagaccccaacggagagctcaagtgcccgaaactgcaacctgggtgagtacgcgctgcttcgagcgcgcgtgcaggcatcccggagcatagaggagggtaaggccagtaaggccgagacggcatgaagggaggtggtctgcgcgtggcctcgtcgacgcgccactgccactgcatcgtcgagtgctcgagctgcctcctccgtcaagcattgcctcgctgcacttaccggcgtcggcatcgccggctagcatatatctcccctatatatatatgtatgcgcgtatgtgtaaatatggaataaaaaacttgtatatacgtgtaaaagcggagttgggtcgattagtttttggcggttgaagctagtttgggatttggatgaaattggaaaaatataataatagaaaaaggaggggtttacttcaaagactttttgataataaattaattcagtgggaggaagacaaagaagatgagagagagagagagagagagagacaattgtcgtggtttggagggtggtgtggtggagagagcagcagctggtttgtgttgcagtactcgaagtagcagcagtagttgtaggtagtgatggtagctttgtcttgtgggatcccacaagaggtgttttccattcttggggtatttttacggacacatggtgagtatagattctcatctcttttcacacccaacctatcccatcatccatttacttgaaagaaaaccaaaaaaaattaaaacatccaccttaatttttactccacttcctatgggagattttcaccttatttatttagttaaaaaacaaaacaaaacaaaacaaaaattagactcattaaaataatatcaaaaaaaatatatatcattaatcaataaaaattggctttcaaaaatccacattttcattcaactaaattaaagttagacctcgcggttattacacataatgttttccgaaatagacaaagtcaggatcggaccgtacaacttgtgggtagaagctcatttagtcacattatgggcaacaaaattacaagttctactgacaaaatgatcaccgtacactagtacaattgaaatagttagatcaccgtacaaaatgatcatccaaggtaagagcaggcccggccctgggcatannnnnnnnnnnnnnnnnnctagggcccacccagcccaggggcccaaaatttttttcctcttttaaaattatacatttt

SEQ ID NO: 112166 - DNA, 3169 bp, Cannabis sativa
ttatgaaaatgagaagattaaaagataacttttcttttgtatataaaatcaaaaattagtggaataataattattgtatgaattctattaaaatggtataattgtaacaagatagtaagattataattaattaataggtacaaataaagcaaaagagagtctccttagcacttctcaaattataatatctacaaaatatgcattcaattatgtaaagagaatagataatggaattttcaattttatgtgttataggtttcaagtttgtttcaagtctcaagttttttatcatagtatccaacaagaacagggcgcaatttcccaactatgccatgtctgtcattctggtcaccaaaatatataagagccatttacaagacataagcaaataaactaaaaagaaaattgattatattaattctgaagaaaaccaatagattctcacatgcatcaaaggcagtattaaatattcaaaatacataaaaactaaatcaaaactgtctccacataatctcacaagcataaaaactgaaactttcctagttttactttgatagcccaaaattcattcataattagcaaaattatgccttgatccttccatagtacttctgcttctcctgtgttgtctggaaacgtccatgtccaaacttcgaagaggagtcgataaacttgagcttgatctcctccatggcaacacgggaggtctgcttgagaagtgactgacggagggtgacaaccctcttcttgggtccaacacatcctcccttgatcatcagatagtcatccttcaccacaccataatgagggaacccaccgatgggagtgatgtccttctcggtcctaaaatataaaaaattaagttagaattgtctaacgacgaaatagaaagccaattcaatcccttgttcaaactataaataatcagtcattttaccaacctgtcaaactcagtggaagcagtgtgggactcctgtccaaccttgccgagcttgtagatcttcttgttcatctcggtacggtgatggtatccattctgtccagccctagcaactgtgaaggacactctggctggatgccaggcaccaatacaagcaaccttcctaagacccctgtgagtcttacgaggaagacgggtaactccccacctggtaacaacaccttcgtaacccttacccttggtcacaccaatgatgtcaaccatctcatccttctggaagacagcatcaatagggacttgcttctcgaagaaaccataagcaaagtccaccttctgggcaatggaaccaccattgacctgaatctccataaggtgagccttcttctgcttcaaacccttcattttcctgatctgaatatacacagcaaaacagatacatcaccagagattcaaaatgaaaaaagtaaaatcacaacagcacaataacagagattgtgaaagtacctgagtgtgagccaaaactcgaatgatagtagcatacttcttcatcttctcaagctgagcttgaatgcttttctttccttcttcgttttcgtattgcttggagtacttggtgaaggccttcttcttggacttgcaccagttcttgtagaacctcctcttcacctcctcgctcagatgctgagcccagacggtgttcagggtacgaagaccacgtggagtcttcacgtaaccaacaacaccaacaataaccattgggggtgtctcaacaatagtcacagcttcacatgtctccttcttgtgaagctctaaccaaattaaaacaaaaaatcataagacaaaaagacaaatgaaacaagttttaagaaaaaattaaatcatttgaaagtcaattacttgatccaggcttctccacctccctaacaatgtgggtcatgccagccttgtatcccaaaaaggcagtcaacttgcagggcttagctgggtcatccttggggaaagccttcactgcacaaatacaaaatataacaaaaggctattagattctaaaaacccaatgaaacaatgtaatagtatacaatccagaacaacgtttaaatgaactatttatcaatagaactaatctaaatttatcatacataaattgaaaatgagaatttaaacatttgaacaaactaaatctattcaatcatttatgtatatataataaaaaaaatcaaaagtaaatactaaaatacacaagaaataacttaccctttcctctgtgacgggcagctctcttccttggaagaaatccaagagaaccatgtctagggtgctcaaacttcctgtgagacattctcttcttcctactggcaataacaaatatagtttcataagaatataatcaaattaaaagttaaacaaaaaagctctaaattttaagtgctaaaacagaaatgcaacaaaagaatcaaaacccattattttcttatcctcaaacatataaaacaatctaatgaaaacccatgaatccagatctaatatgaactaacacaaactaacgagagtacaagaaatgttgctaaaacacagtgtgtatcatcacaaaatgtaggagaatgaacagaaagaagttcatttccattttcgttatcttagagaaaaacacatacgaagcagagacagagaagagagaaaagggaaggaaacctgagcttctcgtgcggcgaaggtagagctgaactagcacaccagactgaagggttacgactaaaaccctagatatgtttttatagtacttattttgcagacagatcctatatttagcttaaattaagtatagcccccattctcatatctcaatatgggccttcttcttttccatttcagcctatttgttaggtttatgtttcttacactccccccattctatatttttagagaaaatataaactttttttattattattttttttggtaaatagtagcataaatacccaaaattttatttttagcgttataagtacctaatgtttgtaaaactataattttcttacagttttgtcagtacagactctgttttaaatttattaagagaacatttggaagtaactcatactacatataaaatttcatataaaatttcatataagtatctacgtcagagaattctatgtgactatttatataaaatttcatattttattttattttatttataagggaaatttcatttttttattaaat

SEQ ID NO: 112167 - DNA, 1724 bp, Cannabis sativa
ggggggggggggggagaagccttaaaagtgggtggtgaccctttttgagatggtaactagctagaaaattttgttgaagaaaatcccgacggctgagataaccaaatagagtactataaggaggagccaaagggtggttattatgaggaagaggaaggagactatacctacatctacacagatgacttagaagtagtctgtttaaggcacctggtccaagagcaagaggctaaaatggcaaaacaaaaagaagtagccccctaaattcaataaatgctcatatatttccaaagcctaatagcaatgggaggccttaacccgaaagtctctcctacaaaatggaatcttggcatggtggtctaaattaacaccaatttgacggtagatgcaataaagttcaaccatccttgagctggaccctcccaatcagtgaataaaaaaagggaatgccatagctaatggcccctaaaagagaactctccctcttgagctagcatgagaaaatccaaaatttttgaaaggaagggctggccaaacccttgggccaggtcacccaaacaatccacaaaggagggtcctgcaaggcaatacgaccaattcccacacatcaagacttaatgcccaaggaaggagaaaccatgctagcccctcagttaacaaaggagaggatgttgagacttggatcctaaagaaagaaatttaggggttgacctcagggacaacttgaatgcacagagagaaaaagtgtgatgtgaaagaattaggcatcagagatgaaatttaagaaataatgtcgatgatcgtatccaggggaaagaagtttaggatgatagcaccagacgactgaaagatgaaataataaccctaaaaaaggcaattgattggctgatcaagaaacaaagcggagtcgatatgattcagaagatgaagatttggaaccatgtgttggaagaatcttagatagtgttctgccaaagcatttttgaattcctcaaatgggcttgcacgagggccaaatggaccctagggttcacttgatactagagagaacatccatcaggctacctgcaacttagtgcactacaggaagcaacctcctatgttcaaagggggaaagaacaataaagactagaacaacaaatgtgagtatcatggtgacgtaggtcacacttctaacaaatgcaaccagttgaaggattagatggagaacctgatcaagttgggccatctccatcagtggatactgatatcggttatatatcctagacaagtaataatgtaggggcaaaggatagttcctagacaagaagggtctgctaaaccccctcaagtggtggtctattagtaggctctaggaacacaagttcttcttcaagggacaccaacttttcaatagtcgacggactcagtaagaaaagtacagacttgtatttagacacccatacacctacttataaggcttaacaaatgattaagaacgttcttaacaaaggtacgacctttataccacatgcactacgtaccgctactgtactagtgttggtagggtttgaactgtaccccaggtaccactgagtgttgtaccacatgcactacgtacttaactgtactagtgttggtaacatcagattgtacctttgaacatcatatgttgtaccacatgtacttagtaccgccactgtaatagtatttgtagcatatgaatcatataaacaacatgcata

SEQ ID NO: 112168 - DNA, 4550 bp, Cannabis sativa
aaaatggtcggttttaagataggttctggattggtcggtcagttttcagaatgcaccaatctagaccgaaaaccgaattttggatttttatttagaaaaaaaccgtccaaactgaccgatgctcagccctacttaattctactgatttggaacaggcgggtgatgctgtgcacccccgcccaagaaaatgagcatcttgagttggaatgcacatggtttggggagtgcacctgcattcagaaggttctcccttttggttaaggaacatgtctggacattctttttttgatggaaacttgtttgcctatgcaggttgttgatagaattagggttgctttgggttttgataatggtattgaagtccttaagaaatattttggtggggaacttctactttagtggaaggctagtgtttatgtaaatattttatctttctcttgtaatcatatagattaaagataatgatatgtttaactttactggtttttatggctccccttctttttcccaacgttttgttacatggagtcttcttgacaaaattttctataatgcccctaatcttctttggtttatcatgggagattttaatagcctactttcttttgatgataaaattggcagtaactattatgatcatagagacatggatcaatttgctaattttttggataaatttttcctttctcccctcacttacatgggagataaatttacttggcgtaatagttcggtttgtgaatgtattgactgggctattggtttttatgcttggtgtagtctctttcgtaatgcggctttacatcacttgcctttttacggttctgatcatagagcccttaaggttcttctctaccctaatgacattaattgttctccctttattaataaacattttcattttgaaaatgtctggctcgagaatcttgatttctataccactgttaagaactcttggagccacacctctaatcaatgtagtggtaggggtgctcttaataggtttctttactgtcaaggatcttgtgtttcttcttttaaaacttggaataagtctgctaagcaacttttccatgctcggattcttgatatccaaaaagagattgccaagcgtcagacctctgctcatgatggcagagagtttattcctcgtattaagcacctccaatcttagcttgacgctctcctttacaaagaagaaatctaccagaggataagggctagggttcattggctcaaagccggtgataaaaacactaagttttttcattgctttgcgtctcaaaagaaacactattaagtatcttaaggacaattatggtaatgttgttaacaattctgatgctatgtgtgatcttatccaatcccttttctctgacctatttcaatctgagggttgtgatgctgaggctactaatctaactttagactatttaggaccctccctaagaattctgagattgaattccttgctcaacccttcacgattcaagaggttagaaaagccatttttaatttgtctagggatagagcttcaggccttgatggccttgacgcttacttttatcaaaagaactagctactcttatccttgattttgtccatgctgttttggattgtttgaataacgatgctaatttttctactattaatactactttaattgttctcattcttaagaaacagcatgctaactctcttaaggactttcgaccaattagtctttgtactactctgtataaagttttctaaggttttgctaatcatttgaaggttgttttaaataaaactatttctccttttcaaagtgcttttgtttctggaagaatcattttttataatattctcattgctcaagaaattgtttatgccatcaactctaggaaaaatggcaagagtggttgggctgctcttaaacttgatatggctaaggcttttgattgggttaagtggcagtttttggaaagtattatgtttcattttaatttccttattgattttgtgattttgtcagtttggttatgaaatgcatttctactactactctttcttttttttttttaataaatggagttgttaaaggctctcttaagccttctaggggtcttgggcaaggggatcccttatctccttatctttatattctctgtgctgaaggattatcttcccttcttagggttaggcaagatgctgaccttcttaaagggattgctatatctaggagtgccccttccatctctcacctctttttttgctgatgatatccttattttctattctgctgatagaagttcctgttatgctcttcaggaggttttcattatttactctagggcttcgggtcagactaccaatttctcaaagtcctctattctcttttctcccaagactttgcaagaggtcaaaaatctcttttttgatacttttagcttagaagatagaccttttatctataaatacctagatcttcctcaatgtctctctagatctaaatatccctcctttacttttctcaaagataaggttgcttttgtccttcgatgttggtctgctaactgtttctcaagggcgggtaaggaagtgcttctgaaagctgtgattcaagtcattcctgcttatgcaatggcttgtttcagattaccaattaagttatgcaagggtattgaggctgcgatggccaggttttggtgcggttctacaggggcttcaaggaaaatccattgaaaatccttgaagtttttgtgtcaatctaaatttaaaaggggtcttggttttcgatcgctcgtacatttcaatcaggctatgcttgctaagcaagcttggagaattcttaaaagccccacttcacttcttagtttggttcttaaggctcgatacttcctccactcttctattcttgagggtgtccctggtcataacccttcctacacatggagaagtattatttggggtagagattcaatggcttcagaacttatttggaaagttggggatggaaattgtattagaactttggaagatcattggattcctaatcataagcttaaattttttcacacaaatgtttctcccttctcttctttgttgtcttatttcattactgattcaggttctggggatttagctaaactcagagcctattttgatgagtccatgattaatgatattcttgaggttcctgtttctggtttttataatagagatgtataatttgggaccaggagagttttggcctttttagtgttaaatctgcttaccatttggctctctctcaacaggaccttccctcctcatcttccttttctgattctaataagttttggactaaagttttgacttctaaagtacccccaaaagttaaactttttgtttggagaatgttttctaatgctcttcctctagcttcctctctgttcaaaaaatgtgtaattgattctccagtttgtcccctatgcaaacttggtccaaaaactaccaagcatgccttgctagactgcttcagatcgagaaaagcttggcaatcatccatgtttgctatattttataataattatacaaatcttgacattaatgaattttgtttaggtattgttcagaaattggacaaagactatatttgtattttatactattttttgtgggcacttgggaatcaaagaaataatacttttcataatcagtagactcttcctcccacaaaagtgtatgattggagtgttaaatttttcttcaagtatttggatgtgcagcaggttcaaacatcaagtaacaactttactactgctccacatgatgctgtggaaccggctctcttgggcaatcttaagatatttactgatgctgccattgatccacattgcaaaagacatagtgttggccttgttgttttggataattacaatcgggttaaagcacatttttctaaacatttgttgggcttgtttcccctactgtagtagaagctaaggccatctttcaagctatcaatgggcttaagtgcttgacttcctgtggatgtgctcctaattgattgtaaatctattgttgataaatttgtctcttgtactggaaattataatgtattggatgatagtttaattagtattaaggacttgttatctttcagtctaaacctagctgtagctcatgttcatagagagtctaatatgttcgcttataaagttgctaagttaggtcttggattagataatgagttggtttggaatggttctttaccttccttgtaacttgcttgctttctattccttttcttatctattgaagcacaagttctattaaaaaaagatctatactagtcttaaatttttttttatatctatttcttttttccaaatacatatatgtagtatatttttgtaaattgcagtataagtacttaaatttttaagtttataagtagcataaacttaacatttatttttagtggcataagtacctaatatttgtaaaactgcaatatttctctaatttcgttggtgcatgcccttttattgtcttaaatatgacacatataaggctcaaattctaga

SEQ ID NO: 112169 - DNA, 4014 bp, Cannabis sativa
tttttaggggtgaaaaaaagttatagctaaagaattgggggcttccaaccccacaagatcttattgagcaagaaaagcatagtcaaggtcccaaagcacctctctcccccattactctctgctgtgctccctcagcctctctcacctaacatttatatcatttgacagagttttagtaattaaattcaaaaatatatttaaaattgaataaaattgaaaaatatatatatatatatatatatgtattaacacacacacaaagtcttttttttttttttttggaaaacacacaaagtcttaattacaataacttttatgtttattttttctttatcatctatctatgttagtacaagaatgaatattaatgggaataaagttcctcttggatattttttttttcttagtgtttaaactttaaagggttcttgattttgttgtttgtaacaattccgttgtggctcagtttactatgtttttcaccaacccatttgaattttaatcgaaagggcacaattgtaaattacaatgagttctcatttcacattataatatgttgattattagatgaaaccactatttgtatagtttcactttcaatttttcttttgtttttagagaaaataacaacaaaaaaagattaaggaaaaaaaaaagtggaggcatgaaagggttatgcaatgtagtcttagattagaccactttttaacgttaggaatgttctgtttttgaaattaaaataagaaaataaataatattttgtggtttaaaaagtgattgcaaagccattcagcgatcctcctccccaaagtagatctctctatctcaatcccctgactcatttctctttctttctttctttctttccctatttccaaggtttgattactttgatttattatctcactctttcttttgatttcgtgttcaacctaacaaaaaaacagattacttataccattccctcatgtaaaaagaagagatacatgtggatttcattttcttttttttaaaaggaaagaaaaaaaaatgtattgagcctactgaccctgcaaataaaatcaagtagattctatttatccttttgttcatcttgagctctatcaaacgaaactgcagtaaccgtgttactgaaccctatttttttctaaaaaaaaaaagaaagaaaaaaaaaaagagaaagtaattgtatgaagatatacataaattactttcaaaacagtctttctaacaccaattaacctttaacatttaagtgtcaagtgttgttcataataataaaacttgtttttgcaaaaatgatttaaaaaaggaaatgattaatttgtaaaatataatatgaacttcttttggtcttaatttaattggcgatgaataatagtaaagaaagaaatgattttcaggatgtggtattggtattcaatagtctctttttttttttgctacatcctaaactatgcttaatttttatttaaattttagagaagggattcaaacttgaaacgtttttttacctaaaaaactgtgtgatactataatatttatgataactacacgacttaactcaacttaatgtgcagaacaatactaaatgtttttgtaagcaacgtttttttatttctctctcaaagcaatatgctttgcgtttgcatggagagatatgattaggcccactaaagttaatgggccaggatatgggagtgggagtgacattacaaacaagctcttcatttattaaaaaaaatggtccatgaatgcgtgcagtttgagaaagtaaagaataaagagcatacattaatggtcctagagccgaagtttgggctcaccaagacccatatcattttcaccatttcgcacctcattctctttcacttttgtaggtttaggagttatattattttgttgcaaaatttatgaaaatacgatggttggatttaattcaagtaaaaaaaaaggagcatatgtaaagggaaatgtaatgttatacctatgagaaaatcgtattttacataatttgctcatacaataaacaaaggaaaataaaaacaagtgaagactttattgagaaaatgaatgatactatacaatagtctcacattaattatatcactagggatactcgaatggttgagatagggagggaaagtttaaggatggaatgaaattaaatagttagaatatcattagaatggaatgagtcaatgaaattattactatggtggaattccattcaaaaataggaagaaaggctcttccactaaaccaattatttttttttttccttgtattaaattttattcaatttcatttttattcctttcttcatcttccattttcattattctcaaccaaatatccccaatataacatcaataactaactagaaattacattaatataaaacactcaatggagtaaaataaagatggctccaaaatatagaaataaaaatgaaaaataaacttctttatatggtctatatatattttgtttaaattttatttactgaaatttttagaaactaataaaataaaaatttgagaaataataaaatacaataataaagaagacaaaagtttttacgtagcttaggtgttaataaaccatagtccacgagtcattattattggccttatgaaacttgatgtgttacaatagtatttgcaagaaacactaactctgctctcttagtttctcttgaagaagaaagcttaaaggaattttaaaagagttttgactaacttgttcttgattcctcttttgtatagaaatagaaaggtatatataggataaagggtgggtatggacatgcccatgacccacttaagatttttacaataagtccactattggggtaaaactacatgtaacaatctgactcttggactcccaagaagattttgtgctcgtacgtagaagtagctggacaataggggaccactaattgtacaggacgcgtgtcgccaaaaggtttcactttgcaaagtaaatgcctgcaatatccgtctggcaaaaaattatatgggatgctcacaccatagtctgacattggggacaagatctgatcctatgtcagaaagagtataaccgtctctaaacgatctgggttcttcttcaaagtagacctccgcattccttttaggcaatcagcgtccgtgactaacccttcaagtaaccttccaagtatcgcttggccacactttcaactcggtcacctccgaaccccgaagggatagtaggacttctgtgtctcggaagtcatagtaaggcaggatgtacatcctttagccttgggctgttcctgaattcgtgaagcttctccatgacctgaccttgtaaaagggtcttagttagtgactacttaaaatcatacttctcttttcatgtcacgagtctcccattcagaaacacggataacaaacctcatgtttaatttttttctcctaagtgtctctatagtccatatttagagattattattcattcttcaaatatatattatattccccttctctcatttttcttatattattttatattaaaatataatatatatatatatataaataatatagagaaactattttacatataaacatttcatgtaaaatataaaaaataaaattttaataatgtatcgtaaaagatagaataggtgcaagattacatattcaaattcaaaatgtagaaagttgttctaatattttaaaaaccaagatcaagtcattcctaagcaaactcaaaaagaaagttcttctaatgtcaaaaaaagaagaagaaaaaaaaatatatattcttcccctacacagactcgccaaggcatgcttcaaaatcccacattgccttcaatgggcttatattgagttgggtccaagcatgacatatcccaaggccttaaagagcttagaaattagaatgatgtaaatatagggagagaaaaagggaaacttacaaaaatactggaatttggattaacttttacaaaaatactgtcacacagaaattttttcaaaa

SEQ ID NO: 112170 - DNA, 1333 bp, Cannabis sativa
gagcagtctagcagagcatgcttaatagtttcagggttgagtttacaaagaggaaaaataggggaatcaacaacacatttcttatgaaggaaagaagctacatgcattagacaacattctccaaacaaaaagcttaacttttggggtcgttttcgaattccaaattttggtccaaaatttcttagaatcagaaaaagaagaggagaaggggatatcctgtttagagaaagctaaatcataggcagatttaacactaaacagaccataatttttaagtgctcaaataatctcatccttattatgtaggccagaaataggaacatcaaggatatcattgatcaaggactcatcaagataaattctaagtttaaggtcccaggttcctgaatcattaataaaataggataacaaaggagaggaacgagcactattaacactaaaagacttaaacttattattagggatccaatggtcctccatagttctaaaggaatttccatgcctaatttttcaaacaagacccgaagccattaaatacctcccccaaacaatactcctctaggtgtacgaaggattgtgaccagggacaacctcaagaagagaagagcaagggaaatatctagccttaagaactaaagcaaggagagagttggtattttaaaaaattcaccaagcctgtttggccagcatagcttggttaaaaagaacaagtgaacgaaagccaagccccccccatagatttccaagatttttaatggattttttttgagttccaaatagagccccactagaatctggccatcacagcttcaatacccttacaccgtttaataggtaacctgaaacaggccattgcataagcaaggatggcctgaatcacagcctttagaagaattttcttaccagccctagaaaaacacttagcataccaacacctaataatagaaataaccttatccttaagaaaagtaaaagagtgatacttagatctaaaaagacattgagggagccccaaatatttacaaataaagggtctatcttctaagttaaaagtattaaagaaaagatttcaaatatcctgcaacgtattaggagagaaaagaatagaaaatttagagatgtttatagcctgaccagaagccctagagtagatattaaaactatcctgaagtgcataataagatcttctatcagcagtacaaaaaataagtctatcatctgcaaaaaaagagatgagagatcgaaaaagctcttatagagatagtaattcccttaagaagaccagtgtaatgaccgctctagtattatgaattagaaaaggcaattagcacta

SEQ ID NO: 112171 - DNA, 4726 bp, Cannabis sativa
  modified_base (4687)..(4689): a, c, t, g, unknown or other
catgtcttgaaatcttctaaacccgagacatccacaacctttagagcgcagtatctttgtttgtttgatcgaggacctatccaccagaattttgccaaaagtttgtctaactcttcgcaaagagtctgtggaaccaacgaggttgccatgaaataggttggaatactttggagcactgaactaacaagagttgttcttccagcctgcgaaaggcattttgctttccaaccttcaattttgttcaacactttctgtctcaagaactggaagtcattccttctattggcagtaaagaaaaaaggatttcccagatacttttccttcgtattcagcttcggcatgcctataatctccatcaatagattctttgtgtttgcctttgtgtttggggagaaaaccacaccacttttttccttgttaatcttttgacccgaccaatcttcatattgtttcagaatactcatcagggagcttgcatttttctctattgcttggcagaagtaaatagcatcatctgcataaaacagatgggatataggagtagcatttctcgagattttaatcccatcaatattctgatccttctctgcctttgaaatcattttcgtcaagacctcacttgaaaggatgaataaaaagggtgatagaggatccccttgtctcagcccttgattaggattgaagggagcaaggggtgcaccattaaggagaatcgagaaacttacagaactaacacaagacatgattagtgatatcaccttgctactaaatccgttggcttgtaggaccttgtggataaacttccactcaagtctatcgtaagctttactcaaatccgtcttgattgccataacacctcttttacccttcttgttcttcatggcatgtaagacctcctgagccaagacagagcattctgcaatccatcggcccgggataaaggccgattgatgaggggatatcagcctgtccaggattttcttcagtctatcagtcagaatgcgagagattatcttataaccataattacacagactgatcgggcggaatcggtcgaaggtgtttgtattatcgttcttaggaataaagcatatgaatgtgtgatttagagtcggagggagtatgccgctagagaagaattcttgaaccattttgcggacttgtccaccaaacgtaggccagtattttcgaaagaaaattcctgagaaaccatcgggtccaggggatttgagtggatgcattctgaacaccacattttttatctcttcttcgctcggggtgttgcagattgcttcattttcctcaagagtaacctggtctaagaatagggactcgaaatcatcaccaaaactcaagtctgttgtctggtaaagatttttgaaattagtatggaagtaatccccaatttgctctctctgctttaaccacaaacccggagaagcttcgacacaactgatacggtttcgtcttcgtctgatcaaagttgaagcatgaaaaaatttcgtgttgttatctccaaatttcagccaacactcccttgatttttgtctccatattcgttcaattctctcctccaagtttagaatttctagttgaatactggcttctttttcaaggttttcctgggagaacacagctttttggataatcccaagatcgcttttgagatgtttcagccgcttttcacagtggccaaatctcatgacattccacttctttagttctttcttagtgtatttcagttttttgcaaagaatagtgccctcattccatgtcgcttctaactgccaagctctagaaataatattgacgcactccgaggacgtagtccagacttctaggaaccgaaaaggatacatgagcttttcatagtccccccaggcttttagtaatattggggcatggtccgatccatatattggcagatgcacaaccgaggccctagggaaggaaacacaccattgatcatccacaattactctatccagacgttcacgaatgtggtgggaaaaggatcttgcatttttccatgtacacagggcaccctcaaaacccaagtcaacacctcctgagttgaacataaagttcttaagaatgttaccttcccgtatctagtactgacgcctcccaattttttcattttcatccataattacattcaggtctcccattaaagcccaagcatctgcgcaatgttgtacattttggatcaaccaatcccagaaattcttcttcaaaacagcatatggtgggccgtaaatacagagcagcacccattgagggtagtcaagagaagcctctattttaaccttaaatcccatatcataaacctccatgatatccacctgcacccctactctccaagctacgcagaaaccacctgcagtgcccaccgcaggaatacaacaggagttcgcaaaacccagcctattcattagttgaaccataaattctatgctcaccttagtttccgagagaaataataaatccgcatcattctctcgaatgagtccctggagggacctttctgtcgtgggtcttcgaagaccccaacagttccaagataagcacctcattggggaggtgggggcatgcttccagccgcctcctcgccttgaccaaaattctgaacataactgatttgaagttcaaaacagttttcaagagcatcacctaagttcccagccaaacattgtgccgatttcctcttgcttcttgttttgactcatgaatttgcactttgcaatgttttcttgtctttgatactcctcctttgtttactcttcttttgggcctttgaattttctccttctattgcactgccccttgagaattttgcattagtatccagtgataataatgcctcttctccaggtataagttccgttgaaatctctgttattttacactgagagggcgatggaaccgggttataccaagtgtgggccttcctctttcgggtacccagtaaatgggttattaactcagagagatcaggagggttggagattaatgattgttgggctttgaatttatcggtcaagtctggcccatagagcttaagaaacatttcctgaagttcttggttatccgtgggccaaacaattgggatgtcttcaggaaagttatgaggcctttgagatttgcatacccaggcatgtgatatttctaatgactgggctaaggaaggcccaatatcggggatatcattttcttggcccaaagaaaattcgggtgttggtagatgtaagaagtttggcccaataggaattggaacgttagagtttcccgccactcggtccattggtactctgccacacagtgtactattttccccagcacacctctcattcgtacctgacgactcgcctgcagctatcattccaccaccatctttgctgtcctgtgtactgttgatcagagctttgtctcctccggtagccttgccgttgattgaacctcttctcttccaagtacccctcctttctttttgcttttcaggccaaactccatcgtgggattctatctaaagccgagttattcccttcccagccgcaatgaaacagtttctcctgcctgattccgttttgatccaaggaccatacatagggacaacattcccaatctttggaataaccattgccatcggagtgttgcatactttgtcaagatgtgcaagtttcccacagttgaaacaaaggaaggggagcttctcatacttgaactgaatccatgcatcatccttccctgtcatagttaggaaaaaacctgcactgaaaggatgagtgatccacacatccacccaagctctcaagaaaccccgtctgactatctccactttctgctttccatcatttttgacaaaggttcccaccttctttgctattttatgggtgttctcatcggagaggaatcttgtaggaaggccatggaattgaacccagaatctcgctatttcaaactcagctacggtaacttctccctctacaggccatggtctgaggttaaggagaaccccattcaccagccatggccttttttccattacataggcacagtcatcctctgagtcaaagaacaatcccataactccttctccgcatttcttcattctccaatttcccagatttttccatatcccatgagaattttttttaccgtcgagggtcgcatttctttgcatcccattacctttccaacacacgctttgtttacaaccacatcctcaagagtaatatcttcgaatagttctagcatttccatctccatagcactatctctttccatattcttacttgcagcagtgtctataaagtccacattaatatccgtcaaagcttgagcttgagtccccatactcatcaaatgaccaaacactcgagcgaacctgagtagaccttaaacaactctgtattttcgataatagcaaaagatgtttcaaaagggccttacaaaaacgaataactcttagtaagaaaaactcacagttagaataactgaacaaaacaaagagtaaaaatactcagcctgagaatcagactagacccgactaggagccatatttatgtgacccaaatgagttggacattgagaaatttgctcttagtgtttctttcttaatcttgtatgggtttgaattgcaattctcttttcttgtatttaattaaataaagaattttaactaacnnnattctttctgaagcttatttattaaatattcctattt

SEQ ID NO: 112172 - DNA, 5265 bp, Cannabis sativa
  modified_base (1785)..(1785): a, c, t, g, unknown or other
taaagaaaactcaatcgtatttttcttttaatttaatggaatttattttattatatataaataaaaaatcaccaatgaatttttcataaaccaaaccaaatattctgtggatagatatagatttgaaagtgccacatggagttctcctatatatattgatattaataaaaccaacttgatgcacgtaacctcaacctcaaatatgactatcaatcctattaggtgtccttcaaaaaataaaatgaaatcctttacttgttcgttctgaaatatattaaaaataaatttgcatggagattaactcgtaaaaagtaatgtctttatatttgatgagtataggggaaaaaacagtcaaaaatttaaaaatacaacctttcttattacttttagatagtacaaagatgacttcgtttcaatgaagggaagaggacagaatgatatgaaggtgaaatatttttgtaaggcaaactgtacttgcaccacatacaagcaacgaaatagtccatggctgtaaattacaaatgaaaaccccaaaagagtcctccaaagggaaaaaaaaactcccaaaaagaacgaaatagtgagctgcaaataaaaaaacccacctcactagcataatgatgcccatttatagtgtaaacaagtcagtgattctaaaatacagcaaaatgtgtcttttccggacaaatttaactctgattaaccaaaccaaatatcccacacaaatttcttctagtacttttcttttcttttcaatttcgcataacccagacacaattgcttgaaatttaggtgtggcaatttaacctcatggaaagaaccagaccttgatgaaaacacccaaagctaattgcaaggcaaatgctgcaacaaccactatcttaagatcacttccctctatataggacttcagattcgtggcaacaaaacaagctgaggcagcaccagtgagaatgataatcaaccagcggagaaactcgaccggtattaccagcagaaactgaaaattttccatcaaattatatattagatggctttgaaggaacatattgtgcaagtttgcaaataatgagcaaatgacaattgctaagctttctcaattgcaaaattttcccataaaagtttattgactacagttctttgctcactaagccaagaataaacatattttttgcttaattagtagaattcaattagttcaacaaagaacgtgttgagagttaaaatgtggccttcttcttctttactctctacggggaaatgagacaacacaatgaaaaaaagagcattaagagaaagcagctacttacagaagccagaacaaaaatgaagagagagtatccccacatgcaccaaaacttaatgagactaggattggaacccatgtactgaagaaggaaataaaataacaatggcaccacagctgcatagccataaattgatccggctgctacatttacatagctaacattaaagctccaagtagtagtgttgtcagtgttcttttgcatgaggtaggttgcacagtttccaagggaagcaagtacaaataccaatgtcgtggagatccatattagcccataactacatatcaaaattatatcaagaagtggttagatgaggagaaaagaaacgaaaatgttacttgttgtttgtcatttgatattaagtagcctagaatggggtttgaactataagccttttactcacaacacacccactcaactacttccacttgacagactcaagcgacaaattgccttttacacacacacacacacacanacacacacacacacacacaaccacttccacttgacagactagagcgacaaattctcatgcaggatcaccacaagcgatactgttactgtgacctaataatcaacttccaaccagacactgctccaacaaacaactgaatatctctagtcatcatattataaaagatcaaataatttatgatttaaggtacacaatcaaggactagttttagattttttttttcttttttagatttcaaacaaatataccacaagcatgttaataatgtagctaatcctagtttcaacatttgatgtttgttttcttccatatctatcagaaacttatctgatatcggtttgtcctgtaggacattaataattctactgctctatgtcaatgagaaataggaagctcttcaaatctttaaaaccaacttgtatttacttttgctgcaatttgatgtttcctatctatgtatgaggttcaaggatacataatcatgcctaataatacttcacagttttgcaaccaaatgtaagatgtggaatcaatattaatgaccagtaacaaagatcagaactcacaggtcagggttagcatcaatcttggtaaaaaagtctccgccaataggatgtagagaacctagcaatctgtttaagacaaggtctgtatctacattgaaatattgtgtatacgatgagacactaaatactcccttccagctgtttgcaggttgttgttcaaagggttctacagttaaaaaaaaaaagtgaaacagttgtgaacaagaaataataattaataaaacagaatagaatagggtgtcttttgggtgggtggggtgttccacacacacacatgcataaatttcaaattcatgataaaatacaaaaaatagttaactttaactcaattgcagtccaaggataaaatcagaacagccctattatttacctaaataaacaaatgcaatctcccaaaccagaaatgaaataagcaaacatcaatttgaaaccaatatttggtataaagcttagagcgaatcttcatgtgtatacttgacaaaatcagttaatttatcaaacaatttaccacttggacctggactttcaagagtttgatatccccttcccctgtctcctccattagttggtggaaaaatttgcatattagctgatggcactgtagcaccaaaaaatacaaacaaaaaatacgcaggaatatgttagagaaaaatagacctagattgaggataacctgtacctaaggaaagactcagtgagttaaaaaatgatagtacaaatcataccttcatagcttgttgtactatttccctttccttcatctataacagcctatttacccaaagacacaaaaacacatgtaagtacatattaatagtacctacaaatgtgttttttcatcattaatcaatcgaaaaatactagataagtgaaaaactaggttgctcttacatgtaataaccataattaaaaagtatgggttctcataaacaggtaatttcatcgtacccacgataattgaatacaccgtttggaaaaggggggaaaattggcttcaccaattaatactacgtaattaaaaagacgggttaaaatttagcttgccattgtttaccattctcaatggggaagggaaaaagaacacaacagaaaatcccacaagcgaaaagggcaagacattagttctgtcaaatcataagagatttttttcaagacttcacatatctagagtctacacccatctttccttcaatttctcagaaaacaaaggataaaagaaattcaacaacatctgatcaatctcgatcacttcatttactagatcattaaacgacaaaattatacttaaataaatttcccattaaaactaaaaagaaaaaggaaagtaaatcatagacatgggaaaatgcaattattacaaaacattaatagtaatgaacaatacgtacaggaactgaaccgagcaaatggctggtagggagatttttgagagactcgtccattgaaagagagaaattgaggagagagcagtgtgaaggtcagactcagatagacatggcggtgattgaaaatggtgagaggtatcaattcgaggtttttgacatgcagagtgggagtgagagtgaatctgaattctgggataaaccctagaaattgtttttcgtggtttagaagtaacacaagaccatttgatagagaggagagagttaccaccggtatcaatgacaccgtcaacaaaaaaatgaaaaagaaaaaggaaaagtaggaaagacgtgatttttctatcttatttatttcttttaggctatttaatttaagatatttaccctaaactattataactatgttctttatctttgtccaaacaaatttcactatggaaatttaccatttttgtaaacttttaaaatttttaaaaattatttagcaagaaaaaaaaatattaataaatatatcataggatttattataataataaataaatatcggatatttttacttgattttgtggttaaaatctatatactccacataacaatatctttctttttttctcttaaattggtcatcccttttaccttgaattttgtccccatttataggtatttgagtaattaaaataacaaacaagagatttttacgtggtttatgcgttaactattcttagtccacgagtctattttattaggctcgttggccagtaactgtttacacaaatacagctacaacggacttttactcctttctgtcgtgtttctcttgaagcaaagaaagcttagtaggaataatctggagttaataatagggttacagaaatgtgtttcttaatgaagagtaagtcttcaatcacaaggtgaaggtccgaagaagagaatcagaatccccaaaaaaagtcccccccccctccttgtgttgtctctagagtatttataggccaatttcctcgcgtgggccatcttggatggatcttcttaaggacgaattctcaccgttggattggtaggtggcatatttcccatgtggcttttatgggtatcagatcgtaccgactgtactggctgggcttcggacgcgtatcacctcaaggtcatccttatttggatttctttcacagaggccttcctcgtgaggttagtgccttcatcctctcaggacgctaagtgaggcacacgggcagcctaatgactcatcgaccttccttaattaatatccatgtattatgcttgcaaaaatacggataacaataggtgtataggatgacaattcatgaaacatggacattctccacgtttcattttatgcatatggaataatatttaataactacccaaccgctcttttgtcattatccttaaatggttatgctaactatgctggttgtttctcgctgagtatgagttgtccttctttaccatctttgtaggaaaagtgttaagtataaatataagggataattacataagccactattttt

SEQ ID NO: 112173 - DNA, 2627 bp, Cannabis sativa
ttgactaaaaaattatttcgggtgctaaaataaataagggtgcatcaatatatccattttacgggggtgcattgtagaatttttctataatattctatttccttttttcagtaaccagtttctccatatcttatgagtataggatagtaatttttttttatatattttatttgcattatttctcaatttgtttatgtttaagttattttttagtaactgatttttgtgtttcaggtatcagttattatgaaattggtttctctgagagagatttttaattgattgtttattgtaatttgtttttgtgattttttattttataattgattggtttttgtattttaatttactgagtttgttttgttagatacttggtttttgtgtttaactgttgattttaatttttttttagtaagttaggttttaagttttagtttttgatttttttcattttgagaaatttgtttttgtgtgttagtttctattttgattcatttatgaaattagttttttttgtcagatttttaactagttaataaacgtaattggtttcttagtgtaagattacaacgtctaactctgacgacgactccaatatctaatttctataaatcttttaagtttatttatggtattttattggccctattagcttaataaacccttctttaatttggatctcttcccaatgttacaaaataattgagggggagtgatccatatcatatggccatacatatataatataagtaatgatatgtgcacacacaataaatatttatatgacaagtaagtttaactaattacttttatttataagatgggttatacttatcaaaaattacttgccacatacgtgtgtatcatattgtttgtgaattatgtgtataccaatcattattgataaaatataataaaactttgctattgaacactaattatagtgttctactattggttaacaatgatcctaaaaaattattaaattaagcaatataaaattcaatatttaattacattaatagcgatatgacaccaaaaaatatactaaacacaactaatactctctaacatttctcaatattatacataaaactatatatgtaccttaattttcttccatttttcacattaaatattctaccacgtgattttaagttgaaagtcatgtgactcatgtcaatatatctacagtactctcccatatgattaatctccctaaccttttttaattcttaacatagaatttgggaccgctgcccctaaatttcgatatatattacgtataacaatcattattgaaacaaatatacaaattaagaattaacagtacatataagaaagctcacaatatataatacgaaaatataagcccatttaatttctttaagaggggatcacatgaaagatcttgcggctgttttcttcttgtgtgctgatactcatcctcacaatatatatataatatatagagacgattttgtctcgtgatgtacttttacggaatgtattttgtggtacattagatgagtctcgggatacattaaatgagtgtcagggtacgtttttactttttaactttaattactcttagattaatctcagtcgtcagatcaaataactccttcatctgacgactaccgtacatcacgaattacaatccgtgaaagtacaaaataatatcccataatatatatatatatacgtacgtcttttcaaacagttgtcaatataaattcatttcaaattgtttgtataaggaaaagatatgcttcaaaaatgttgttccaaaactggtctgctggtcgacctatatatatagctattattataacttatatatattagttactatcacaaaccacaaaacaacaaaatttatttggtgtcctcttctataattacaatacagacaatatatatactatttgaatactcttatatatatccctcttatatataaaattacaaaattattagttttcctatacctatattatcgtttaattaaatcaagaaatattatatatgagaataaacatgtgatacttctttttattaaaatttattaattatttcaatttttaattaaataaataagcaccatatccatatatgtgttttctttataacataatttgaagaattagaaaaaaaatattccaatcaaatcatggtaatttataacaaatagtatatattgacgggcaaaataataataattacaattacattgtacaataattaataagatgattttgattttgaattaattatacaataaattatttatttatatatagacaaaatacaataatgaaccaccattataaaattgttgaacgatataaaaataagtggctgtcatgccctcacaaaaatcatttaaagtattaattgtattgaaaatagaaaccataatttattatgcaacctattaattaaattttaaatgggtggtagatgaaaattttagctgaataacattacgttagctgaattaatattgaaaaataaccataattgtaagggtaagttgaaaaatgtcttttttattaatcatttaatcaaatttaactctaattttatatttatttgaaatatacttctttttatatgtattgtac

SEQ ID NO: 112174 - DNA, 2849 bp, Cannabis sativa
  modified_base (697)..(698): a, c, t, g, unknown or other
actgttgttttataaaaatacaatatttttgaagaaaaaaaattatgtgacagtatttctgtaaaagttaactaaaattttaatatttttataagttttcctaaagcaaattattaaaaatatttcagtttttataaatatttttagtagtatacaatacataataatatacataacatagataaatatcttaaattctttagtgggataccttattgtatcacatctttttaatatctttataaacattaatgtagtgggaccatttttgctcacaatgatactaattaattatccattaatcaattacaccccaaataaatccctaaaatctatatataggttaatgtagacgctttttctgatttatataaatcaatatatttatttagaatcaatgctttaatatttgataccgacatgacaaaattatatcttctcacctaaataaaaattgaatttttgcacttcaaaatgtcaaaattcattttaaagatttccatgaaaagaagattttgcttgggcatcaacaaggactgcattcaaagcttccatttatagcattataacacatagtcttaattaaaagtgtatttatatatataaatagagaaaagctaaaggacactattattgcttagcacattcctatgtgtcaatatcactattggtacaactaagtatcgggtcccatatnntttaatataatagtttttatggagtatcgctaacaaatcgcaacgcgacatgttgagaaagtgctagacaccactagtgcctaatagcaatgctcatataaatatatatagatattaaaaatgttttaatgattatatcaaatatataattatgatagttacatttactattagtcattagttcattattagacgattgcgattaatttaaaaaattattaaaaataattaataaattacttataacttaaatttatttattttctttaaataaaaaaattataaatgttaatttttgaaaagattttattaaatattttaattttaattaaaaaataatttattttaagtatataattaacattagtttaaaaatagaaattttacttgtgatttgttaaagtaagtcattaaaaaatataatatcatgattataattttactacaaccattaaataatatacaaaatatgtatcaaaatattatattattacttttataaaaaaaaattatatctcgtggtggctatataatattatcacgtgataatcttttaaatgcacatattacttaagtcttatttcatcttctcttctttttcatatatttattctatattctccattatgtttttgtaatacaatgtatcactctttttatcaagatagaccacactataaaatttgagttttaagtttgtcttgtttaaaaacatgtcctttatctttaatgtatttagaataaagtttttatataattaggtttagaataattgataatagtgtgattaatttgatctgatcactaatgaaatagttgttcatactctaaactttgacatgcattaagagaaaattcatgaagtgttaaaaaatcaagtcccaaattttgacacaattattagaaatttcacattttttatatctcatattaacactactaatgaaaaaaaaattaattagcaaatttttcagtacatacatccaatgccaagaaattatagtccataatttggaaaaaaagttttgattaacatattggactaatgttactagtttattttctacaataaatttaacattttaatacaaaattcaaacataaatacaaagtactttttttaaaaataaatcccaaatgaaactttgcttctttggagaaaaacctctaagaaaaaaaaaagacacaaaaattgtagtcattcacctttaaattttactaataattgtttttcttttttgaaaagatacatttatttataaaatactagacctcacagttgttataccaaatattcataggaatactagcaacatcaagacgtttataatagttgaaataaaaattcatctaattatattatgaactataaaattacaagttactaatatttgtcgataaagcataagtgtaaagttcaataagtacttagattgcaatttagagtaatatattaaaaattgttacatataaaatccaagttttcattcgtgtactttcatttattttatggccgaccatatcatataaaccaaaaaaaaaaaaaaaaaaacaaactcaaatcaaaagtttggatgacatatttctttttgactttaaaaatgaaaaagtaaaaaacaaaaataataaaatagtaagtattattattggccattttgtcacgagtgacgtccaagaccattatttattttgattcgagtttttgtcgttagaagtaatacgacaacttacaattcttcttcttcttattattattgttattattatttaccaattaataaaataaatgtcttatatgatcccaccaccaaaatctccacaccccatcctattttggacctttatgctatatcattttgtttttatttacattttctttttaattcaagcctctactaaaaataaataataattgaagaaagacaacaaaaaaaaaaaaaaaaatcaataattggatgtgatatttctacgaaataaataaaaagataactttttgtttactaattactatatattaattaatcttttattattgataaaagtacctctaatttgttcaaatataaatgggtaaatggcggcaaaacccctaatattttcgttttagtttcactaaacccctacaacctaaatttctgcgggtaaaccccc

SEQ ID NO: 112175 - DNA, 2506 bp, Cannabis sativa
  modified_base (829)..(840): a, c, t, g, unknown or other
  modified_base (945)..(949): a, c, t, g, unknown or other
tttggggttaaatttaacagaatattcttttatttgtaaagcatattctgttaaaccaagaattgccgttacataggcacttttaatatataaagatatgaggaggttgatatatatattgaaacccatatatgttatatgtatagtgatgattaatacgtcgtgaattgtattatattaatattatttagtataatagtatgtttgatattaatttgtattgataagttgtgtaaagttataatatatttttcataaactcgaccccaacgctaactccgggtctgagtccagtcttagtttggggtccaggttctgagtcttaggtttggagtccaggtcttaggttcagagttcaaggtttggggtctgggtcctgggtcccgaattgggtccgtggtccgtgatcccaggtcccaagtttggtctaggttcgcatctaggtccgaatcaagttcgggtccaggggtccgggtctcgggttgggtccgggtctgggtccgtggtcccaggtctagtctaggtccgcgtttgtattcatatcaagtttgggtctaggggtctgggtctggggttcaattttgggccaggtctgggttctaggatctaggtccagtcaggtcccgggtccctagatttgggccgaagattggagttgaccccgaatcttttataaatattatagtacaagttaatactgaccatttgttatgtattataatacaacttacattgtactaaattttttggtcgtaataataaatacaatacattgttttatctaaacatagtgttatttatcatttaatcactacaaaaaatcttactnnnnnnnnnnnnaaaatttgtgactaaaagtaaatatattgtgactaatcataaattattattcctatgttgtgactaaatgtattttttaattataatacttgttgtgactaaaannnnnttagtaacaacttgtaactaaatactctattttagtcacaagtaacattttattgtgactaaaagttacatttagtcacaaaaaaaattatgttgtaactaaaaagttatcactaaaagtagtaatttttgtagtgataatacaatacgacatttatatgacctatcaaacgagtcttatatggtttaatatattcaaagtaacataaaagtaggagttacaatctggtaacaaatttgtaattgtttgactacaataattttaagtgtctaattaagtgtgatattatacacaaatcagtatgagaaatcaaatccattaaaaaaaatatatatgagaagttaaatttatcattatatatatagctgttagcaagggttgctacacgtcattaagttgagtaggaaagcattgggaattaagtaggttcgaagaaaaattacaaaactccaaaattgtgttgaaaggattttttcaaaaaatgttttcgcacttaatgacctctaaatttatgtcatgttaacaattatagtgatgtgagtgttggagttgaaattatggttacttaaaatactataaatggagacctatatgagttcatttttgtatcatttaattagttttctattaagagaacacattcttaaaaatattttaggctgataaatctataaaattatttccacttcttctcttctctgagtacttgtggtaggggaaccttatttaagttcggtaattttcctagtttagtgctctcacatcactttatattttataccattcacattgagataatttatttgtttataaagttttgagttgtgttttcttcttctcttcttcttcattttttatgtattttgcaatagaattgtaatattatttaatctttattactgctcttgtaatgttgaacatatatagagttgtaactatatctcaattttaatttccaacatcttccgtacgtagcctgtcactcctactaaagtgttgctctttgcctattgctataaatttttacttcaaccttttatttaaattctcattttcaaatatcattttattcacattataagtgggatgtagtcatggccatacttattggccattgttcttgataattgtttgcaaagaatatgtaagagagtcccaataaaggtataaactactcttaattgctaattagttttttgatgaaatttttaccaaagatataagacttgatatataagacaataaaactctcctaattaatttgaaattatttgtctccattgagaattttgagataattttattaaatccaatttcaaccctactgctaacttattttcttctaattaactcatttatccttctttatgttttctttatatactttttaacacaaagccagccacactactgttcatacaatcacaatgctaagacaatgataactgagtggtaggatccgattttaatagtgatttaaaatcaatattgtggatgaactatgtatatatttatatactatgtgattgttacgtgccaagccacgtagtgttagtt

SEQ ID NO: 112176 - DNA, 2821 bp, Cannabis sativa
  modified_base (31)..(47): a, c, t, g, unknown or other
tagaatacatattaggatgttaatgaaacannnnnnnnnnnnnnnnnagatcctggtaaaatatatttccaacactaccatggtgtgtcattggtgacttgaacaatgtgacaagtcaagatgataagaaaggtggtaatgcctatcccgaatggctcattacaggctttaatcgtgcactttctgactgccacctctatgattttgaactcactggttatccgtatacatgggagaaaggtagaggcaccaataagtagatagaagttcttctagacagagcccttgctaatcaaagataggatggatttatttacttcagcaaagctttttaatcttgaatggtctagctccgatcactgccctcttttgcttgttccttgtaatgatgattttatcacagctaggaagaacttcagattcgagaacgcatggttaagagaacctctctgcactcaaatcgtgagagatgcctaggatttttgtcatggaagcagtatcacaaataaaatatctcattgcagtacaactttagccgattggggtaaagactacactgggaatttcaaagatagaatttgtaatctcaaagatgaagttcaaaaatggagaaaagggagggatgctgattcaattgaaagatttaaagaagctgaaaaacagttatttgaagtctatactcaaagagaggtattctggaggcaacggttgaagcaactgtggcctagagaaggggatcataacagtaaatacattcatgcctatgccacatcgagaaaaaagcacaactctgtgtccaagctcagagatactcacggtaattggattgactagaacaatggtttatctgatcttattgtcaattcttatagtgatcttttttgtacttcgaatacacatactacccttgtcactgctaatattctcaccacggttactgaggctcaaaatgattctctacttgctccggtatcaaatgaagaggtccgtaaagcccttttccaaatgcatcctgataagtctccaggccctgatggtatgaccagcgttgttggaacattgtaagatcggacatgatcaatctggtaaggagcttcatgagaacaagagatcttccacaaggtctaaatgatactaacatggttcttatcccgaaattcaggaatccatcttcaatgactgttcttaggccaatctctctctcatgtgttatacaagattatctctaaagtgcttgccaatcgtcttaaagaagtcttgccacaactgatatcaacaaaccaaagtgcttttgttcctggaaggttgattactgataatattatgatttcttatgaggtgatacattatttaaagagaaagagtcgtggtaaagaaggttttatggcacttagtcttgactttagtaaagtctactatcgtgtggagtggcaatttctaagggatatgatgtgcaaaatgggttttagtcaacattggatacatctgattttgagttgtgtctcttctgtccgctataaagttctgaatagtggaagagaaatgggacctataattccaacaagaggtattcgccaaggtgatccactttctttttacctatttctaatttgtgatgagggtttctcagctttgatcaagcattttgaaagtattggacacctcagaggttgtaaggttgctaatggtgctcccattatctcacatatgttgttcgtagaccatagttacttatattgccgagctaatgagagagaagcctctaatgtgatccaattgttgaagatctttgaagaagctgcaggacagattgtgaactttaataaatcctcaatattttacagcagcaacactactcatgatactagagatcacatctgtcagctgatgcaaatacaagaagctgatggaacaagtttgtatttggagcttccatccttagtgaggagaaacaagaaggcaatcttgggatttataaaagacaagctgcagaagagagtacaacactgggaaggtcggtttctctctaaagtagggaaagaaactctcctcaaaacagttgctcaagcttttccaagctatgcaatgtcggtctttcttgcctttggaaacgtgtcgaagccttgaaggaataataagttctttttggtggaaatcctcaaaagacaaacatggtgttagttggcatagctggaagaacttatgcaaacacaaaacagttggaggcttgggttttagagactttagggagtacaacttatctttgctgggaaagcaagcttggagattgttaactgaggaagattctttggtttgcaaagtctacaaagcaaggtatttctctactggctctttcctatctgcatctcttggtcataatccttcgtttatttggaagagcatctatgaaaccaaagatctaattgttgttggtgcaagaattcgaattggtaatggcttaactacctatattaccaacaacccttggctccctggcatgcatcaacgatataccacttcttcacatcctgccttagctgaaaactgggttgcaagtctgctgcaagtggatcggtcgaattgtgatgctgatgtcgttaatgacttattcaatgacaggcagtgacgaagccagaaatttgacttagtgagggcttaaataaatattaagtcaaaatcttttaaattttcatcttcaacaaaataaattaaaatattgtcaatagtaattttttttaataaagtgttattttttttattatttgtattgggctacttttaaaatgggcttgattagaatgagggtaggtttatgaattat

SEQ ID NO: 112177 - DNA, 3391 bp, Cannabis sativa
attgatttaaaaaattatttatttattataaaaaaattatttagatataaaaataatatatataataaaattttaatttttgtaaaatctaaattttataagaacaaccgaacaagcttgagtttatttttttaaaaataatttattattttaattatttttctttattttttaagataaggatttataaatataaataaatttcttttgatttaattaaataaaatattataaattttaaaattaatttttttcaataaaagagaataaaattttgtattaatatttaaaattaaaaatattaattcttaaccgaaagatactttaacagaaaagtgaaaagtttaacagaaacatactaattattaaaaaatatatgtatattaattcttaaacagaaaagtgaaaagtttaaggactgctaattatttttttaaaaaaaatctaggtaaaacccagtcatattcactctcaccttataaccactattgctaatcccatgaaatagaaaactacttatataaggtaagcatgaccaaaatcaatttctcaattctatttctttgtttttctctttatacactgtagaacctcgaaaattgagcaatcgaagcaaattacttgtttaccattttcattaattcctattgctcttttcagtgatggctttatatggtgaggctgaaatgacattatcatcaattggtgaggacagaatttcgatgctacccgatgcactcatcactcacatcctatcgtttcttcccacagacgatgctgttcggacgtgccttatttcaaatcgttggaaactcatatggcattcaatacccacactctctttctctgatattgattacgtatcaccacagaacctctacaaattcgtgaatgattatttgaaacacagaaagagaggtatgtattataacatcccttcagtcataacaagttttaagcttgacatgaaatattgctatcaaacaaccaagtctgtgttcctagataaatggttagactttgcagttaagaataaagtcaaggagatacatgtttgcttgaactcttattctgagggtgaaaacaattactggttaactgaaacagttttcaatgcaaaatatttgactgttttggagttggaaaggttagatttgaatgctgcctattcaattagccttcctgcgttgaaaactttgtcattgaaattttgtttctttcatggtgatgggttatcaaagattttgattggctgcccttcgcttgagaaattgcagatacttacttgtgttagtatcaagtctattgataagctccgtttagaaagttcaaccctcaagttcctaaaaattgaaaatttctttaatgcatcttttgatattgtacctgttcaagttgaagccacaaatcttgagtctttggatataagaggattttttaacattcaaaactcatattcttctgtatgcaaggcaattaggaacctcacactaactttttatgatgatgattgcattgaagacacatcctcattaaattatattatttccaaccttccggttcttgagaatttgactttgaatgattgctatagactgaaattgaagcaccgcttgctcataaaaatctctaatcaacaattgaagagtttcaatttgaagaatgagggttctaaatatgagtcatacaatcatggaatgagtattattattgaatcagctccaaaattggaatcattttattacgaaggtaatatcaactttagcatagcaacggagtcatctaatttattgaatggaaaatttgtgatttttgatccacacgagaactatgactcaaattggtttaatagtatgatgatttttcttctaaatctcaattgctcttggaatactgtgacgctgcatgtgcactcagataaggtatgtttgtttacttagtcttctctattacattacttctcttgttttattgtgtgtctttatttcaagttcttatatgagttgatataacataaattaatgtgtttatttgttttcttaaatttaaatacacatgaaggatctcatcttgtcagaagatctcaaaagattatatcgttctcctttgcttaattggaagcatctcaaaattattactgatgataagccaaaaaaagagtcagacctgaaagatgctttgatgtggatctcaccctccttagaaacattatctattaatgaaaatgtcatactttagttgtaactgatgactatgagcatgaataattcatcttttatttgttttgtctgctaatgttgctacttttgtccttttgagattatatttaaccaacttggtatgaatgagtttgttcacttagcaaaagaatgtgatattttaccttttcttgcattattaaaattatggttatatctttctatcttctctcaatttttacaaatttacaaattttactgaattcatgattttgtgttttgtttactagttgttttatttttatttaataaattatatgtttctattctatctatattcattttgatttaagaagaatatggacagatggaaccatgttcgaattttactgtgactgaaaagtgaagtaagttgcaagactgtaatttagtaggaacatcattttcactgaaaactcgatctggaaaagaatatgacgctctaacaaagttgttcgcagttatattagtagatcatttaatgaaaaacaaagaaatattgtttaaaatagatagaagttgttgacagtccatcaccactcccttaaaaagtaaaactgtgatgttactttgaatagtttaatcatataagtacttttgctaaaaaaaaaaattagagttctcaaagttgcaagattctagtacatatttaacatttctaataaaaattaaagtgaagactgggaatagatgacttctataatatattccactattatgttaaaactatcttaaaatattctcatattatttgatcctaatgtaattgtttttagtcttttatctttttttttttttttaatgtaactgtttctcatgttaaacttacaaccaacatgactgctcacaatttggttaagtttatattagagatggatgagattgtttttagttagagaataccccttcacacctctctagctactctgttatttgaaatgatctcttcttaatttataataacatgtttttttactaaaaattcagcttcttttttctttctaacaaaatagcagttatcaaaatacctttcctcttacaaagcagggaagataagaattatttaatgttaacctaacacgtatgaaaaaccgtgtttttgtaaatgtcagttgtatataagaaaatataaaaactgtaagcgtttgcagcag

SEQ ID NO: 112178 - DNA, 3657 bp, Cannabis sativa
tttgatttgatctcaggatcccccacacatgcaccctcccataccccctataaaaagtacttgatgaattaattatattttattttatttgtttagatccggattgcgagagcaggccttctgtgtccgaaaaatatacattccaagagatgaaaaaaattgatcaattaaagaacccgtcatcagaatcagaatgaattatatatcgtttgctaatgaaattatggaattatctaaaactttagtggcacctactactgaggatgagtactataaaagcttcgaagaagtacaaaagttgtttaaggataaaggaaacttccatgaaaatgtacctagtataattgcctcaggtacgtacatccacgtaataagtaaaaaactactggtaatttaattaatttgaattttcaatattttataatattgttgtgtaggtgatctaaaagcatggatggatgacgaagaatttgaaagagaaatgattgctggcgtgcaccctgtccacattcgtcgtatcatggtacgtaataatattacccttttttttttaattattttcggttgagtattgttgttaagtatcagtagatgtctaacataatattatatatgttatgagtaattagcagttttctattttatttagtatttctattttcattttcatttggtattaataattttgacttcagaactactccgaattcccgccaaaagctaaaggattatggtgatcaagatagcaaaactacgatggcccatattgaaaaaatcttaaaaaagctaaagaatgatgatggttttactgttaaacaggtattggtatcttttaatattttattaaattaattattatataatttaattcaatttcatactataattatatatataggcaatcaaggaaaagagactatttatattggatcaccacgatacatttatgccatatttgaacgatataaatgacaaaaaaacttgtacaaggggctatgcaagccgaactatcctattgtttacaaaaaatgaggatgattatcccaaattgatgcccgttgccaaaggatggtcctaagtccaatggtgcagtgcagatagcacagtatatacccctccagacgaagacaaagaagacaattataaatatgttacttggcaacttgcgaaaggttatgttgctgtaaatgattcagcctaccatcaactctacatttattgctaaagattctataactttaatatgttgctgactgttttattcatgtttaaataattttaattccctatacaatacaagttacatcttcatatatgaatagttttttttttttttcgatatttatattattaaaacaagtacttataataatcaatcattacgtaagcctacaggttgaatacacatgccgtgattgatttgtgatagcaacaaacagacagctaagtgtactccacccaatccacaaactactgcagccacactatcgtggtactatgagcataaatgcatatgctagaaatgtgctagtgaatgccggtggagggataaagcaactattttttccaagaaagtatgctatggaatcatcctcaaatgtgtataagaataattgggcatttgacaagcaaggactccccgctgatctcattaacatgcaagtttttctatatgagacatgcattgtttattcctctcattgttaattagttttgataaagattttattaattacttcaatgaaataaatcaacataaaccacaactcacatattaagtatatataacttgaatatgttataaaaatacatttgttcaaaagtttatttccctcgctcatcctatattattatatcatatttaattttgaaatagaacgtcatatatcttactatacactcacactattcggttaatcaatatatcatgcatgcatgttagtttttttgttttaactaacatatatatatatatatatatatataggggattaggagatggtcaaggttgtgagctagcacaacactatccttatgctttagatggattactcatctgggaggcaattcatacatgggttaaagattactgtaataactactacaatgacaacaagatggtgcaaaaagacaaagaacttcagcaatggtgaaaagaaatcaaagaagttggtcatggtgacaagaaagaatatgaggggtggccagaaatgaaaacttttgatgaactcgttgaatcatgcaccacaatcattaggatttcttctgctctccacgcagctgttaactttggacaatatcctttctcggcgttctatcctaatcgccccacgttaagccgacagtattactcgtgacaaggaagagagtatctatctctccacatttacttcaataaaccaaagcaattatatgattgagtttattaagaagttaccgtaccacgagtcgggtgaggtttatcttggtatgaatgaaaatgattgggagttcgatgaaaatattaagaaggctttccatacttttaatatcaaacttggtgacattcaaggtataattgaggggaataaaaatgctgatgagagaactcgaagtggcctaattcattttccctatactttgctaattcgtaccagtagagaagggatcaagggaatcccaaatagcatctcaatctaaaaatatcatctaactaattgtgttgttcttcttcataaatatttaatatttattagtctaattatcattttgtttttgtatttgtttttgtgtgtgtatttttttttctcttgtatcagtataacaattaataaggctttcggatttttgcagccttgtatgatgcttaataatgtatgaaccatagtgcaacacaaattaataaagtactctttttgtttgtttttttcaaagaattttttaaatgtttaacattttttcttcttagtccaattaatgcgaagatgtaaatattaattgtgctaaattatgccgactaggagtactcaacagattaaaagaatgaaaatattcaaaagtaagtcaaaacttagaagtttgaaattttaggtttagggctaaatttcacgaagctttgaataggcaaggtgaaagacagacaatgtgcgatcaaaggccaacatcatgaaccgcaaagtttttacagattattacaaagaaaatcgtgaagttttaaacctagattttctacctatcttatgaagcaaagtcaagaacgcatgtatgaaacccagaatctaaacatgcaaagtaaaagaggaagagattgaaaacttaattattgttcgacatctgagttcagtccaaacgaagctgcttggatgcttttggtagaaatctcacgacagacttgaagtgaaaacattttttgctctgagtttgcttaatggagaaattggtaaaagtaaatttgtgaatgatgctcagccctatttacaagcagaatagtgaaaaaaggggtaatcatttcaaatgccttagacgcatcggttccccccaaaagcaaatattggaaatcaaatataatcaagtgtaactgtcaaacgtgatgagagaaagccgggttttgaggcattaattgagtcagagcattaattagccgaaaactgaagggacgcctggtcagcttcacatcga

SEQ ID NO: 112179 - DNA, 1587 bp, Cannabis sativa
tcttgtccagtccagtccaatccttttcagtccaatccagtccaatcctgcgtaccaaacgggcccatatagtatttatttagtattattacaagaaccggtgggtactcaatacattttataaataatttaatttaattacactaatattagcataaacaatatattttaacaattcactttttttaattattaaaattttatagtggagttaaaaaatagtagtggtaggtaacaatatacaatagtgactaaatagatttagctaaaaagtaagctacaacattatcattataagaaactgttcaaaccattataactcatccaagtattgacaatatcaataaagacaactaaacaaatagtgtaaaaccttctctaactatactttttaaatataattttttaactaaaatagaaaatagaactatctaattataaaataaaaaaaaattaattttatataataaaaaatagataagaaattctttaccttttactaaatatttttaatagtattttaattaaaattactactatttttttgttatttaataaaattaaattttatttaaataaatttaaattataaaattttattaaaataatcaaatactaataattaaagtatgaatataattggagcaataaaaataaaaataaaaatgaaaaatagcaaataccattacatatgctctaataatcaaaatgattatagttattagaaaaattttcatgcgccaccttaattttcatataatatacaaatatttaacgtgagtcttcttaattaaaaataatatcttatgttttaacgtttacataaatattgatgatgttttctttaaattaagagagagatcatttcattctacttattacttcaattattcacacactatttgtatttttattttttttattttgtttttccttttattaattataatgaatatataattatattttatcttgagatgttttttttttccaaactttatataaaatatttttttggcaacattacttgttatttgatctcaaaaatactatcatcatgatcaattagttaatgtagtcattttgaaatgtaggaatgatatattttttcaatattactaaattaaaacaaccatttggtttattatgatttcagtatcatatactaactaattacctttaatttacaaaatcacatattttacttgataatttaaatttaatttttgaatttagttgattgatttataaacacataaaagtaataaaaaaagttataaaataattagtaaataaaaatagtagcttactatacatacctatgccactaaatactttttctaatcacacaatttcgttcatgatttccaatctcaatcaatcatgattcactttctaaagccaatttagccaaatcatgtgagcatgacttttatataggttactagttttacagtcatccctggaaaacgacaggcaattattaaagaggaaattacattctataccctttttatattgtcctcttttatttttaccatcttttttaaagtctatcatttttacctctttttttacacattgtac

SEQ ID NO: 112180 - DNA, 4779 bp, Cannabis sativa
tatcacatcagtgtaaatccaaggtagggtctaaactagagagagaaacctcttcttgtaatctttgagaagtttgtaaagattcttgtaaccttgtaaacactgatattaataaagatatggctgttactgttccaacagagatgtatatcattgcacatggctcgaactcgttaaagctagtgttattcttttctgttttactgcttaattcattatcttaaattcttgaaatctcttggtatttagttttttgatcaggttgcgtctttgttggtaatgtaaattatatcgtaagtgattaattattttgtttcgcacaacaagctagtatcagaatttggtttgtaatcatagttgttgccgaatacgatgtcaaaaagtttactagtgcgaatgctttttgattatggagaatgaagatgaaggcattgttgtttcatcaagggttgtatgaggctctgttaggagaaaagtctctctacctgattcgatatctgaaaaagacaagaaagagactcttacaaaggctcatagtgcgatcattttgaatcttggagataaggttctgacaaaggttgcaaaaaaagatacaaccacaggtgtgcggtctaaacttgaaagtctgcatatgaataaatcattggtgaatagattatatctgaaacaggccatgtattcattcaagatgatagaagataaatctgttgaagaatagattgatgagtttaacaagttgattctcgatcttgaaaacattggtgtcaccattgaagacgaagatcaaaccttgttgttgctcagttctttaccaaagtcctttgcacactttaaagatacaatattgtatggaagagaatcgatcacactcgatgatgtgcaactagccttgaattcgaaagagctgaatcagaggagtgagtcaaaaatttttggaagtggtgatggattgtatacagggggcaaaagtgagaaaagagaaagtcacaaaagttcaaaagtaaaatcaagatttaaatcaaagtttgataaccagaagaatcttaaatgctaaatctgtaagaaaataggacatctcagacgggcgtgtccgcagaagtataagacgggtgattcaagatctgaaggagatgcaacagtaggtagtgacagttatgacttagctagtgctttgttggtaacctctgagatttcagattctgaatggaatttggattctgggtgttcattccataaaacaccgaataaatcttgattccaagaatttacatgtggtacttatgggattgtgtaaatgaagccaaaataatgaagcactaattattggattaaaattggcgtgagaagtaaatgttaaatacttagaaatttacagtgactcccagttggtcgtaaatcatattttaggtgagtagatggctcggggagaaaaaataatagcatacctaagtagaatacaagacctcctcgcaaaattcaaagggtacaccctcaggcagattctgagagaggaaaatacaattgtagatgctcttgcacggttggcaagcaatacaatgacagataagtcaaacctagtaccaatccagttcttgaagaacatgagcattacctgcataacagaaatcgagattctacataatacgctgaactggatgaccccaattgcaaccttccttaacacaggtgagctaccaagtgacaaaaataaaactcaaaaaatgcaaaggaaagtagtgcgatatctaattatggatgaagtgatgtacaggagaggcttctctgtgcttttgctaaggtgtgttactaaagaagaggatgcgcgactgtcaactaaagttcatgaagggttttgtgataatcattctaggggcaacaatcacttcaaagaaagtgctagattttgtagtaaaacatataatattctggttcagacttcctcataaaattgtttcagacagtgggaagcaagttgatagccaactgtttacagacttctacatagagcaaggaatcatcaaaagctttttggtagttgcacgccctcaagataatggccaggttgaagcagttaataaaactctcaaggacaccttgaaaaaaaggcacaaaaaagctaagggtaattggcctgaagtactttggtcgtaccgaataatagaaagggctgccactagataaatcctattttccatggcatacgactatgaagcaatgttgcccgtggaattagatcctctatcccacagaaggatgacatacgatcatgaaataaaccatgctcttttgacagaatcacttgatgaaattgaagaatgaaatgacctggcaaacctaaagttaaatgctaataagaaaaaagtagctcgacacttcaacaagcaagtgagagagagaaagttcttcgtaggagatatgatgctcaaacgagtatctttaaactccaaagatagtgcaacagacatactcaagcctaattgggaaagcccgtatcagtaactgaagttacaaaattaggagcatataagcttggtcggtataatgaaaatatggagctgattttggtaccaaggtactagaacggtgaatttttaagaagatactaccaatgaaacatcactcctaagtaagttgattagtctatgattaatcgctaaagtaagttaattttgtttataatcagtcttgtggtgatgttgtgctttttgaagctcccttgttgttctttgtattgtgcacaaaatctttgaatatgtcatgaccttccacaaaagtaacactttctagaatcttttcctcgagattatatctcgaaattgaatgtgaatgactccttgagtggttctttgttggtgtttatcctctggcaaagtatgattcctctttcttagtttctttctccaattgcaattcaaagtccttagacttcaaagctctaagaatatctcttagagatataacatctctgttatatttaatggtagccttcacaattaggagtgatctaagaaagataatatcttgactcttctcatcaactttgtgattaatgttggcaagacctagaatgattttattaaacttatcaatgttatcatctaaagataaagaagaaatcattctaaaaccaaataattgctaaagtaagttgatcttgctagagatagaaggtttcaaatatagctcttcaagcttttcccatattccttttgttgtaacaatgttggtcaatttcttccttacgttgttggaaagatgcattatgatggtgtagtatgccatctcctctatttcaacaacttcttcatctttcttctctgatagtaacttggcatctccaagtactttagcaattttttggtgaaccagaattccctttaagctctctctccataaggcaaagtaccatatttcattgaatttctctaatttgaacttggccattgttgacacgaattcttgaatctctttatttaatcaatcttgccacgaatgaatcaaaaccttgagtaatctattcgtagagcgatgaacctagctttgctttgtaggattttcaactttgattagttggaattataaacatgaaacttaaaatgtaatgattagtgaactcaaaataaagcacaattcaaaatatcaacaatggcaaacaatcaaacatacaatggatataaaagaactataaagatcaatctataaaacatagaaacattggttcagatcctaagtttgatgtaaacttggtcctacttcaacttggaactcgatctcacatttctttattgatcaacaacaaattgagtacgtcacagttgagtatggattctcaatcttgagtcctcacaagtgtttcattctcacactctctcaccctagcatacacattcagacgtttgtgtatctcattacaaaatcctttccctttggaatcccaactctttcatagctaatcttcttgcacactttctagatttgtgcttctgtcgagttctgaaaagtgttttgaataataaagaagagttaccttatataggcagctaagcaagtatgtaactgattcaagaaaagttagttagagcgttcttgcataataacatgggtaattttcatttatatacaagtaaatacaaaaaatgtgtaaaaaaaataataacataatactactatataattttatgaatatttataaataaacatatatgtttacaattttaacttgttgattaattactttcaattgattttctaaaaaaaggcataaagctaaatatataattataaaaattaatatttatattttgatatattactaaaataatatgtttattaaaatttagtatgaaattaaaaaaatatatatacaaacacatttataaattttatttatatttttataaacaatgcatatatatgtttattaaacatttaattagtattattaatcagcggcagaactacatatatttatggagtggccatgccccctaactttttagaaaaagaaaaaagttatacataatatataaattaaattagaataattagattttacttattagaaaaatgtgataattctcttattactaagcctaataataaattgtgaagttaaaattgaaaaagactataaggtgccctttattatttctcattattttatatacgttgtgtaaagctaattaacttcttattaggggtgtgcagaaagtcatccgatccaatcacaaccgaccgatccaatcccaaccgatccaatagaatcggatatccaatcat

SEQ ID NO: 112181 - DNA, 5877 bp, Cannabis sativa
ggggtactgaataactaggtacgagaggttaaaattggaattgaattactccacatttatatccgagtgtctttcatttttctttattttgtttgaattttatcttttttctgggaagtgcattttctaatacaaggaactgtgctttgcatgtcagatttactggcaaacttccttttgtaactatttatgggtgctcccaagcaaaaatggacccaagaagaagaagcagctcttaaagctggagttgtgaagcatggggcgggaaaatggcgcacaatacttaaggatccagaatttagtggtgtcttgtatctccgctcaaacgtagatctcaaggttttgtttttcttatgctgttagcattggagacatttttaatgcttaccaaaattacaatttcatgcttcttaatttgcttccatcaatagcttcctttaacaaaagtcttatatattggtactagaatcttattttaaaccacattgtagggtcttgtaaatacttaattttatattatgtgtatcaccactcatgagcaggataaatggagaaatatgagtgtcatgtctaatggatggggttctagggataaggctagggtagctcttagaaggatccaacatgttcctaagcaagatgaaagcacttttggtagcggtggtgttcaaagtgatgaagaatctgcagaacttatgcctcccgccgcatctagtgatacacagcagatgcagcagagttccggcccaaaaagaactattgtaaggttagacacatttattgagtttggcatttccccatttttatcagacttaggaattctgccctttatggcatgctttcataatctatacactgtatgaggttttcaacaaagtaacattgggtattagttattgctcttgtaacggtttcttctgaccttaagttcattgtggtcgataattattgcgtgtatttgtgcttcttttttcttttaaaatatatggaaagttaattatgaatgttgggtaaattacattatggactgtgcatttattttatccacaaaaaatcttttagtattacaatttagatggggaaaatttgcagtataagttgttaattagtctgaaaggttgctgttaggtcagtaagtagtttttttggtagcaaatatcagtaagttgtatgaaatgctgaacttaagtcattaagtagtttttttggtagtataagtcacagtttacagtaattttgtgcagtaaaagtcaataagtaggctgttaggtacggagggtggctgttactgattagtgactgagttaagtaccaatctaacagacaacatggtgaattttgttccactaatttggtgtaaaatgtggcttttactgctaaaaaactatttagtgatttaagtacaatattttagaatacttagtacttactacttacagacttttgccgcccaaaagagtactcggtgatttgcaacctgtcaaactaatttctgactttcgttgcaaatatcccatttagatattacatataaaaagggaaatgcttatatatatttcaccatttcacgcactaaataacttaacctaacaattataaaatttgaaagttggcaaaataaggtaagattttgccttttaaatagccgtaaatgatataaatgatcacagcttactttgtttctctcatattattatttaattttttttttaatttgtttgcctggtttttttagttgaaatacatggttaattacacaacccatgaataaaatcaagctactggtaacttttacagcagcttattttacatcccgttctccaagttttatgttggtattcatgcttgtaggttggacaatcttatcatggaggctgtggctagcttgatggagcctgggggctctaataagacagctattgctaattatattgaggtaactgttgttataatgcaaatcaaatcgataaataatttagtgaaagcttttagtatttttatagttatctttttttctccatgagatattcaagtacatgattgtttggttttaaaattgctggtttagccaaccaaatcacaggcatatgaacttgataagtctgttggatgaccattacacctttcaatggagatgtaaatgtttagttaaataatttatattttgagctgtcctatttcaacatttgtagtcaacgaattgattattttggagttagtcttgaatcagatcatctattaacattggagtgtgttgctaatatcttgagtttctgttctgtaggaccaataccgagctcctccagattttaaaaggctattgtcagcaaaattaaagtttttgacatcaagtggtaaactcattaaggtatgataaatgacttctcatttttggtcatgattgtcttgaaatgattgggcactgagacttgcatcaaatatagattcacaaaattatacctgattcttttctataaaatatagattgaatgatcttattcattctcatgtaataaatttaggagaacaggatcatatacaagaaagcactaagatgtaaaccctagatcaaacactcaaacaatcaagcacccaccgcttgagcatttgtgtgttcttccaatgcttattactccatgctagttgcataacaatgttttacattagctgcttataaaatgtatggtttaattttaaagcgacatttcatttgtgaattttgtgtaatctttctttgatacttgttacttgatttgagttttcatggactcatttttccttcgacggctgcttgaaattagagggccttggctgcccaatagtgattacagtctagattatttgcatgtggctgaaacttgcatgtggacacaatcatgagtgtaatgtggtgtattgttgtatcgcattgtgcctgggttttttcgttcaagggtcaaaagtctgtttagcagaattgttccatttatttgatgtggggcactccaaacatagttcatataatttcgagttgacaaagtagtatttagagctgttttagccagcacatgtatgtcaagagaacataaagcaatgggtaatctgatactatgtattaatctgatttaaattgatatttccaaaatcaactcccgtatgttggatagccaactcttgttcctgtttttcttctagcacttattttcatctcggctttccagggataattaatgaattgagccacctgtgacaagttacagtttcttttaacaatcattggccacatttgattatgaactagtgttcgctcattgttattatctcgggctggtttaagtaggttgctattgctagttgaggacttggcgtgggagtgcgggaggggggcaatgctattttctttccttctctgtatttccttacagagaggtccataaatgaggggagggaaagaagggatacactacaaatttcagttgaaaggttatttaagatattaaaatctgaatccgggaagtattctccattctccgttgtgtttttcccttttttcgtttgcttgggcagtcccatcctgaatattgtacttgataataaggaaatgctctaacttgccttttgagtcaattaaggaagatctgaactgtacactacctttctagtaatattattattttctctatctttcctttttttttcatttcataattcttctttatatattgtcctgcggtttctagggttaggtttagggattaatttaaaatagatctcgcaactgttacttgaattttcggtgcaaggatgaagagatctgagttggtaatgatctttttctcgcattcttctttctctcctctcatagattgcttccgttttctttccttcatgaatttggtatttaatacgggggattacgatatggaagctgtgctcaggatttgctttttgcgatccgttatcatcatcatttatatatctaagatatatattatataatgcatatgttagtctttcttcaacgtttacttgatatgggttttgttgagagccaagtactcttaaaatgtagcggcccatgttagcatttttcgtagttccagattttcatattttgatttacatccacatctaaataatactctttcatggttaccaatgcttgtaataatggatttttgttgttacactccctttcttgcttagacttacattgtgtaataacatattattatattattagatgtatgtcttattgttttaatttttgttaccacggttttctttcgccataagtgaagctccttaataaattgggagaggtcagtccatgactgacttttgtctcaaaaataaataaataataataatggttttttatccacttggtgaatgcccacttttatgcatcaatttctgcaatcaaacaataagttttggatatgattgtttgaactgtttcttgaataaaataatctcaaatttgaagtattgctgcttaaaaaactttgcaaactgtgttatgtttaagtcaagaagaggtctatagatctttgccttttcatttatattttcatgagatgggattacaattacatcgatatgtattttgtgtgtgcacacatatgctatttgtatagttataacactcaacaatttttgttttacttttattaattcattattcttcatttactacaattagtaattcaattatcagctgagttctgatcagcaaatgactatgaaagctaattagaattcgtgtgggacagtgggaggaagggagaatgagcacaattctcacttccactttaatttttattttttgaactgataactttatgttctctggaataacgcatgggaattatccagtcccgtgtttgggtctatttgattcttttggaggcttggacaaaattgtacattcctccaaaatagtcctcttttgtactaaatggggagtcatacctttcataactttgatcattcatcttttatcgtgcggtgaataaactgactagaaatgtcaaccagttgattagatatatatacacatgtataaatttataaaatgtgtttttgaataaaaatgtgttgcatggcatagcctatgtattggcctacaggggaatggaatccatgaccataattattatttttattcttccccatgtatgagaaaacatcagatgaataccgttacttgtggtagtcatttaatgttaaagtggagtactattttcagttggggaaatgaaaaatccaattgtttaatgttcatttatttgtcctttttagattataataataatgactagaagatatgggtgttggtggacttttacttatgtaacagatcctttcctgtatgaatattttctgaacatggatatacagacattaagatacatccacatatacatgcacattaatggtgtttttcatttttgctactgtgatttatgtgtggcaacgtgtacagggcaattattttttgtcttactttcctgatctggtggtttttaattgacttagaatgtgatcttatattggtgcttctattttctatttacgcaggtcaaacgcaagtataggatggcacctactccatcattattcgaaaggaggacttcctcagcaatgccaatggaaggtcgccacagggatttttcaaactttagtaatgatgacatttccatacttacaaaagagcaggttgacttagagttagcccagatgaaaaaaatgactgcaaaagaggctgctgcagcagctgctcgagctgttgcagaggcagaaattgctatcgcagaagctgaagaggcaacaagggaggcagaggaggccgaagctgatgcagaaacagcaaaagcctatgcagatgcagcaatg

SEQ ID NO: 112182 - DNA, 8941 bp, Cannabis sativa
  modified_base (6958)..(6961): a, c, t, g, unknown or other
  modified_base (7204)..(7204): a, c, t, g, unknown or other
  modified_base (7544)..(7549): a, c, t, g, unknown or other
ttctagcggtgttcggtaggttggtttgaacggttttttcggttttctggattttatgctcaaccctatactgtttcctaatgataattacatcttctgcaaagccaataagattgaagttgctaacgtgcttcggctccttgaaacatatgagcatgagcgtgcttcgggacagaaagtaattttttgccaaatcctctgtgtaattcaacaataatttacatgaagatgctcggaatcatttgtgtggcctgcttggtatggcatgaactactgaaaataacttttacttgggtttgccttgcactatgggtacaaatgctatattgggttttctcaaagataaaatgataaagagcattcaaagttgggaggctagatttctttctaaggcgggaaaagaggtgttattgaaaattgttgcccaatctcttccaagctatgcgatgagcgtgtttctccttactaaagaaatatgttctagcctagaggggttgatggaaaaattctagtagaaatctcaatctaagggatcaactacaggtgtaagctggatgaattggcggaaactatgtcgtcataaagatgcaggggggcttggttttcgtaatttgagggagtataacttggcatttttggagaagcagggatggcgtttgctcactaatgaaggactactggctgtaaaagtttgtaaggctagatacttcctcaaagggaattttttatcagctgggttgggttcggacccaagtttcatttggcgtagtgttttggaggcaaagaatctaattcatgtgggtgttaggagatcaatatgtgatggtaaatcaacttcaatcttagaagacccgtggcttcctggaatggataataagtttgtgacaacttatcaccctcttgttggtaggtccgttgacagtcttttacaggtggggacaagagcttgggatgttgaactgatgagagacatcttcaatcagcatgatagagacttaatcctttcaattcaattgagtgtttcaattcaattgtttcaagtaactccaatgtttccctactttaaaaagttcatggcacataaaaaataatataaaacattctcaaaacaatgaagtccatatcaatatattctgcctaggctttgctacaggcagccatgattcaacaagattgttcaaaaatagtgtaccttgacgacttaactgtctagtttctcaacatgtattatttgcaactaaaataatctcctaagcttaggagttatattgcccatgcaagttggattggttaggtttaggatttcgaaagaataccaagaagataaggatcgtgttagagtcattaatacaagattatagtttcaaactttgtatgagattttattgtatggaattttatgtatgaacaaattagaagcatccaaagtgctacgacctcatttagtcatgtcctaaagattttccattgttgtaaaaaggactagtcaaattaccagcgccagctaccaaagcaattgctaattctttcaaaaggacaagcttgtaaattaagttgagtgaaaattgaaatcaaattacgtacattttcacaacacagttcgaactttcccctccatatccattgatgtcaatctcaagaaatgcatacggatggggacatttggtactcaaatcttctttacttaatttccaaggaagacaaagatcagtcaatagctgaaagcttggcaaacatatatctaacgaaatatgttatgttatccaaattgctgaaaaatacgactccatgaaagtaaactgttgaatagagttcagtgttctcaaagtttactgttaggactccaatcctgatcccctacttaactgtataagtcacctcaaattcccactggtaatgcttctttgtattttgagattagagggctgaaccatctaatccagttgggggcaaactacttgaagcaactcctcaatctcacagcttatttcaacaccatcctcctccaaccttttacgcatctttggatccaacttgccagcagctatataaatctttagcaacgatcggtaatcattggaattgagacggtgataaggctttagagttttgagaacattttcagcagtgtgaacatctttattttcctcaaaatagtttaggaatgtacttgttaatccccaggacggagtccattctttgtcatctttagcttcagaaacagcagcatccaaataaccaagggcccaatctagctgacgatttcttaaaaggaaaagcatgaacttttcccgagccctaaagaatggccctttacttttcttcatggcgtcctcaaagaccaactttgcttcttcaaacatgtcatgatggaggtaagcacctatggcagcctctggtaatctcatatcataataagagcagctacactcccactccttgaataatttctttaatcccacaatattatttagcttagcaagagcctgaagcatagtaagatagctcaagttgttcaatgttgggtacacagacctcaaggttttccacatcctatcaacttcactgggttgatcaattgcagcatagaaactgattatgaaatgatatgcctgacgtggtgcccccggtttcatcttctcctctagcttcgccagagcaagcttagctttctcgaaaagaccagccttgacatagattgaaaccatgttactatacgttgtccaatcacacttgttttcacctgcattcacaatatcctctagcacgctttctactcctgaaatatcatttaaagaagcataactctgcatcaaaatattgtaagtaaaggtgctaggagagatgttcttctgcttcatctcttgtgcaaagtaaagaactctttcaggtttgtccagtttcaagtacatagtcatgagactggtaaaaggcaaagaatttgaaagaaaccccaattgatttatcttctcaaagagttccaaagctttgtcctccatagctgcagtacaatagcaattcagaagagccccgtaagttattttgttctcagctaatggtgaaatgttgttaaagtaattctcagcagcaactatccctttggttttggatatgagatcaagacgcaaggcatgatcagtataagagtattcaatcttcctcatctccatccattccattatctgtattcaaacatttcaaaatataactattcccttaatcaatgaacttaaaaaacacatataaagttcattaatatgacgataaagacgcaccatataaaacaaggaaattccagaactaaaaaacacctagagataattaatttgactttccatgtaaataaggcattcagccattcacagaactaaaaatacctaaaagtcattactttggagcaagggcacgcccacatagaagtccaactttgggcatttacagaaataaaagaacaagtttgagcacacccactgccacataaagtttccttgtcaaacaaggcatttacagagctaaaaacacctaaagagcattgctttgagataattgcacacccacataaagcttccatgtaaaaacaaggcattggcattactacaaacatgtaaggatcatttcttcgaaaaatacaggcacacacacacacccacataaaagtttcgatgcaatatggtttcttgttctgaattaattaaaaggaatgagggtgacctcgagagctttaggatattttttgaacttgcggagttccttaatgcagctcagaagctcgcatttcttgacgatatttccctccatgacataatggtttagtgtcttccatacgctgcctccggtcgctcccaaagcggaaagctttcggttgagacgctcaggttgttccggcggtggtgcccgactcaaagccgccgtcgccgtcgccgtcgcctccttagatttgttaagttgcccgaggaaccgcgttgccgaggtatatttgttaggattcattgaagtgaataatggttggaacttggaacatgaaactcaaaacttaaaaagggtatttatttaggatatttacaattgaaataatattgtcgtttttatgtattatgttctcaaagttgctgtcgtttttattaagatgttcatctgtgtgtgtaatttattttacaaatatttagtgagagattatatttgcaaatctttaagttataactacattgtcttaataaattaatccaaattaaatatataaatatatattttataattgttaactcaaatttttgttaaaaataaatgaagttttgtaattaaaaattaactgtttataattaacaagtatgtatgaaatactaagaatttttacgtgtaattaaaatttacatactccacgagtcattattatctttaattatttccttacaatatgtttagattataagagaatttttttgaatattcactcaatctcagagggtcattcattccttaaatgatcgatcactttccccataagttctgtccctatttataggttttttaaggaggaaagttattctctttcaatcttatctaggtaactgatccttacattttacatttacaacatgtggataaaatgaaataattgtttacaacgctctttgttcttaataagaaatagtctgttgttgccaaggtaacatattcaaactatgacttgcatcttttgacgatattcatgaataattggttgtgttacgtgagacgttggtgaagatatctatcctcactattgccttttacgacaattattgaattagttttttaggaattttgagtgtggtccctcccaacttatattctttaatctttcaatatactcacgagtatgtgagtcaatgagttgcaagctcttgaagacctcgttatctacccttttagcgatacaatttcagtctgtatttttttgagtcatcctagttagctccccagatgatctcagaatatcgccaccctgcaatactgtgttttatcaacgacgtcattggggcatagtgcgaaacatgtatctatttattaccacttacccagatgctagatatttgttgtatccaataacctcttttaatgttcaggattattattcacgtgtcatgtccatatttatgactttcttaaaaatctctttctagaactgaaagagttttttaaacgatctaagctgggacaatttggtatttctcctactagtaatgagtataatcttttgacaattttactttccttgagaaagattaattaattattaattaaatgtccttttatttgacgaaatttttatccgtctttttgcattttctagaaatatctccagttatttgatctaatttgaaacttgataaatgattctccatctttcaatataagaaagggttttttcacaaccttcttttataccttattttaaatacaaaactagagagaaaaaacccatttttttcaaaagacttttgcatgtccaacttgttttagacttatttccttttcgtatgatcaacactattttttctagcttcattcttgttacattccagacccttagtgctgaagattcccaatctgaaaccatcagcacttttagaagaacctagaacatggtaagtctctgatctttatcctaaattttctatttgttattttcttttttattgatttttcatacgttcttacatcatttttgcctaaaatagataaggtagtttttgttttagtaatccccttccctaaattatttctaaaaaaaaaatctgaattcctagaatacttgcttatgtgaaaagaatgtttattccttattcaatactttggaatttagagattttagaacaaaaaaatccaaaactgcttgcattacttttcaaattgcgtctggaacatccaaaaacaataatagaaataaacgatgagaaaattagggtgttcaatgagaaacttaaccgagaagaaacctctgctcgatttaaacattttatagatgatgtagctagtgggtaacgtcgcttcttgtgagacgtggctttgcgagaatctcctagtttaactaagtatcccttggtaatacattaatatttactcgaggttaccattacttttttcccacgtaaactaaacttttatatcaaattttcgaaagagcgcaagtccaaactaccctagaaccccacaatccaattcgaggctcagttgatcgaatctagggttaggtcaattgccccatatgtgggtccattcctaaggtctcgcgacatcaggattgaagatggatgtcgtatttgctcagtcgcaccaagcgagtttagtttttttcccccaactcacctattgaatgatgaatgttgcaatactaatgactcttcaaggattggtgcttggagcatcgagcatgttaaagcaggagctgtccttccctttaggcaatacttcaaggatttctgtaattatgtcagggtgcacattttcaactcgtcccaaatacttataggatcttaacgtgcttgaagtcgcattatcatatcttagggtgggagtgtccaacccctttcaagatcatgtacttttatgcttttaaggcatgccctgcgagaaaaaattgctcaagtggcttctattatttgggtactcattccaatgataataaaattatcgttagacttccaaataaaaaggaattcaagcatgacatcttttggaagacagggcttcatccgatcaacactacctagtttagaattatacataagtatccattatctcttttgatctatgatcaactaagtgacattgacttagaaaagatataaggtaagtttatggtatattttccactgtcaatatcggtccagttcgatgtatagccaatacatctgatactagtatactttgttaatgtcctggaaaggacattccacatatcattgtgtaagtaaannnnatcgttgattatcacgtcagtgtaaatccagtgcaccgataaatcatgtgactaaatagtttgaagcatataatcataattactttctactgtgatgacatcactgtaatcgtgagtaactatatgttttaaatttaatataaattgtatattaaaactataatcatggaaactacgtgtaaacttaaatgatttctaatcttttactgattataaataagattatattgaaatgagttttanttaaggcataaaatcccaacaaaatcttgtctcgacaaattttatcttaacatttttgtctaatcccattttaccaatttaaaataattttttcttcgaacatcgttatacaactcttcatccttacccttggcagtatttcaaggtggcgatttggggactatagacctataattctaagcttcaataaactagattgtttgttgagtctcttcaaccaaataatctcttgtttattaattttatgattactccactataaatatgaaattgcactcttaataattatagaattatatttactgagtttaactataatgtccattgatataatcaattnnnnnnattagccctccatgtgttggttcgtaactagttttggtcaaaataccactttacctttctaattacttctttacatttagttccattaattcactagcagaattataattcaagattccatctaaatttgcgcgcaactttccagtaccagaattaacacataaagagaactaacattcaatccgtcaagaaagttaggatttcataattgtacatcatgttcccagtcatctatgttattagatttctaaaatagaagttgtaagaattatattctctgagaaattttaacaagtgaatcaaaaaaactaataacatgaacaaaatttttatgataactcaggatttaggtcgatctataatatttagtggtttgcacctctattttttaggggagagaaagagacaagcgagggagagaatggagggcatggctgagtgtgtctgggtcgagctctgacagtggaggatagtcaggatcatattctggcaagggagagagagataaacaaaagagagaattaattttcaggattatatgtattaattgtttaaaaatattttttgattgtgctttataagttaaaatatttttaatttttaataattaaaatgaggaagaccaattaaaacatgtcacgtgtatataagtgttcacgtgaacaattcatagtgacagttaagagaagaaaatagagaatagtaaataatacaacaaagtcgaaggttggagtgtttagctttcaaaaatttagtaaatgagtttagcataccaaatcttagaattcaaataatttttccaccaattacccaaaattaaagataagggaatttataattaggaaaatttacaaaaatatatatatatatatatttttatgttgtatttataattttatggtctagagtttttatttataacaatacacttataaaattttaaaattataaaaatacactttgttcatgaaaagtaagaaaacaactaaacaattttacaaaaattataaattaactataaaaaaaataattaaaaataacaaaaaaataatctcgtgacaattataatataaatttaaataaattataaaataacaaaaaaataatttattatttttattgatgagatatttttataaattagaaagttgtaagactaaaaataaaaaatttcaactagttttataatttattttgtttttcaaaattttggtgttttatctaaatttttcttataattacccaataaacaaagggatttttacgtgtagcaccttaatttatatttaaatttcaaaaataacgttaatatctaatttaacttttcttttaactattattaacgttttttatgaagtgggcatgtttcaatacctgactaaatatttgctg

SEQ ID NO: 112183 - DNA, 4220 bp, Cannabis sativa
taaatttttaggaaaatttcattttgtaaattctgtatgtaagtatattgtttgatgaaatgtctaattcagtttagaatttgtgtatgtatgtataatgtttgataaaatgttttttcttttttttttgaacaagaagatcaaagactaaagaacaccaaagctgagactaagatcttcaatgagaggaacatgagtggttccaaattatctctttgtccgttccaagggctgctcgagcaaggccgtgggctgttgtgtttgatgtccgagggatgtaatgaaccgaggcacttggaaaagaagacaaagaggagacaatcatggcaatgtagcctgaaagagcagaacgatccgtggagaacttttgaattcgatgaaccaaattttgacagtcggaagcaataacagcaagggggaaatgaactgcacgacaccaaagcaacgcctgaatgagagcttcagcttcagcgaaaatttgagggaggcctgaagttgaaggggtcgaaagagtggcaactagtgaaccctgacaatcagtgactacagctccatacccatgtttattggatgagggagagagggttgcatccacactaagctgatacatgttgctggggacttgtagacttgtaggaggctggtgagaactgtgggaaggggaagaaatgaaatgttgagcatccctgtattcctgcaaataacaactgacagaattctccaagcaaaaatcagtggtactgttagagctaaaaatagctctgtttcggttgttccaaatttcccaaagcaatcccaaaaaatagcaagttgatctttagcaaaacaatcaaaacctctgagcatgaattccttgacatcacaatttttattattaaaatagaactgagaaaaagatgagtttttccaaactttacctgctctggaacattgtatgagatagtgggtgttagaatcatgatgagaatgacaattagaacagaaaggggagggggcagacctacgatggaagaggttgaggttggaaggaaggatatgattgaatgctttccacacaaaatgctttattttaggagggatatttgaggaccaaaccgagacccaccaacttttatagatagcaggattggaaggaccaggggcggagagggcagagttagccaaatgataagcagagttaacagtgaaacaaccggaaggatgatagttccaaatcagagcatcggtattataaggatcaataggcacagaaagaatggaattacacatcccctcgtcaaaataaaagcatagtttgttaatgtcccaatgccggtcctgggtaatgaaaaaagagatagtttgagaaggagggaggaggccaggtttgaaaatgactttgtcatgggaaggaagccaattggattcagatgtgttaaccaaggtgtcgtccccaattttccaaataagaaccttgagcagaagatcccttccccaaagaatacttcgccaacagaaagaaggagaatgaccaatagctgcatgcaagaagtcgtttcgcttgaaatatttagcttttaaaagctggccaaccaaagaatcaggataagttaggatacgccaagcttgcttagcaagcatagctttgttatgatgcacaatattgcgaaagcccaaccctccaaaaaatttagaggtgcagaggttgtcccatttcttccaatgaatcttatggttgtggccaagggacccccaccagaatttagacatcagacgggtgtagtgtttgcaaagagaaatggggagacggaagcaggatacagcataagaaggaatagcctgaataactcactttaaaagaatttcttcgcccgctctggagaaaagattttgattccaaacagagagctttgagctcgctttttgcaaaagaaaaaggaaggatgaatttttcgttctggagaaacactgaggaacaccaaggtatttatcaatgaacggattattttccatgttgagggaattcctgaacatttggcaatcagagggggtggtgttaggagagaaaaggatggaggatctgtgaaaattgaccgattgtccagtggctttctgatagatggataaaatatccttgacttcagtgcaagaggagggagaaactttagtgaaaagaagactatcatcagcgaagaggaggtgagaaatggaaggagcagtgcgagagatagatatgccgtgaaaagagttagcacaagacttagcattaaaaataccagagaggccttcagcaacaaggtagaaaagatatggcgagagaggatccccttgacggataccacgagacgggaaaatctgatcagagagacagttatttatgcggagacggaaaaaaacagaggaaagacaattgagaatgagagaaatgaaaggataagggaaaccaaagtgctgaaggatatgctggatataagcccattcaactttatcaaaggccttctccatatcgagctttaaggcagcccagcccacttttccgctctttcgattattgattgcatgaacaacctcatttgcgataatgatattgtcaaaaataatgcgatcactaagaaatgcgccctggttatgggaaataaggctaggaagagtggatttgaggcggttagcaagggttttggataggaccttatagaaagtggagcagagactgatgggacaaaagtccttgactcgagaagcattttttattttagggatgagaaccaaggtggtctcattgataggggcaagatcagtgttggtggagagggcaaataagacagcctggcagaggtcactaccagctgaatcccaatttttttgaaagaaattaggatttaagccatcaagaccgggggctttatctccaggaagttggaaaagagaagatttgacttcatctaaggtgaagggagaggcaagaaaagcagactgatggggagtgatttgcttagaaagaccatgtgttgtaaaagccatagcttctgaatttgtaccttgggaagcaaaaagttgagtataaaactgagcgaaagaggtggtaatttcattaaggttggtgatttgagaattgtcattcaaagtgagggacttaatgaaattggttcgtttcctggtggtagcccgattatgaaaatatctagtgttcttgtcacccgctttgagccaatttgctctggagcgttgcttccaaaaaatttcctctttgagcaatatattatccaggttacgttgaagttcagtggcttttttagcgtcagaaggggaaatgatgggacccgtcagaaggtgttcaatgtccaattggatgcttttgatgttgcgagaaaaatgatttttgtcatgaccccaagaagacaaagacttggagcaattgcgttgtttggatagaaaattgaggataggattggtagggttggcaacggtcgagtcattaacccaactatttttgacgagatcggggaagtcaggctcaagtaaccaatgattttcaaaccgaaaagtggagttacgatgaaacatattagtaatatcctcacgaagcacttttagagctcagtggtccgagccaaaaaaacctgaatgatggagggaagccataggaaacaaattagtccatttttgattaacaatggcccagtctaagcgctctaaagtggtaccatgcttccaagtgaatcggtttccagaaaaagaaagcggtgaaagagagtatttgccaataaaattttgaaaagaatgcatggtatggggagggggaaggcagtgagtgttacgatcattaaacccgagataatcattaaaatcacccacagtaagccacggttgcaaaggggcaacatcaaaaaggcgatgcaaaatagtccaagaatgttgtttgtcagaaacataaggggatccataatagcaagacaagtgaaaagtagtattatttatagaaaccatacaatcgatatggtggagggagtaagacaaaatattaacattaacatcatcctttcaaaacaaaagcagacctccccctaaaccaagtctaggaacttcaaagacattagcaaaatacagtttagccctagaaacaaaagtggagtacattgtaagcttggttcccataacaaaaaagaactgaggctgatgttgcttgcaaaggagggagaagttatggaatgctcgggaactccctaaaccgcgagcattcc

SEQ ID NO: 112184 - DNA, 4332 bp, Cannabis sativa
aaattctaacaagttatcctaattattagtatttactttttagaagagcatccactaaatatttatccaaacaatggatttgagttacgattctagttgtcgattgtgtctcaattctccaccttcctttttatttttcttttacttacattcacctttgtgaaagatccttccctcaaagaaatacaaaaactctacacctttctccacttttgagtatagttttacaggttcagatctctctttctttctctttaatttcttcttcaaattcttttcagttgaatctgattctctatctactcattgatctccatattatctgcttttttctgaattgaaattcatctcttcaactcctttcagatccacctaccccgttcatttccatttgcgatcacctctctctgctcatgcttttgcattgttttgagttttgagggtagtattcttctctgaattcattattattgcagtcaaggaagaatggagggcactgtgttcactcccgctttggaaggaatcaagcatgtcaagtctgaaaatggggaaatgctcaccatgcctttcttgcaagtctgcaagcatattttgccagtaataggtaaattaaaccaactatttgtcaatccaaattcatgtctttctgtgttcttcttgtttaacaatatctctcgcttctagtttttacaactcaggtgatctgatctgagcacccattttgcataattttattccttacgaaacaacattttggcctaaatttctacatgcaattcatcaaaaatagcattttatttaagctggcaacataatttctaacgggtttggacctggcagttgctctagtaattggtacatagattggtttattcaggacagtttgaagtaatgatcacgaaaatgtgaaatatgagcaaacggcttgttctttgcttttcctgaaagattttattttttgtgtgttttttaatgccagataagtttggagcagctatgacccttgttaagtctgatattggtggtaacataacggtatgcccttgtcatgtatattcctcttagagtcttatcctattaaaaaaatatatatgaaatttaaattatctttctttttcttgttaaatcctctgcaaattttaaactcctttgggtatctgttgaacattttcagtcattggggtttaaagattattgatttttctttcctcattggttctggttgtagagattggaatctaaatatctttccagtcaagaacaattcaacctcttgtacagcatggtacagattgaggttgaagctaaaacagcaaaaggatcatccagttgtaccaatggtcttctttggttgacaaggtattatcaacaatttcgtgcttccatttcttctgtaagattaactgattgttgttatttgtcatatgtgtttaattttataatttacttaaaaaatgatctctttttaagttgaagttataatcagtttcttccctcactgtgcccgaataaaatgcttaattgtctgaatcaatgagatgtgaagaactgctgaaggggcgtgtctaactacctcataaaagtgcacaagagattgaaatatcctagaaatatgtatctttttgctatctgcacgaccttgtcagtcaacaatttcactgggaaattgggttataaaccagcaaccagctttctgaacaaggagttaagcctggagattgatagaagaacctggccgaagccagagttgtgctcagctttcttcaatcgacttggtggaaagttcaaaatggttttagggatgagggtcaaatccattccctaaacaattatgattgattcttatcccatatggatgtagtatctattatcatgtacttgtgcagaatctaacttcttcagttggacctttcatttgcttcaagtttaaataagttttctttgttgcctttactgaagtgcattgtttctacctcttcgtttgctgatcatatgttttgagtgttttgcataattcttggcacacgagaacatcaaatacagtgatttgactcaaaagaaagagcctcaggctttctgttttaatataaaaatgataaattttcagggcaatggatttcttggtggcattgttccgcaacttacttgatcatccagattggtccatgtcacaggcttgtacagattcctatagcaagactctgaagaaatttcacggatggcttgctagttcaagtttcactgtaatgttctccactgctgattattatattaaattttagtagaatttaattgattcacaatcatgtttaggaatccttttttgtcaaggtctattactagtatgattatgatttccgctgtatctattgtcaacctttgtctagcctttcctttaatgctactgggccagaccaagtcagttttctgcatttggttactcctttgccttagcacctttagtgtcattgtttttttgtaaattcattcaaaaagagatctattgaaataacattattctaaaatttcaggaaaatactatcctctatctatttcttttcttttctttctctaataagttcttttcttggttgaattaaatttccaaacaaagcataactctgtaggcatgtaaaaatgtaaaacttcttctgtcatgtgtatattgtatgttctaaagataaaataacttagtgctaagagaaagtgtgttcaatagcgatactgacatgagcagttgtgtgattcaatttggtatattttcttgtcttctgatgagtaattggacattgagattgcaggtggccatgaagcttgctcctgatagaaagaagtttatggatgtgattggaggttctggtgatgccatggcagacatagagaaattctgcacaacattttcccctcttcttgaagagaatcacaagtttttggtattagttcttttataattgttctattttaaggtcaatgaagattgtgtcattgtcttcatgatttaatttatgaattagaaaggtggatcaagtgaacaatgtgaaaacagtttgctctctcaaatgccttaggaggcgctgtatcaaaattctatttgagacttccattagatacgtagtcaaaagtaccatcttaggacagtgataaagttattttttaaaaaaaaaaataaagaaataaaaaaaaatctgatataaactactgttctattgtttttttgtgtcaaaacacaggctagtgtgggcatggatgaactgaaggcatcatgattcatgaagaaaacagaagcatcgtacctatttatctttgttgccaattgttgcgatcttatcctccgtcgtcacatttaaatactaataattaatcagtgacatatgttgtattaagtttctctttttttcttttaagttaacgctttatttgaaactcatacatatatcaatggttatgaaagagaattttattacaatggtcttgggcgtgtggcactataagagtgctggggtcattttacttttctaagagatttctactcgcaaaatctcaatctctaaaaaatatgccaagtcttttttatgtcttccatcattctcgcctctctaaggggttgttaaatttcataactttaaaattgttttcagttctaaaaaatagaaaatagtttttaaaaactaatagggatcgtttggccaaagtttgtaaaaatagttttttaaaaactgactagaaaacagaaaatatcaaaatattgtttttaattttcaaaataattttttttgtctaatatattatattttatatttttgttcacatacacggtacttagacccagaatcagactcggatcccaccttggaccccgaaccctgactcagactccgacccggacctaaatctcggactccgaccctagcccggacaccagaccccgacctcggacccgaaacctgggcctggaccccgactcatatcccacccggacctgggcttgagacccccgacttggaccttcgaccccgacccaaatctcggaccccaaatcggatctcgaccccgacctagagtcgaaccccaaaagtcgacccagacctcggaccctacccaaacttggaccccgggcccatattcgaaccacgaccccggaccacgacctggaccccggacccgagacccccaacccgaactcggactcagatcctagacccgaatcccacccggacttgagacctctaacctggacctggacccgaatcccagaccccgactcggatcttgactcgaattgggacccgaacccagactcggaccccaaactcggtgttggattttatgccc

SEQ ID NO: 112185 - DNA, 3090 bp, Cannabis sativa
taatttatataccccagttatagaaaataccaataaaatgaaaaactagaactgataatattggaagccaaaaagaaatacagtgaccaacaaagaattcatgagtcttagcattcttccgagagcaacagctctcaaaatacaatcacacgttcatgcccctctaattctcacctctaccatattcatatactactctatcccaattcatcaattacccagctaatccccactttactcacaccgtaggtgtttatcaaaaatctctgattgtctagccattttttacatgccaaattgagcagggactgtacaactaaaactaacattagttcaaaacaaatcacctttggcactttgttcagaaaatttattggcattgaactcctccaagtgccataaagttggcattttaggccacattttatttcttctttcttttctatttccatcacttttatgacaaaatgaccagtgtaaatcacatgttctaagttagtgaggaatacatggaaacaaactaaactttggacagttctgggtaagcagaaagacagaataatcatgtactcttgatcgtgctgatgctctcacaagctttcacaaacatcatacacaagctgaagtatatatagagcagacaatactcaaaaaggttattgtgcccataaacaataaaataagtatgaatttatctaaaatctgcataatgctaacttattatgtcataaggttatgttacttttcatgtattaaattgcaaaacgtgttctttagtaatgtccatgtaacaaaagtttattgacccttttaaaaaagaaagatcccctccctcttcacaaaaatatttcaactaaaataaactcccatcacaaaaaggaagtatcctctctttcatgacactattattgtgtagaaacaaacagaaaagtaaatttgaaactcagtcagaaaagaagttaccctattgtttgaaggaacataccttcagattctgtgtatctaaagaaatcttggacagagaatagtttctttttgtcgggatagtctttggaagggcggcctatgtgtggcacaagctcaatcagctctgccaatgaaacagtagacaatgtggatctcaaacgctccacattagaaagtggaatactaaatataccactagccaccttctgtggtgaaatgccaccactttcttctccattgtcagcattactgtcatcatcaaccgaagaagtaacccccattacccccgaaggaaccccaccaacttttgcaaacattaaatttcccaagaacccatttacatctgccttccttccatccagaatacctcttactattttgaagtgatcaaattgggtggtaggagaagacggctgctgagaagtatcactatctttgtaaccatcttcttccacaccctgatcaaacttaggaaaattatgagttattttatcaaagacaaaacctataaagcattcaagtggttcacactttacttgtttctcagcaacaccatcaatctgtaccgttgtaacaacttcatctttagacgaccttcgattcaactcacctgaaaccttatccttagtacacaaacacagtttatactcgtcactagttttctgaaaacgcttcttaccagttttgaaaggacctggaaatgcctgaaaaaagttattaacaaacaatgaccaagccaaagcaaactgcaagcaattcgcacaagacacatcttccttggccaaatccatatgttttaacccatttttggacacttgaggtcgatgcccatctcccgagtttggcgaaaactttccaaaaaacgccttaattgggactttaaaagataaccctttctttttatcctcaccggctgggacacactgaccactcctcttcttcgaaccacagatctgaactttaccagccttatcacctccaccgagctgggttcccaattccacactatctttcttatccttagccccaccgtgagcccaccgccactcaaggtccttcgtcgctttatgaaagctcaattcaagaggcgaaagagcttctttcacgacttgaatcgaatttagaagcgattcaatcgggtcattcgcagcagcaaccattactaacagttaaaacctcttaactttactcgaaatcaataccaaccaaaaaaaaaacaaataattgattcaattctatcacaaatacacacaaaatcgaaaccagtttctatgcagattaaaacaatccaaacaaaacccttaatcaatcaacttgagtacaataacgaggaaccttagcccaggaaaggtaaagcgagggatagatccaaataagaagcgtgtcgaaccgattgaatcctatactcagaaaaaagccaatctctatgcaccaaaaaccagaaatgagccctccatatcaaccggataaagaataatgcatattcaccaatgaccagagcgcttcgtattagtttttttttttttttcagttcttaaaccatttcacaatagcctaacttaattaagcttaatcggcattgaaaaccattagagaaaaacaaagttaaaagagcgattcagagaccaagagatttgagtggcagagaaggaggaagaagaagaagaagagaatgaagaagaaagggttattataatcgtaattttcaaaaatgaaaatataatttgttttgttggataattttttggtaaatggataaaggctgacgtcaggagcttgtaggacagaggacactcgggttccgggagggattttaatttggatttttaggactatttatttatttatggaaattatttatattttcactttcttagtaattagtttctaaaatttaaattttgacaaaaaaaaaaattccaaaacccgccttctttagcaattagcaatttttatttatttttgacaattaactgcgatgttagttgttcatgtgtacataaattttatccacatggatacgtaaataagtaggagtcttcgcggtgcgggtggtaggcctgcacatgggttgggttgggcggtttttgggcggtttggcggtttttttatttggcggttttt

SEQ ID NO: 112186 - DNA, 1735 bp, Cannabis sativa
tatgaagctgtagattacatgatagcaacattttaaacagtctatactgaagatcttaattgaaaatagttttcttttgtaaaccaatacgggcctaaggtaaattctctactaacacttcctaaactaatggcatgtttacttaaaatgaaggagaatcatttgtaaataaataagggaaaaaaagacttctctcccaatcaactatggaatatttttctctccctctctctttttatagtctttataatcgaacatcaaaatataattttggcctttagaagtctctagccaaaatgtactcaatattaattgtaatttactcaatttaagaacttttgattatgtttcttaattatacttaaatataaattacgattctcaatcctctctactttattcctattcttttttccactaaatgattccaatttcgattacaatttagcaagtgtgccacaaaggtcatagaggatctcttaccaaagaatagagaaggtgagcagaaaggaccaccaatccaaactgaatacatgcataaatccaaacatgttttctcctcactaaaaacaaataatatttaacaacagttagtataacaattctctacaaatactatagcattatcttagttaagaaatttgagctcagcccattacccattgtggtcgctgttatggatgccaaaaggcctaatatgcaggaaaaaggaagagatatggcaattgcacctgaacccatttttccaacctatttatgcaataaaattagaatttgattggggggcctaagtagcagcaccaaaatagttggttaacttaccagaagttgctcaagaaaacaaaagtagccaagcatgctgacgatgactagaatgggaacatcttgccaaaccctgccaaagattgcatcaattttagcttataccatagaaaaagaccgtactatgctatgcataggaaggtaaaaacttgttatggtttattagatggttcatggatctgttcttatctagcaatacgttccatataatcacattgttgaaaacaaacaactttttatccaattcaaatgaaattatggtccagcaattctggactgaaacttgtttctgtaaatcattcttgcttttaagtgaaggagcaaggaggctctgaaccaaaggcattctcattctaaatttcatagtcagtagaagtaatcaataacatcatatcacaagcacatcttatccattgactaacacaaaaataaagttagggattccgattctgctaggtgaaaatcaaaacagtttgatgaaattttcacttgcctgtattgagtaacctccgcatgcagagctctacctcctcgtaagttaacaccccgagaactttgaattcgtaaaagcgtgacaggtaagttccgaacgtcttgcttgcacacatcacatgttttattacctttgatgctgaaccattttattgcacattcttggtgagccagagcaagttcgcctttacagctacattccattttaagtgtatcgccaccttcaccaagctcaacaaagcagattcgacacacagcttcttcttcagggatatcttcaccaccatcatcacctccatctgaaccgcaaaactaagataagacataggttggttatcacaatttacaaaatgctggtatgcaaagaattatcttcgtactacatagataattctaaaacctttttttttttttttaattt

SEQ ID NO: 112187 - DNA, 5577 bp, Cannabis sativa
  modified_base (42)..(42): a, c, t, g, unknown or other
gccaatattttaaaaagaaaacatttttaaaattattttttntttctaattttttaattttttaaatatttataattatttttaaaattaatattatgtgggccattaaaattttgccacgtatacaagtatgtacacgtaggtagtccaccgtgatacttaactgatttttttgctgagagcagaacaaattaagagtttaggtagttttgaccctaagtgttaaaaaatttaaaattcaagtaatttagccactaatattttccaaaaaagataaatgtactgtaatttattatagaatttttcaatatctttaatttatttactactttaaaaaaacatttatattgcattagcatttcttgcactaccactcctgagatacaccaattgttaaaagaaattcactcattgatcccttctcaaataataataataataataataataatgcacttattgatagccatttatagttttttttttttgggctgtaaaagacatttatggttgagattgagatcaaagaaaatccacttagttttgaagaaaggaaaataaataaatattttaggttaggtagataaaatttgtcccgcctgtgtttgtgctgtgaaatataaatttgtccttgtcttgtctcttcctagctcattgactttcagattgacttttcctcccataaccgcttttcttaaacgagaaaccttccgccattggacaaaatcttcattttggatgctccaacaatgagagggaaaaaccttaaacccaactccaccttcaagaccaagctagggttaccattcgttttccttctctgcatcttcttcttccttcttggattttttggctcaaatcttatcgcacaggtatttgttttcataaactaaactccttaatccaagtaacatttttcgactttgattatttttgtaattttttttttttaaaaaaaatgtaggatcaggaatttagcggtgatggtagagcgatagagagaaggctggaatcgacgaaagaacaaacagagtatgaattgttgctcactggagagaccggtgacgattcaattactgaaattccttttcaggttgccttttgacttttttatttttgtcagattctcttttttctttatactaaattagattgtcgttcaatgtacatgaaggatattctgttaactttaattataatgtgttttgaattttaacctaattagacaatggtactatgttcatcatgattagaaaggagctcaagttcgaattgtatttgatagcgatgtgaaatattgtcaatagtaatatgaaccaaatattttgttaatttgtttttcagttgtgaagtgattacaagtattggaacaatttaacataagttatattaatccaaaatggtgattgaatcctatggagatcgaatttagttttaataaagaaaaatatatattttgtgttcatgaaggtgttgagctggaaccctcgggccctttattttcctaatttcgcaactgcagaacaatgcgatagcatagttagtttggcagagccaagcctaagaccgtcgtcattggctttacgaaaaggagaaacggaagacaacacaaagggaattcgaacgaggtatactttgccatgctcaagataattgaaccattactttttcttattaatgtatatattcttttgattttgagatgttcacttacataagtacaaagtacttattacctaagtatgtggctggaggaaactcttttttttctttcatttttctccctgatggattttggattggtgctctctttctgtattaggtcttttaaaacagttttggtttcaattaatgcaaagttacatgttcttctctgactttggattaaaaaggtttctgttaagattgtttacttgatatatttgtgcattagtattagtaaagcctcgtaggaagttttacaaatgaaaacaaacagaaaagacacgcctttctccaactttatggtactttgcctggtgtctattactctctctctctctctctgtgtgttctggagcctgttctccttagaaatagaacaacaaggaatgggttatcaactattcaatgcaaattatctcttttgtaatatctatgtttttgggtctatatttaggaaaattcatgaagtcctctaaactgaatttatgtttgttaaaaaaaaatattacgtctgttgtttttttgttttaattatttttttttccgagcagttctggcatgtttattagtgcttttgaagaccaaacagggactttggaagttattgaggaaaaaattgcaagggcaacaatgattcccagaattcatggcgaggtacttttttggtaaaataataatttcaaaagtcatctctcaccaaccattttatgctgcctgctttaatgctgctgagcatgcttgtagaagtttaattttaaatgtctttccttacacatatgggaaattcaaggggaaggggtatttagttcatctacttttgtccctgttctcaagatggtaaaccaagtcataaattcttcttctctgactcatgagatggggtaaagttgcagagtgagtttaaaactaaatttacataacagttgactccttaaaatttcaacattatttgttatgtgactgcatttttgctttaagacaaattagtattcaacttacaaagtcactataggtggttgcttttgaagaagaaaaagagaaaagaatagttacagctgtctgccccttttttttatctggaatttatcttagatctatgtttttctttaaaaaaaatataaaatcttgatgaactatcatgattaattgagtgttgtaattttggttgatttagcagtttatatactaaaattgttgtggattatcatgtttcagcctttcaacattttgaggtataatcttggtcagaagtatgactctcactatgacgcgttcaatgcagaagagtatggccctcaaaagagccaaagggtaaatttctaaatttaaacaatatggattttgtttgatcattgtgcattctggttataggctttatgtctttgtcgaaatagtatttgtacatgcttgcccacacaaactcatgaaagatgtatagatagatgggtaagacttgataattttcatgctccggtggcaaagtctataaagtcataagctttgatgaagaatttcaagctaaatttcatcttcaagcttaaagcaaattgcattcaagtaaaccttgtaatatataatagcatctctaatggaatgctaaaatggtggtgcagtattatattttaatacttttaaaataattagctctccaatggtgtgctaaatttggtctatgctaaaaattatactgaatttagtacacaataaattcacattttttaattatagttttgtcattgaacattgatgataaattttaatacacattttttaattacaatattgctattaattattttttaaatatttaatatattaataatcattaatgctattttacattttgttataatttgcatcataaaatgttattgtgcattagagcacaataacaaacattgtaacaaatatagcatttgttagttttttgtgccttaagacaatgtttagactttacactggagatggtgtaagcatgactactgattcacttatctgaaacaaacggatttacagagttgcatataaactttcttctttgtttgtatgccttgatgatttattaaattgaattattacaaatctctttgttaacattagaatttgtgaccaaaaatctattagagaactaacacattggtcttgatttgagtgcgacaggcggcctcttttttgttgtatctatctgatgtgcaagaaggtggtgaaacaatgtttccttttgaggtacaaattggggcatccttttttgtacttcattttggtttctttatttttttcgatgtaagaaatcatccagtttgatgtgcagaatggtcttaacatgaatgggaactataattatgaggattgtattggtttaaaagtgaagcctcggaaaggggatgggcttctgttttattcattgtttccaaacggtacaattgatccggttagtgtttcttgatctcatcaacctcactaaaaaaattgtacaattagaattttcgttccccattaaatttatccaagtttatagctaacattgtaaacttcaatggaagtaataggatcaagtggcaaaagggctattcttcatttaaatttttatgtttttagtttttctactttcataagtgaataaagcgtggtgagatattgagattgtcctctagatgtggttcatatatcttcaccattcctttcatttcactttttcctttttctcttttagaaaaaaagaaatataaaatatgagaagtccttttttcttttttgaagtaaagtagttaaaccatcttaaaatcagttttttttttctttttctttttggttacttttaccagacatcacttcacggtagttgtcctgtaaccaaaggggaaaaatgggtggctaccaagtggatcaggaatcaagaatttgaggattagcatttgtacatacatgtaagtgtgttttttttcttcttcttctctttttaggtgagcttagagtttttcatttaatatttgacctaccactctgagagttgcagctgcagtgcagctgtttggaaatgtaatagtgggggcattatgacttgggtattcttataataataactcagtttcaaactcaatattttgttcgttgtctattatcaatatagataaactatatgtctgtattatgtatattaactagacatgtcttgaacagtgatgaataagtttccaggaaaaaaaaataattagtatttttacactatcaaacctctgaacaattgcaattactgtaatgtggtcctcttgtcacaatttgctctatttttttgtgaaattagtgatgtggcaatgtaaatttggaggataaaatagcaggaaaaaccagtgtaaagggaatcacacttttggtgcgagggtggtcagagtgagtgagacggtgggtgtggcttacaagtactgaagttgagaatgggaaaaaagaagtattgttgagttaaagaataagggctctcaaagaaccagagaatcgacattcattttatggtcactcattttacaataaaattaagcagagtgtgacataaagaccacattattgtaaaacttacaagttatattttgaggggtattattaataagatagagggtggtacaactttgtagtataaaaagttcaggggatgaaattgctatattcattttaatgtatagtagtttcttgtcaaggctacttattctactttaatcaaaggttatgattttcgttccttacaaaagtgattaaaaacaaaaaaaaaacccacaggatcaaaaataaataggtagaatgtattatacgagcattgctatttggcaccagtggtgcctagcaccttctcggcatgtcgcgttgcgattggctagcgat

SEQ ID NO: 112188 - DNA, 8871 bp, Cannabis sativa
  modified_base (2678)..(2678): a, c, t, g, unknown or other
cttgtacacccaagaagcagtccaaaatttaattttatcccatagggcctctgctgagttctcagaaccttcaaagattctattattacgttctaacatggtgttgatgatgttttgtagcatgagctacggataattgcataattaacctagataaataatcttttttgtcagattatttcaccacatctaaggttaaaatctataacttgaggttttattttgtcattcctcatgttgaaactttgaaccaattagctcaatgcaaggtgttggtagatacatttttctcttattgttagcattattatccacagaaagaagcttatatatatgaagtgtatttgtgactttgttcttattggtatttgtgctttgcactctcttttgtgaattctgcttctttcttattttatattatcaagtgttgtggatataatataataaaagttagcccacaggatgtgtacttggaaaaaaaagtgtagaattgaattgcaaaattttcttaactagttttgtgaatattttatggtatagatttggatatgattatgctggtggatatgatcgtgagatgggtaacaggcctgggtatgctgatgaaaggcctcatggtcgctatgctggacgatcgtctggtgcctatggtcctccaggtgaatgcagtgtcctacttatgttatcaaaatgcatgtgttatttgtctttatcgctttccttatattttttaatgggcagtttgaaggggaaaagttgcatataaatccatcttcaaagcattgtaattagatcaatgtaaataatgctggtcttaaaaaataaaatattctgtagtattaccaagggtcgtatggtaagaggagttcaaacttttcttatttataaaatagtgtttggtagcatatggaaatgtcataatttttcatttttatattatgtgtgagtctcatagtttataatgaaaggggataaactcacttatgtagatgggacaaagtcatcttttgagattctcatttaatgctaagattacccgatactgaacggcccctaaagctttagagctttacatagtaacttagtaaatgtatcatatttataataaggatctttaaaccattatgtcacttacctagcaaattagaatcacagacttgagttcaaattggatgcttcttagaactatgctgattgttacaaagctgaaaaagcaagtcttgctcatgttgataagatttaccgaggttgtagtagtaagagattataaggtatcatccaaattacaatctagatagccattaaaggcaaaacaatctgatacaaaacagtacatattacaaccaaaactgccaaccatttggaaaatagtattgtgcatattggaagtggtttatcatttagaacctgcgaaaactgaaaaaggtggttttgcaaacaatagtcttgctcatgttgataatatttaccaaggctgtaggagtaaagagatgataaggcatcatcccaattacaatctacaaagccattaatggcaaaacaatctgatacaaaacataagagtatcacatattacaaccaaaactgccaaccatctggaaaatagtattttgtggactttgtccacatattggaggtggtttatcatttagaactttctgaattaaggccttacatatgtcctggtctatgttgccaattgtatcaaacatatataatactaaaacaacatgatcttgttcatgtatttttatttaaaatttgatgaaggacttttttccattgaaaactagaagttgtaagttgcaccatgaaacgaaaatacacccaaaaactgttgaaaagaactaaactaaaagccaaaatttctaaccaaataagtattaaaaaagggaaagtgaatattttcaaagcacaaatcctgtatgtatattgtgaggtgtgaacttaatgtggttggtatttgtgtttcttaaacaaatggaacttctattcaattaacaaaaatctcagccaaaaacctgccgaaaataactaatctgaaagcacaccaaataagttaaaagaaagggaaaatgaaaaagcacaaatcctgtatgtattttgtgaggtgtgattttttttccaaataacgtgaggtgtaaggtggcgtttggttggaggtaataaaatagaatggagtggaaaggaaacaattttttattcaattcctttgtttggttgcatttagagtattggtggcgtttggttggaggtaatgaaatggaaaggaaacaatttttattccatttctttgtttggttgaaggtaatgaaatggaaaggaaacaatattcattccactcctttgtttggttgcattttaaagtattggaatgtcattccaatggattgacttttctctcattttggtgaaatgacttccattttgaaatgtatggaatgaccattccaatgcaagatgagaaaatttttaataattttttaattaatttttcttatgcattttaagtttgattctattcctattcatattcccatttccattactttcctatgttttcattccgtccaaccaaacaccaccttagagtattggtatctattctattttgaaatggaaggaaagactattccaatgctagatgagaaaatttaataatttttttatcaattttnttatgcattttaaatttgattccattccattcctatcgctattcccattctcattcctatgttttcattccttacaaccaaacgccacctaaatttggtatgtatttgtgtttcttaaacaaatggaacttttattcaatttaaagatgaaagttcaaatacttgggaacaagatttcctctctaatttgtttggtagattgaaaattttattagagaacttaagcacaccaattatattgaagtattaattagtattaaaggacctttcaaaaaaaaaaaaaaattagtattaaaggaattaagtacactaagtctttggtagcaagtttctgttcatacttctatatgcattcagatattttcacatccataatgtattggaattggagtgaatgttttgttctatttgtttatctttgagtggatttgtgttcatcttgcagactgggattctggccgtggtgcttttggcgatgcttctggtgtgggcactacccaaaggttagagcattatatgattttttatccagttttctatttacaaggatggctatctttaaacttttgggattatataggttatgtggttatatgacagtagtaaatgtttccagggaaggtttaatgtcatacaaacagttcattcaggagctagaagatgatgttctgccagctgaagccgagcgcaggtacaaataagtcgtgaattgtgtaaatagcaaacatggaaaaaattgctgtttgttccttaagaataaatgtacctactatgtttttgttatgcagatatcaagaatacaagtccgagtatatttcaactcaaaagcgagcttattttaatacacataaagatgaggaatggtaaatctttactttggcttaattccttgtttatttcattatttttttcctgctcacatgtgtttcttgactgaacataatgtgttttaggttgaaagacaaatatcatccaacgagtttactagctgttatagaaaggtgtgtaaataaaacaaataaattgagttctagttgctgattgaaagctgaatagattaattgtgtgcagccattggcataaacttttgtgataatttatatgcaggaagaatgatcttgcacggaaggttgctaaggatttcctgcttgatctgcaaagtggaacaccggacttgtaagaaaaagtgctctgcaatttttcttctacatattactcttgtctcgtcatcacttttactaaattttacaatttactccaaaataattgtctttgaaatatttcacccaaatttggcaaatgtagttttgatttactctaatatttagcaccgttgaagaaatttgggcaaaatgaggctatatttgctaatttggggcagaatgtattggagtattttggagtacagtggcaatattaattaaatgttcttaagaagaaatctaatagtgaaattttctatacagttaactgtataaatttgaattgatgtacttggccacagctatatgaattaatatttagcacacacaaatttaattaaaaaaattctttgttgtacttttggttatacatataagaatatgtacaaaaataggagtgagaaaaacgcacccaatttaatttctagtaaaaaattgtgttcatttggtatcttttaaagaaaataaaactgcaagttacctttttgttctcccactttttcccaagtattatagtttaccccagattatgactgcttgaaatttgtcaaacatagtactttaccccaattcagttgattgtgaaaatttcatacttttttaaacttttgttctagaataagccattactatcatatttttgacaggggcccaggttttagtgcttcgtcttcatttaaatcaggacagactagcgagccaaactctgaagatgaagttgatgcagggggcaaaagaagaaggggtggtcggacatcaagtaaagaagctgatctttctgctgctcccaaggctcaccctgtgagttctgaacccagacgaatacaagttgacattgagcaagcacaagctcttgtcgtcaaactggactctgagaaaggaatcaaggagaacattttgtgtggatttgataatgacaagagcagggataaggtgcatgcaggctccagtggtccagttattatcattcgtgggttaacctctgttaagggtctggagggagttgagttattagacacacttataacatatctttggcgtgttcatggcttggattattacggaatggttgaaaaaattgaaccaaagggcctccggcatgtgaggggggatggaaagagtattgacatgaatagtaatggggcagagtgggaaaagaaacttgactcgcgttggcaagagaggttgcagagtcaagatcccttagaaataatgactgctaaggagaagatagatacagctgctgctgaaggtatggatccttatgttcgaaaaatcagggatgaaaagtatgggtggaagtatggttgcggagccaagggttgcacaaagcttttccatgctgccgagtttgttcaaaaacatttgaaactaaaacatccagaaattgcgatggatctgactgtgaaagtacgtgaagagctatatttccagaattacatgaagtaagttacagttttttagttctttttcgtgttttctcttttgtcttttcctcatacaacaactgacaagttattgtatgtgcttcacagtgatccagatgcacctggtggaacacctattatgcagcaatcaggacaggtatgattcataaagtaaccagttacggagtttttgtatgtaaatcgggtgttccccttggtctgttcgattctgatatatgtagctctaattgtttagcaagatgtacaactggaaaatcattccagataggtacgaagactagttcttttaattggacatggaccagatggtgaagcagggtaatgaagtgcattttgggagacattttggaataatttgaaattggggtctttgttgtttatattttggattctaaatgggccaaataaattttttaaagactcatatggtctctaatattgtaaagagggatcctggatgatttagttttcttttggggatttgaaatggtggctcatagagaggcaagttagaagttccgatggtttatgaagttccaagaagtagagttctggtttgactagtcattagagaaattaagagttcaggatgaaatgttttagctcagtatgtgttgggttaaaatgcatctgcaattcctttgctagtgttcaattgcaactctctgttggatttagaaattatgagcataaaagaagcttgctagttttgttaaaatcttttggagttatggccaagaacatgggagtgaaccccagcttggttaaggttggtgggtagactacgtgtaggaagatgattatctcttgttgtgtatgaacttgaagtcaatgagtgtttgcagaatgtaggatttatgataattttgtttagctttttatctttttgatgggttcatgttctatcctggattcagtctccaatctcttcttgactattacgttcttgaatcattttgattaaatctcatggttaaaatttttcctttgcagagggacagactacaaagacgtaggtttgggctagatgctagattgaaggacgaacgcggtaaccgcagagaccgggacaataaagctaatggagggcaaagatatgacaggcttgaaaaccttcagcagagtgaatttcagtccaagaatgatggtcctgatggaggagatcatgatgaatcaatgcatgatagttttggggggcaaggattacatggtgctcctcccttcccctcagacataccaccacccccggttttaatgcctgttcctggtgctgggtatgttaagtgattttcttttgctctcctctccttacagtagtctgtagttgaaattgctgtatgtaataagggcttgctctattctgttgtcaatgcagtccgctggggccttttgttccagctccacctgaagttgcaatgagaatgttgcgtgagcaaggtggtccttccccttttgaaggtggtggcagaaatgggcggcccggacctcagatgggtgggccagcgccaatccttgctttatctccagcattacgacaggatcctagacgtataagaaggtaaaatgttattgtataacatatttagttaaagttggtgtgtttctctcttaaccatgcttaatctctaaattggaaattgcttgggaaggctgaatttgcaacttactccaccaaaaccacctcttaccaacaaatgagcaataaaattagttctcttttcctggttagataatcagtatctagaaatattgattgttcaacgttaagtcaatctcttgacaatcacgatcaattcaagtttggtactgtggtttgtgttggacaagggataacattcggttaacaagctgagaatgaacttagtgttctggatgaaaatgaaataccagtgaccaaaaaattgagcaatatatcaccaaagttcattatcaatatattattctgctgtctatcatagtgaattaatataaaaaagaaaatggaggacaaataaaatagtatcccaactgatggtcctttatttaaacttgtaatagttctgtgttaaatttggatatagcgttgtgtgttagtattctccctttttgtgaaatcattatcatctctcattcccacactaaattgtaaaagtgacgattaattagttgagattggaatctgccaaactagttgaagagaacatgttttttttaggtgaagaatatctctctgcatgtggataacttgtatataaaacacttgacattaatttatttatgcagctatcaagacctggatgtaccagatgatgaagtgactgtgatagactataggagcttgtagatattatttaagcttagccggatgcctgaagtgtcaagaccatgttgaggtgagggcacaagaaaacttctgtttgatcaaatgttgtcttggctggctctcaaatcatcacatcggcattggcatacgcatctatgctgtaaaatttgcgaagatactttggtgcttgcggtagccgcttctcaaaagttggtgatgatattgcttccagttgagaagtggccagaaaaacttgccttgggttgtaagcacatttttgttcaacctgcttcatggagtgggaatgacaggacaatcaacaattatgtattgctgtaatagaaggggactttttaaaactacatatctgagatagaggtttccattgttttatgtcagtcttcatgagttagttcatttatattcggatggattattgaccattactgatcaattgaggattttattttattattaggcgtcatctacaagaaaactataaaccttaatgtactcatgttttgcagagatctttgttcaaattttcaatgacatgtttagtgaattttaacataattttctttattgtaatatgtactatcaagtttgtgaaaattatacttcttaacattaatgcttttttttggcaatctagtttttgtgagtgttttgtttgcaattaaaagtaattagataatacaaatgaaagaaacatacaacactttgtgtaagaaaagatcatgtgaaagtttgatatcacctagatattagagtagtattttgttaatgaagaagaaaagaaacaaacagggagtataagcacgctggtttgaagattgtatgcctgatggtttgaggtaggaaattacatgagtttagatgaaattggtagcatttatataagcatgcttatatgcttatgctttgaagcttgtgtataagaagaagaggaaagaaataattttgaagattgatgagactagacgcccttaatcttattcacttctcttctctctatatgtcctgcgtcaactagtagcttgagtgagtatttacatggaggtagcttgtagagaaagatcgtgcattctccatgtaaagccttatcttcctaaatcaagtggtagccacattttattttagggttgttttcataaatgtacaacaaaaacagcataattacaaaaaatgtgcaaaaaaaaattattttaaaaatttgtatattttgaaaacttattaca

SEQ ID NO: 112189 - DNA, 1972 bp, Cannabis sativa
agagtgtaatttcctcttaattaatcccgtgaaaaactaaaatttaaactcaacacttttataaacaagttcacttgacccaacccatttaatcagtttatataaaggattacacaattttggttaacatatcaacccattaatttatttataacaagttaaacatgtttacaactatttgacacatttatgtgccatttaacatatttatatcttatttaactaacacaatatattttatatgaaataagtataataaatataagaatgtatacttttaaataggtggttgtcatgccatttttgagttaagtgtatcaatcccaaatagattattgttgctatttttgagttaagtgtattaatctaaaaataactcgtttaataaatgaattagttgtgcaatccaaaaataatcctactcatttaaagaaaactcaaactaatttatttcgtatgaatttcaaatgatattattttgtcggtactagtccatgtgaattgagtttactcgaggaaaatgtcaaatgtgaaacaatctgagcagagattgagttggaaaattaaaagccaaagaaagattgaattttcatttttcacacaaagttatatataatagccataaatgtttatagatgttatacatataaaacaagtaatagaatcatttcaatatggggatgtagctcagatggtagagcgctcgcttagcatgcgagaggtacggggatcgataccccgcatctccattttttgtttaatctttttcaacacaagaatctgacaaatctgacgtctacctcaatctacttccaaccatttgataccaaattttaatatacttcaaaaatcaaacccatcatcatcaaactcacaaattcattttccatgaatcttaactgattctctccctcccacattttctttggcttttcttcatttatggctcctctgcccttatcaatattctaacaaaaactttggcattttctacccacattctatctttaccacataacattaataaattccatctatccatccataaattcactttttttcttttttgttaaacaaaactaataataataataataaataatataaacctttagtactcagttcaaacactcaaaatgacaaataatatcagaacaagtacttgaaagtaggaagtttggacaccaacttggctcctttcaatccctttgtccccaactccttgtttctaataaaactaaacttaacccaccaaccctaacctctcttaatttctcactttacccaaaatgactatgaaccctttattctcatgcactaataggtcttagcaaagaaaaaaacaacatagtattcttatattaaaaccaatgtcctgacaaatgaaatcagttcataaaaaacccttttacagatctcaagtttttcaccccatagttattgttatggctctctttaccttaccaaaacacaaactccttgctttcactcttcttatcatcataatcttcttcttttcaggttaaaccaataaataatgtccctactttataagtatgtgtatcttattatatagtcattctattttcttatgtttgaattataattgggttggattcaaaacaggaatatgtaaggcagaagacaataataatccaacagaaatgtttcagaaagccttgttttgtttcaataacaagtttgtaagtactctaaaccgatgcacactcttgtggttttgatattcagatagtcttaattttaaacgtttttttatatgacattgttctacgtagtttcttaataatttcaaaaaaatttatatatataatttagggtgattctacgatgcacgctcttaaaatagatgtatttatgcacccttaatttgtttcggcatctagaagaattttttagtctattttttttttattttatatttatgtatgttatatctatttaagatatccta

SEQ ID NO: 112190 - DNA, 6205 bp, Cannabis sativa
  modified_base (278)..(278): a, c, t, g, unknown or other
  modified_base (6016)..(6020): a, c, t, g, unknown or other
  modified_base (6160)..(6160): a, c, t, g, unknown or other
tgcctggctcctagtcgcgaccatagaaagtggtggtcgcgactattgaagcaaatttgacagcttcagcatcttttagtaaaatatgcataactttaacatacaaactcaaaatgagttgattttagatgcgatggaaagaagaaaaataaatctaaaacttttatgttttgactttttccaaaatcagatcagaacatagtcaaatttaagcttgaagtttcaactttattttcttgcagaattttttctattctatagattgttgttttccgaantttgatcaattgatatattccaagtgtgaaacctgaaaccaaagaaaataagtataattccattccaaaaagaataataaagaaggaaaacaactataaaaagtgacccaaaacgtaggctaaaaatagcctaacagaaccaccaggttgttcactgaagactgtcaagatatgtacaatcaaggccagtgtcgagctcaactcacggttctgcaagcttttaccttttagcaaactgtacaagttgcattgtgtttatgtgtgaaattttgtttaaaccctaaatgcgttcttggaaatatgttgaccactgtctaacctacatgccttatgggttcgctaggctaagccctaagttatggacgtccagcgaaatgttagaggacaaggtgacatggttgagatcggaggtggtcggggtggtagaaatccctaaaaccccccatgaacgcggcagaggtcgcagtcatgcttaaagaaatggccaagaaaattcatcgcaggctccattagatttggagcagaggattgcaaagatggaagctataatccagcgacatgatgaggaaattaagatgttgaaataacaaaggtctcttgaggtacctttaccgcatatgccaattgtatccgttccaaaattaccagtagagtaaggtatggatggaaatcgggtggaactttcgtatggggaaaattaggtccaagaatccccaatctttaaggaaaattctgatgggataaacgcattctagactagtgaccctaaggaatctactctaaaacctcaagaggttacgatggaaggtcgggtcaccagtccccttatttataattatggtgaaggtggtagtagctctctggttgggtagaaaaaggaacctacattgatattgggaggcttaagacataacaagagacttcagggaattcggggctgaggtggtcttagaagacattatacttatctagagtgttcgcgttgttggaaacatcaccctgggacgtgtaactagagagcttgttttcaatgtggatcaattggaaatctcaagaaagattgtccccaattgaagaaagaggaatctaagctagaagctaagcctgctccagcgcgggtatttgctactatttaggcggatgcagccgccagcccttcagcggtcataggtcagctcatattcaatggctttacttatactgttaatttgattcaggagctacacgcacatatgtagcaatgagggtacttagtcagcttggtactcctagtgatgtttttgaaatggggtttggaaccctgttgcctaatggggaattgattatatcgagaaagcggattaaatctgtgctaatcagaattaaaggcaaagaactaagtgtcgatttagtaaagttacctttggttatgttgaatatcatactcgaaaaggactttttgtccaaatactctgccagtattaattgcgaacgggaaatggtaacttttcaaccagagaatgaggaacgatttgttttgttggatcggttcaaggctctcatgtcctaagaatttcagtgttgaaggctaggggtttactacgcaatggatgtgtgggatttctagcggttgtaattggttctggtaaacctgagttagttggacccgaggagatcaaagtggttaaggaattcctggatgtgtttctcgaggaattaccaggaccaccaccagaacgggagatagatattattaattatctggtacctggggcagaacctgtttcaaaggcacccctatcatgtggctccggcagaactaaaagagctgaagattcaacttcagaggatgctggatctaaggttttctcaacctagtgtgttgctctggggagctccaattttgtttgtaaaggagaaggatgggactctttatctgtgtattgactaccgggagcagaccaagttaactattaaaaacaaataccctttacctagaattgatgatctatttgatcagctttaggattgtagtttactcggctgagcgggttatcatcgacattttgtggaagaattctctaagatttcaacatccttgtcctagttaaccaaaaagatttagcgatttgggtggtcagataaatgtgagaaaagtttccaagagttgaaacgacggtttattacagcttttattttagccctgccatctgatcaagagaagtttgtagtgtaatgtgatgcatccagacaaggtttagactatgtattaatgcaagcggacaaggtcatagcttatgcctcatggcaactgaaagattgcaagcagcgttatccaactcatgacttgaaatttgcagcaatggtgttcgccttgaagattttgcgacactacttatatggtgaacggtgtaaagtttacattgaccataaaagtctaaagtactttttcactcgaaaagatctaaacatgaaataaaggcagaggttagaattagttaaagaccaagattatgaaatcctgtatcatttcgagaaagcaaatgttgtagtggatgccttgagtcggaagggggggctgaccaaacttgcagtgtggtaatgatttattctcagttggcttcaaatatttctaaggcgaacattgaatttgaaattgggaaattgcacaatttgacgcttcaacaagacttactgaggagggttagaatagcacaactagacgaccctaaattggttaaagcttgagaaaatgtcttagcaggcaaagttaagaacttctcattttcgaataatggaatattactgtttaaggttcgagtatgtgaaccgagtaatcctaagcttcagaaggaagttctggatgaagcacactaccccttacccattgcacccagaaaccactaagatgtattaagatctgaagccttattattagtgatacgagataaaagggatgtagtggattatgtgaccagatgcttaacctgtcagtaaattaaagcagaatatcagggactggcaagactacttcaaccattagcacttccagaatggaagtgggaagacgctgcaatggactttgtggttagattgcccagaaccacaggaatgtacgatttactttggatcgttttacaaattagcacatttcttgcttgtggaagtaacatacttagaggatcagtatgctgacttgtacgtgaaagaaattgttcgccttcatagaatcccgatgtctatcatttctaatagggatccaaagttcacatcgaagttctcggtaagtctagagaaggccatgggtactagtttgaagtttagtacggcctttcatccttaacggatgggcagtccgaataaactatttagatacttgaggatttattgcgagcttctctcgtagactttagaagttcatggagtaagtatttgcctctgattgaattctcctataataacagttattaaagtaccataggaatggctccctacgagctgctctatggcagaagatgtcgctccccaattcattggggaaaaactagagaacgaaaaatatttggccctgaattagtccagaagacaaatgaggcaacggacaagattaaagctcatatgctttcttcgcagagcaaacaaaaaagttatacagatccttagcgccaggacattatatttcagacaggagatcatgttttcctgcaaatgtcatcaataaagggaatcaggcgctttgggaagaaaggcaagctaagtccaaagtttattgaacctttcgaaatacttgagaaggttagacaagttgcctatcagttagccttgcctccaatattgtcagttgtgcgcaatgtttttcatgtctcaatgttgagaaagtgtgtatctaatccaacacatatcttggactatgaagcattggtgctgcaactaaatctgtcttatgatgagcaaccagttcaaattctggatagaaaggagaaagtccttcgaaacaaaaccataacattagttaaggcactctggagaagcagtaaagtggaatagcccacttgagagcttgagtctagcatgcagactcaatatccaaagctattcaggttagatttcgaggacaaaattcttttaacgaggcgataattgtaatgaccgcctaagtttaatatgttagattattaaataattatggtttaattatgagattaaattattaattatgatttacacatttgtggaggtttattataattcagtatgtattaattatgctatgtgtgagtttcttattttctgtatttgtgcttggtagcagtggaatgcgacgttgggtcattagagagtcatgttttcatatggtttagaattttactgacagtggggcatcattgttagacattagaaatattgagaaattggcgagatttgaaaatgaccaaattacccttggaggcccttaaacctttgaattgtgtcaaggggcaaaatagtctttttgcttataaattcttgtcttttgtgggctgtataactctgaaattgaattaggtttaataaataattaagttattatttatttacaagagttaagaaataacctagaaagatcacctctctctctctctttacaattctctctctctctcacgtcttcaagaaccagcagaagttgggatgttctcagctcaattcagtgaggtttagcttatttggaagggcttcaatccaaggtagcacctcttgattctcttctttgtgtttttcttgtggaattgaggttttaaggcatgaattcttgggttttagttctgtagtgatgtttggtgcttaggtttgtgttctaaagttgagttaggttgatttaagttgaattatgctaggtttgtggattttggtggcacttgagcaagatttgagtttaagaactcaaactttgctctttaatggtgaattaggtttctgtgtttgaaactgagatttattgcttgaattttgttcattatggtatatacaggtgttctagaagctattgtggagtttggagttgaattgcagtgttagggatgtttttggatgttcttgcactaaaccggtcgaccggttcagggggacctgtaggaaccgatcgatcggttggtcccaagaaaaccccattgaaccgaaatttcggttggggaaccggtctaccggttgggacagtttatgaaaccctagttttctcgtttttgtgatatttagagtattatcatgttatgaatctccgtctatcattaaatatctcgaacccacaactggagatatatttatggcacgttttgatgattgtcattttgatgagacaagtttcccatcattagggggaggcgaaaagaaatagctagaaaaaaatttatatggaatgcacaatcattatctcaatttgatcctcgtacaaatcaatgtgaacttgaagttcaaagaatatttgcaaaatattgcaaatcaattaccagatgcattcattgacccaaaaaaaattacaaaattatatattccagctaaaaatgcttcagttcaaattgaagtcccagaaggacaactagctaatgattctaaagcacgcttgaaatgtggtagaccagtcggttctaaagataaaaatcctcaaaaaaagaaaaggagcaaataatcaagatgtccctaatgaagaggctgaaaattttgaggaagatgttaacataaacaaatctctagaagagattcaggtgcctgaaaatattagnnnnnatgagatctcaataaattatgtcagtacagtttaagaatgggaccgacttgaagtaattatcaataatattttttcttataatgtggcgctagaaattgtaaatgaaaacgaggatcttgaacctaaatctatcaaagantgtcaaaatagaaaagattggccaaaatggaaagaagcaatttaa

SEQ ID NO: 112191 - DNA, 1961 bp, Cannabis sativa
agggatatagtccgccgtgcctacggttccaactaaaagtccgaagactttctcttccaccaaaacacccccaaaaaccaacattgatccaactatcgaacaccgatggccgagaaccaaagacccacaaacatcctcgactctttaggggaggagattgtcagaattgtcactccagtctcaatatgcatgttcatggtggtcattttggtctccgttctcagctcggatacttcttcctctgccagcttcagtacaatggccaccatggcatacacagaagcgagctcagattcctcctgggacaaattcgtaggtgcccttttgaactctcttgtgtttgtggcagttgttactgttgtcaccttcgtgttggtcctccttttctatcttagatgtactagatttttgaaattctacatgggtttctcttcttttcttgttttgatgtttatgggtggtcaaatagctgtttttctgctccaagattttagtatccctatagattgtgtcacatttttggtagttttgtttaattttgctgtggtgggtgttttagctgttttcatgtcaaaaatggcaatttttgtgacacaaggatatttagttgtcattggaatgctggttgcttattggtttactcttttacctgaatggactacttgggcgctcttagttgctatgtcactttatgatcttgctgcggttttgctgcctgttgggccattaagaatcttagttgagcttgcaatatctagagatgaagatatccctgctttggtgtatgaggcccggccggtgactcatgatgattctggtttaaatggtcgtgtggttcaaagaagggtatggagagatagaaggaatgacatttcaaatagtggggatgattccaatataagcacaaattctgttttggttggaaatgagagtgagaatcatcggataaattccagtttgaatgtgagtgagagtcatgagatttcagattccaattcaaatttcggtcaacataatgttacaagcttggtgcgagctgaagaggggcaggtggtagacataaattcagagcttgttgttccattgcttcaacaaagaataaacgtcccatgtattgctcaggaagaaaatgttgccacagttgagaatttagtgttggagggaattgggttggcttcatctggtgcaatcaagctgggcttaggagacttcatcttctacagtgtgttggtagggagggcagcaatgtacgattttatgacagtttatgcgtgttatcttgcaattgtggctggtctgggtatcactttggtgctattggctgtataccagaaagctttgccagctcttccagtgtctgtactactgggtgtattattttacttcttgacccggtttctgcttgaagctttcgttgtaggatgttctttgaatctcttgatgttctagatatatgaacagttttattgatgtttgatgctgaaagcaaaaattatcatattgtgaaactgatgattaagtcttgcaacctatacaactttgtatcagttgctttcatattatatatagattttatttagtctacttggttttctaacgttgtcaatttattaaagtcaacaactttgagactctctgtttcaacaaccagagaatgaatgtttcattctccagagactgatttagaaaccaatgacagcggaagctactgggtaattggaggaaatgagacttgtttgattgcacatagttttatttaattgtagtgctgctgctagttataagcatgtgaagaagcaacaaggagacaatccgcggttccgtttatgaaaacttgggacaaggaataaggaccttgagcaccttattgttcttgtttaactattcacctctcagaagtaagaatgcaaacatataaagctgtaatctatattagcatgtcatttatactggatatgtac

SEQ ID NO: 112192 - DNA, 6011 bp, Cannabis sativa
atcataataatatataccttatatatagttaagggtattttaggtagcaaaaaaataaaaggggacgttttttttttttttttttttttgttagggtttaatgttgatgttgcttcgtttgcatttctagtaaattggagtttactgaagattcttatgagattctgttttgttggattgaaatgatttgcttggttttgaagaatttggtttgattagtcaataacgtagaaatacatcaaattgtgtaatgaaagaacaacacttcatatcttaatccttaccatataatatatatatatatatgtaaattactgatttgtggtataataaataagagaataatcgatctgaacgccttttcttacttgtggtacttgttgcattgcagctaatgatgctgggagctttaacaacagtgtttcagagcaacaggttggtgctacttactgcatctcaaatattaatctcttacgtttatgtgatcaaaattagaagaatccaattcaaataagatttgggaaagaatcaaactttatggtgaaagaaatgttttcaatggaaaagggaaacagttaccatctttccaaaatttgttaatgaccatgagaagtatgaaaatataattgtttttagctaaatgtgtattttatgctcatcaggcagttctggagactgttgcaagagtcaggtcgaaaaaaaatgagacgaaagaggagaagtatgtgctcttatctgaaatgaatatatttattactttatgagcacctgttccatattggttttgctttcatcaattgaacttgcttttgcattactcaattgtggtattattaggtcgtttcagtttcaagatgtcttcaatctggataatgaaaacagagcagaagatactccaaccttgatagatcggaaggtaaggttgcttctttagaaaaagaatgtatacatttatattaatgccatgggtttttgttctcttgccaataaaatgctatatcacttttttctctatccgatcgactcctctcaggacaatgtcttcattatatcaaactttaagtcaaagtatcctatgctgcagctagacttgaggttgacttactgtttctcgttttgttaagtttgttcttcatactttatgagatagtctgaactctgaactcttcaatttgttggattgcagattaatatcagatttggtagttgttattgtgtctgcaacctgtggggggatcgcctttgcttgtgctggacagccggtctggctacctttttctatgaatcatattgattaattacaacttaaaatcctatgtttatttcttctgattccgttatattattttatgcatggtgaaggttattactggatatttgctagcgggatctttgattggccctggaggattgaacttcatcagtgaaatggtgcaagtatgtttcttcttgcaaggtttttactttttatccagctttctgttatgaagacaataaaacacttctggtaaataattcatatgttaaagcacccatcgttcatctcttgccatttaactagttcgattttcaaaacaatttttaatccataacataggcaatgttaagttcatatgtgagtataaatatataatttttttcctcatagataaatgtattttataagacagttacaaggacttgaactcttctgcatcactcacacacccaaagcttgaggcattttgggcatgttaagttctataagtattcatcttaattgatttcatcctaattagttaggcccagtatagtatatgaaagtttgggcctcatcctcagataggtacatatagtttttacttcatacccctgtacataaaattaggtgtaaaggataactgttttttaagagtagttatagcgtatgatactatgcttcccctttaaatgatggtctatttgtaggttgaaacagtggctcagtttggtgtaatatttctcctttttgctttgggcttagacttctccacaacaaaggttggccattttcttgctctttcacttcttctccctcccttcgcattgttttttttgagtggtcataacttataatgctatttaaactatcactttgtgattatagttgaaagttgttcgagctgttgctattctaggaggtctgctccaaattttactattcatgtgcctctgtgggattacagtatcggtatgtgttgggcattcttacttcagctatatttgtacttcccatacacttttatcaggtgttggttcctcgctaaagtactgattagatgtttctttttgcagttgtgtggtggtaaaacttcagagggagtatttgttggagcatttctttcaatgtcttcgacggcagtggtaacctaaaaattgtttcatgcatgcatgtgtgcaccttattattcatttctctgtttgtgatttttcagctcataaatattgcctggatgtgtattatgattactgaaaagttgcattcttgtgtcctaaggtattgaagtttttgatggagaaaaacaccacaaattctcttcacggccaagtcaccataggcacccttatcctccaggtgtgtaggatttaacactttactcttcttacttcttatggacttcaaattatttaaaaatattttacaatctctctttctggaaatatcttgagaaatgtttgttttccaggactgtgctgtgggattgctttttgctttgcttccagttcttggtgggacttctggtgttcttgaaggatttctgtcaatggccaaattgtaagttttgtcatttggatccagtggatagtgttgattacacacttttttccttgaacattgtgcttatagtaatctcattcctgtacttcaatacttgatataaggataagctgatcatctacttttaaccaggctggtgatcttgattgcatttctagctgttttgtcaatagtatctcgcactgctctcccttggttactaaaattgatgattagcttatcgtctcaggtattattttgcttttgaatgaaacaagttagttgagtgtgcaattaacttacattgtctactttgtatggtctgtaacaattagtttcatattgcagaccaatgaactctatcaattggcatcagtggcattctgcttactcgtagcctgggtttgttttcttgcttcctgtaccatctatttgcggccttggttaatgcttcagaaaatttctatttgttatgcatatagttagcagaatgactggtggttcccattaatattttaattgtgcatacttatggacagagggagaaacctaatttgcagtaacaatgttattttggcaagctgcaattttttcttttctgtgtgaccttcttcagtatatcaaaatatactgttataaccatagattgcatgttggattcattatagaatgtttgtattactgcagtgtagtgataagttgggactaagtctagagctgggttcgtttgctgctggtgtgatgatatccacaaccgatcttgcaccacatactcttgaacaagtaagattaataaattattctcttttcagtcaaatggatgctgtggagatgtatggagagcaattgatttcgcgtaactgtaaatattgtattcaagtatatgctattatacatcttaaattatgggttagatgaatgaggtataagtggaagctagcctcgttttgttcttcatagtagtgtgcctgcaatggttacctatcgaggtagattagaggtgacgggtgttgttgaaattcacatccttacataaaaaaattccttgtttcagatttgtggaataatacctgctccagtaatgcaaaatgtgaaatggatcataaacatccatttttgtctgtacacaacaactgggaagataagagaaagaaaactgagtttggagtaggcagacatgttgccttgctctgttaattttgtttaacaccgattttttggcgaaatttgatttttggacttggcagatatgtaggtgttatatcttcccaagagaagtaagccttttgaaaagttttgtgccaaaccattcaaaataatttctatgcggtcttcctagttttacagtttgcctttttcttctcttcaagccataacagccataaaattattgaacctgtatagtcagcacaaccgccataaacgtatgtgtgaaatatacaatgtatgatagtctgtctttgcaattttgaatcatttgagatttaaataattccatttacagagtgaatcttttcctttatgcagattgagcccattcgaaatctcttcgctgctcttttccttgccagcattgggatgttgatccatgttcagtttctatggaatcacgtagacatattgcttgcatccgttatattggtcatcatcgtaaaaacagctatcattgcatcagtcgtcaaaggatttcgctacaacaacaaaacttcaatccttgtaagttttcgctaccacaatttactgtcttattaattatttttcacttcttctgcaagtgatcaatgtgtggttattgttcattgtacaaaggtggcattgtctttggcacaaataggggaattcgctttcgttctccttagtcgcgcctcaaaccttcatctagtcgaggtttgttctgtaacttaagttgaaatatatactataatctgtttacaaccattaccaattcttctctatcttatgtaaccagggaaaattgtatctattgcttcttgggaccacagcactaagcctggtatgagttcattttaatgacattcgagtataaaatcatgtcgggttctcttctagtattttactcagctaatctaccgtgaaaaaccgatgcaggtaacaactccaatgctcttcaaactcattcctgccgtcgtgcatcttggcgtgctcttacggtggtttccccccgacatttctctagaggtaatcaatcgcctaatctcgaatccaactccaaccaattccaagttccattttcaacttaacacgttcgactctctttctctttctctttcacagatgggattaaaaggagagaatctccgaagcgacagtgggaagcaacgtgttgttgtgttggttcaaggttctcatgattcctaaaacttccaactaagtaggaattactttctcttatcagtccaatcaacaaacattcagaatgaaaccgaacaggaccgataaggtttatcgatctaacgactactgaactaacttaactaacaacccaagccttactcccttattattaattttttttcctcccactttgtgatatcattctttctctgtataatatagtctctttttttgtttctatgttgtaatttttagtttgacagtatttgatttctccaagtggtcagttttgaatgtatcaagtcttttgattattggttagatttcctcttctctttttcacagtttcaacattattagtagtgtttattttgattgggaatcttcttgcattcataattattgaattaattcacttattattgtgtttagagtttagatttgagacagaaaagaaaatgggaattttgttttatatttattccataaaattgagttccaaacaagcaactatggcataacaataaataacaaagtccaattattatttatttattttttttttgaaaaaattaatcatctttattaattgcaatctatagtgattacatgattaaaatttgaaataacatcactactcctgattacacgatcaacaattaaataggatgttcgagctaagaaatgagcaacactatttgcaaaacgtctaatgaaattaacataaacatcttgcaagtcatttaacgtcttacaattagaaataatactccaaaagtatgaaaccataggaatagagttacattatgcttgcaccacagtaagactatcagtttcaatgacaaccttcaatctttccgtttaacccaactcagtgcct

SEQ ID NO: 112193 - DNA, 2126 bp, Cannabis sativa
tcgtgtataagagccattcattctatgggtgtaaggagacttgaagcggtgacgttacaaggactgatgagatattctcacatatagttagggttcaaaggcccataagtcgtgtctcttgaagagagatgcaccagcccacttgaccttggagaaggatgagaaatttattgttaaaaaagtaaaaactttgactcgctaaaatttactgagtaaaccctagaaaattttaattattattaatgccctttaaaatttaaaataagaaaaataaatatttttgtactttccatttcatttctttatctttttcttcttcttcttccacacccaccaatattatcatttttttgtatagttattatcaatatttgttgaaatatctgcaaaatgtataaaatattagtcaaagtaatacaaaaatggcttccatttcccgatccacaatttattagaacttaacatactatctaattttataagaaaagtttcatgatttaaatgtagaatataaaatcctagaaaacaaaatatagttaaaaaataaataaaataggacaaattttaaattaaaataatagtaaaataacatataccttactttctgaagcaccctttctattcgcagaaacaaatcaaacaaaaatatatattataaatatataaatagataaactttatagtgaatattttaatatgatccttaaattctttctttttattaaaagatccttaaattcctatgaaccccagtagttgaattgctgctatatataacacatgaatacatatactaaattattgtatggggcagtaatagtactaatgatttgagttagtttctttatcttttcatgggtcctatcactttgtacatattggaattaatgaataagtatttttttttttctctaaattatgatatttgtaaaattttgtcttttgatttttttttttggataacataaagtttaaatatcaaatttaaatttatagatcaataagaaatttcagatttatataattatttttggagtcttatatcataataaaactattttaaaagattctctaaaaaaactattttaaaagaaaataactaaaatgcatgctacaaaacattcgaatgatgtagaatgaaattttatatattctaaatattattgtacctcatatgacttacatttatttgttttgttccttcttaatggtacgaaattatttatgttaagacaaacaagtcacctcaattcttttttaggttataatattgccaggtgtcttatattatattcatatatagatattgtgtcttatattattgctatcatattcaacaaaattataacatgtgtggaattgcattgaggagtggatagaaaataggacagatatatcatatgttatttcaaaattaattattgaacattattattgtgtagtctctatcatcacatggcctattaatcaatggtggttgtagctgtaataattgaatatataattttgatgtccatgttgttcgtatcactagaggaagaaatgagtcttttgccacgtattacacttccaaaataaattttacttttgtcagcacatttttgtactggcaaaaaagtatgtaaatctgcgttagtataaaaacttttgcctacacaataaaaagtgttggcaaaaataaacgcgtacatagactcgtaaaagttagactttttgcttacgcaaatgtgtattaacttttgccatcaaaaatatgtacggaacaattgtacttttactagcacattaacgcattggaaaaagtctttaacttttgccagtaaaaatgtacaatgagaaaaatcttatttttactagcgtattaacacgttagaaaaagtcactttttgtaacgcccgtatctaaatatttctaaactcaaaatataactttatatttatatgggtcgggatcccaaagtttaaaaacatgttttaaaagtgtttaactaggatatgcacatatatatatatattatttatttacaagttcgcatacaggcaactcaaaatagtaaaagaccgaaaccctccaggttgcactgtcgcgatatgtacaatcactgccaagctccatctcactgttcc

SEQ ID NO: 112194 - DNA, 1124 bp, Cannabis sativa
  modified_base (1017)..(1033): a, c, t, g, unknown or other
acatggttgtaaatctagatcctggtaaaatatttccaacactttttagaatcaagattttagaacatgaaagaaagctatggccaatagcaaaaatgaggagtgaagcaccattacctactatcagtttgcatttccctttgtaatcgactttgtcagtcagaacatcagcatttgcagtgacatggtgggaagcaccactgtccaggtaccactgtggatcattgacagttgaagcagtggtcaacatagcctgtggttccttaggaggtgattcttgagactttgagctaccttctctctgatagctcaaatcaaaacgatggtagcactttaggattgtgtggctagatcaatcacagacttgcaaataggacgattgttggaatttcgaccgccacgtcctctagcagagccaagaccacgaatattattgctgtgattatgtggttgtggaggtcctctcttgtttattacaacatagtttgcagtaggattttatagatccaaggcagcagtggatgacatttgttcgatccgtagttcttccatttggagcaagaactgaacttcttgaagtatgatggtttctttagtagtgagagtgactatggcagaatcatattcaccgcctaagccactaagaatagacaagatcagctcatcatcggagattgtgtggccagcagccattaaagcatcactaagacacctcattttgaggatgtattcatcaataggtgtcgatcctttctttgttgattaaagcaggcctcagagttgcaaaactcgtgcacaagaagtgtttgagagaagttgacgaagaacttcccaaggttctgccaaagattcatatcgtgcaacatgaccaaacatgccttcagatatcgagttgaaaaacctacttagtagaaactgatccagatgcaaccaatcaactaactcaggattaggaagaaatcttgttgcatcaaaaggatcgactatggtagccgtgttggaatatgttttaccagnnnnnnnnnnnnnnnnnatgtatgttatttaacatcttaagtatgaatctctaaaacaatgtaatttaaacacatataaagtttgggaaaccttacagtgggtgcagc

SEQ ID NO: 112195 - DNA, 8733 bp, Cannabis sativa
atctaaataacatcaaaataacaacaaaaaaataacaaaaaataacacacatataacaaaaaattaacaacaaatgaacagaatttcaacataaaagaccgtactttatgtaaataaaataaaaaaaatcgtaaaaatattcaaaattccgtaaaaccgtatttttgtgcatttgtgaaattaacccaaaaaatatttttcatttaaaaaatatgcatattttttttagtaatttttgaaaatactatatatctttttaaataaaagagcctaataaattttccccctaagactcactcaatctcagggttggcctcgaaggggttccatttttttttgtttgaaaaatataaataatttttagtattttttaaaaaataccacatatttattttacaagggcccaataatacttatttatcctaaagcccataaatttttatgaagacccattaccaccttcaaacgagatcagtggtaagttgaaaaatgtatgttttattaatcaattaattaaatttatctctaatgtttatttaattgaaatatacatctttttatatgtattgtatccaatactctagataagaaagtcacatggatagtatgttacaaagacaaaattggtacaatgtttaaaaaaaagtaaaaataatagactttaaagaagaaagtaaaactaaaaaatgacaatataaaaaaggtatagaatctaattttctccgagatccgtaacatgcccgagtgtagtaatgtaagtttggaaaagatatttctttcaaaaaaaaaaaaagtttgaaaaagatatgggtacaaaattgaatttgcaaaagattgagggtacatttaataatatcattaaattaagtgccataaatcataattcctcaatgtccaacccatttctctcttcttcttcttcttcaaaaaatttaaaaatgtatcagaaaccctaacgaagcttatagatttcaatccccgaaatcaaacaaatcttgatttaagtcaaggtcgtggagagagcttccaatggcggttagtcaatattcctaatcttattcttcagttgagtattgctataatattatatgtatgcttatatatatgcgctgaattgaattggattgtattgtatcagttagcaattgcctgtggagaatcatcgccatcccttttcgtcattctaagggttctgaatcgaacaatggattccattaagcacaacattgctgagtttgttaacgttatttgctctcgaaacaatggtgtggatgcaaggtaaagtctttatctttcttctaattgtttggttagagagaaacaatgtaggttttttttttttatttggactgttcaattacaaaaccaccatttcattaaggcaacctttttcgttgggagataaactaatgagactctgaccatggtctaatcatttactatacaaaggaaacattgctgatttttcaccatcttctgggggaaacttcccagcagttgtggactttgactaatttttgcagcatatcaatatgttttctacacttaaaatttgggttgtatgcagatataattatagaacacatttttacttgtgggattaggcaatgggaataaggaatgagattcattaacttgtttacttctctatttttgttaaggaatgagaatgaaatatttgggattgaggaatgggattggcaatcccatgaggttggtgggattgccactcccactcccatttcttctaaaataatgaaatgtcatttttgacttttttttcaactaaaaacatccaaataaaactttaataaagagtatttttgtaatttaaaataatttattctgattccactgcttattccgattttgattatggcaagtcaagtgaacaacatattgtgattctgattcatcaatccgattgagggtgaatccgattcttagtcatttcgattacgtgcaattaaacacaccataaattcataagagtcctacttgttctgggaaagctgtagacagtgccttgattgtagaattttgcatccacaacacgttatctgatgaaattttaggatcaagtttcattttgactcttattttgtttttcttacagtgttgatgatttgattattaaatttggagaagattatgagttgaatgctgatcaaattttatcgagaaagagtgatgatgttagtggggaaaacgatccacatttaacttttaatgtgttggatgcaatgctaaaggaaactttggatcgtttcaaatcaatgaggttagctttcatatttcttcatgttacatatgaaatgtcatatgtaacatttgttagtagttttatagagcgtataaatatgtaattgtgtagatattaaaggatatggaatgagagattgaattttggtttattttggagattggtactctctcaactgtctttggtgctttcattgagagaactttgagccgtgcaagatgaagaggttgttgaactcttgaaatccatgtcgtcttgcttttcgggatgaaatgcactcttccagacagtgccaatctctaaatgaactaaagttatatttctcataccatatcttttaatctcgagacaattaattacatatttataggctttataaaactactaacaaattaccaataagctcatatgacatttcatagtgtaacattctatctctgttttacctcaagttaaaggtagattttttcttccctattgtctttaagatacctaaagaagtgaaatttcagctttctatttcctgaaaatcagagatacagttattttttttgaacatattctgaccagattagaaaatcatgtgaaagagtctcatatccttccaaaatatcttcccaaaattttgtataagtcttccattacctactttaagagacactcttcgtagaagctcatcataacaggagcaattcccttttcaccaactttacccggtctcgtttcccatttttattctcacgctccctttcagtccttgtttcttttggattttgctcgatgatgattatgactacggttactttgaattttggtattctttgcagggaaagcatatctttggccaaaatcggctttttcggtttgaccaaggaaaccatttaccaggaaaaattcgccatgattagagatttatgcttggatgggaagttgggaacagcactctgtctccgaaaaaagatgatgcagagtggtattgttcctgatgtacttacacacaattacattcttaatggactgtgtaaaaatggtgacttggaaaaggcagacgagctaattagagagatgctcaaattcggtccttttcccaactgtgccacttacaatagttttattaagggttattgcctcatcaacgatttggataaagctctgtacttgttttccgctatgactaatagcggtattaagccaaatagagttacatataacataattatacatgcactgtgcaagaaaggcctcatggatgatgcgacaaagcttcttaataacatattatctgatagagatgataagaaaacaccagatttgattacctcaactatactcatggacggtcattttaaagccggaaatattgttcaggctcttgatctttggcacgatgtggtacaaaagaacagcgaagtagacgttgtttcctacaatgcccttattaatgggttgtgtttgagcggagagatgacccttgcttatggatacttttccgaaatgatcaaaagaggtttgtctcctgatgtttttacttataatacactcataagttctcattgcaaagaagccgagttcaaagaggttttttcgatctacaacattatgtctagaactggagttgctcccgatcaaatttcgttcaaaatgattattcaaggtttatgtatcagtggagctgttgtcaatgctaatgaactttttcttcatatgatagagaagaagtcaatggtgcctaaaactcatatatggaatcttatgatcgattgttacggaagacagggtgatattaatcgagtcttctccatcaaagatcagatgttggcatgtggtgttcaaccgaatgtatatacctacaatgcattgattcatgctcttgtagaggcgggaaacatcgctgatgcttattcactcaaacaggagatgcctttctatggtctttctcccgacgtagttacctacagtttattgattggtgctgcttgtagatcaggccaacttcaattcgctattcatttatgcaatgaaatgttgagaatgggatttgaaccgaatataataatctacacggaattaatcaggggttattgtatcaagggtaatgttaaggaggcagaagaattatttgcaaagttgttggattcgggtttaacagttgatcatgttccatataagatacttatcaacaagtactgcagaataagggagcttgacaaggcatttgacttgtacaataagtggttagaaagtgtaaaatgagtttctactcgattataactgctgaaataatctcattcgggattgcaaagtcaaatttttcagaatctgaagtcaaggaaatcccatctactgatgcatttttccttaccagaaaatctacaatgtctttccaaagaggtacaatgtttaacaattatttaaagaataaaagatattttattttataaactttttagtcgttaccagaaaatctacaatggctttcaaatttgctgttgctgtttatgttaatctttttcttttcatatgtaatggatggacattgtttttggtagtagtgctcatacagttaagtttatttgtttgtctacttcaggtatttttgaacgatttcatggaattctccatgaaggagagaaatacagaaatggtaagtagtctaaactagttgagtgtatgcagcaggtgcagctagctaataaactttctttataggactcgattttcctttcattctttccgaaatgtgatgtgtgaatctgcagggacccggctgggcgtccagaagaagaccttgtggagcaaaatgatcaatggacacatgggatttctcttgaagaagaaatatatccagaaatcaaaattggtatgtcttgaaatcaaaatcattagcaataacagcttcttcaacctatgagttttctaacaatgtcaacatgatttcagatattttcaaaccggaccctaatttcctttgagagcaaaaagcgctatgaagagctgaagaaaaacatacttggagaggagtccgaggatgaacaaggttcaggtgcagcagcttcggattcaaatggtgaggatgaatctgatgaagatgaagaagagcagatggatgagacagggaccaaccttgtgaatctttgcaggacaatatattaaaatcgagcctggtcaagaggtaagttcaagttatctaacttctaactgcttcaacattacttttgataagttaaaacttcaaccttttggtacatacaaatatttaattccttcgatttttttgtttggttgtagatggagctttgcttcatgattttagagtgttgcagtcaagatcaagaaagaacctactgaagatattatggtcttttcggttagccgttttgtaagataaacaaagtacgtcaagaagattttgagaaacgctttgtccagcaatactctacgattcatcggctcgaaacaaataagctgcacaatgttgcaaagttttttgcccatttactcggtacagatgctttgcactggcatttacctcatctcgaatatttatcatgatactcttctagcaactatcagagcatcttgccatttattttctaaatgaacggtaatatttattgaaaaagagttttatgggacttttcatttcattacctccaaccaaatgctacctaagagtttgaggaatatgttgagccttattattcagcacaacaatgcagtagactaggatgatgaattatatattgttcattctgaattacatatattttttagctcttttatttaataattagtttttcaaaaaatttaataaacactcacatccacacaattgtcaaagcaactatattattattttgtttgctatcaatttactgcaagcagttcatggactatttgtaatcctaaatagccaataactttggaaaaagaaaattgctaaaagggcaactacttttgttatacaattattagtgtaattaactattaagtcttatataattcagaataaattttaaagaatatcactaattaatagtatcaactataaaaggttatggacactactaatattcaataacaatactcattaaaaattatcactaactaatttcaacacttgtctaggcaggacaggtgcatctcccaccacatactcgcttcttaaatttacctcatacttgctccaatacccgtttaaattaaagtaggagcggggtgaggattacccgacgggggaaagaattccaatcgggtacccatacctgtcctgcccccgaaagtcaacccccatacccgcgggttcggataacctgcaagtataattgccatccctacactcgtcattattctcttaaaaattttactttacacatctcgagaaattataaaatttcacttactttttaattggacatgctgaaaaaaacttagttttgaagcactaacaatcattttttatcgattaatttatgaatgctgcagccctttgagaaataatgagacaaatagtgtgatttctatggctgctgctgttgcttcttcttcttcaatcataagcctatcccttctccgcttcactgccaccaaattatctccatctttctcttcttccccattatttctcaactccaactccaaacgaaaggtctccttccctcccatgaattcttcatctcttctttctcacggtgttctgatatgatttggttttttttttttcagagtcttgtccgattgttttcaatggcaaaagaatcaccggcgaacaatccaggccttgaagctactccagatgaagctactaaaggttacatcatgcaacaaaccatgtttcgaatcaaggatcccaaactcagtcttgatttttattctcgcgttctcggcatgtcgtaagaattgattgcttcaattagtttattaatttgaatgaaattaacaaattccttttctattgtgttgaattgtggtctttacaattgttctttgttttcaggttactaaagaggttggattttccagaaatgaagttcagtttgtactttttgggctacgaggtaaaccctttcaacctaaatatgaatcttgaaatatgaggtttaagaagttccctttagtctacacttggttgaagaatttaccaaaactctattatgggattatggctcggtagctactaagtctaatataaattttataaattactcatatgagcgatttggcacaaacacacaaatttctttagattacttagaatttcgtaagatgcatgtggttacatctcaaaaccaattgactataagaatagtagcccatgcattttatctatggtgttacactttcactaccgttattggatttggatcgaatattcattagagtttagtttgaatatgataccatgttagaactgtgagatgcatgaggttctatctcaaaactaattggctatgagagtagtagtccatgcatcttatatatggtgttatatttccacactttagtaatgtgggagtctaacaaaaatagcagcaagaacaatgcaacagtagcgatgaaatagtaggaaaattgtagaagattgatattgaatgcatgagaagaaccaattacaaactatgggagccgttaggcccctttgaaacaaagtgttttactcaatatattgcgtaccccttttctaaccttactctcctatatatatttatagtaatttcttacttaaaactaccctcgcaaacaaagactcatatacctttaaatttactatatgctagaacacaacactaatcctagtgcctaacaaatttaccaatagtagctagcttttttatgttatggatgtaggactctgcatctgctccaacaaatgcagttgatagaacagtttggacttttggtaggaaggctactattgagttgacacagtaagtacaactatatataatatttcctactattctctctttctcttttcactaatctgattgtattttctttcaaatcttgtataacaataataatactggatcaatggtctgaatattttcctttgacagcaattggggtactgaatctgatccagaattcaaaggatatcataatggaaattcagatcctcgtggtttcggtaatattctcaatattattaacctcactattccttatttgaagttacttgttgtttaacatagttcgaatcatttgtttgataaaatttaaaatccttcaaacttttccttttacactaatcatatcatctagttatgttgggctatttttttgtcatggatgagaatattctgattgttagtagtatagtatgagttaaaattacagtccaattgtatgatatgtgttagagtattagctgtatattaggtgtaaaagaattagggtaacttgtatttagtagtttcctattttgttggtagtttcctatttcctagtctcctagctttgtatataaa

SEQ ID NO: 112196 - DNA, 1033 bp, Cannabis sativa
tattttattagggtcaattaataaaatttccctttgataatatatattgttgtaaattttccttaataattttatagtgcgccgtatatattagtttcatcatcaccactttgattagtgtaatttaggagcaagtgtcacataacttattttaaactacggataaaatgattaaattttaaagttcccaaatgtttgaaagtgtgagtgattatttcaaatggtcactttacacgtatacataaataatagggggtcttttgtcataatggcctcatggatattgaaaagatggaactaaaaatacagaagtaaaatatgggactatatttatatccaaaaataaagtgagagggaaagaaagtatgaacaaatttgtccaattattattattattattcactaaacatgggaatataccattttcactttatattgattgaagttaccacagtaagatcttaaagtgtaacatatattacataggttactgtgtttaggtgtcattagtttctactccataaatcaaacatagaaaaagttagaaaatttataaggttattagatatttatgtgtaagtatataaagcttatttgattggatagaaaggttatatattactgtatatctgttcttttgccgtggcaagggcctctctcaaaagaggaacattgctattttttcatagtatttctccgagggactttgagtaaactccttaacattttaaaatctagctctttttttctttttggtcaaaatcgactttgcaatttactatctttttaattgcaatttgcaattaactattaatatgattgtatatacatatgattacaagaataatcttgagggtattatgaatcatcgacaatatggattgaatatcactagcttaaaatatataaatggaacatttattaatgagtattacctattgatgaatactaaacaaatttaattataaatattaattttaaaaatattaaattattaaattttagtccaatagcgaataataaaagataaatt

SEQ ID NO: 112197 - DNA, 2483 bp, Cannabis sativa
tttttttttttttttttgtgctctaacatgaaaggcttttaaatatgatatgattttggtgatggttgtgctatttcttttgagtggtgttacttaaaatttttagagtgattgttgtacatgaatggaattatttggtacatgaaatatcttatttgatccaagatacatcttactcaataataataaggggaacttgcttctttttcactgcataaacataaattaagaataaggatgggatataatgaaattttagatagattccattaaagatccagtatagaaaactgttttttttatttggagctctaacatgaaagaataagtaggcttttaaatgtgatatggtttttgtgatggttgtgctacttcttttgagtgatgttacttgaaatctttagagtgattgttgtacatgaataatattatttggtgctcttacatgaaatatcttactagttcagatactattttttagtctaacaaaaccaatatattagatttttataagtataataaaagtaaatttgacaaacactaatcttatatggaaaatgaatatagtttgatggtacttagaaaaagttgtgtactttgtttgaaagttaattattaaaattgaatcactacgattctagattgatttggggaaagatctttttttttgggaattgtgttatttgaaaagtgagagttttaaaatgagactatggtacataaagtcaaatgatattatataaaaagagatccctacttgttatgggaaacaagacaacaaattaagtatagggatgttatgaatatactgaaattttagattattgcaatcaactattcaaattttttttcttccaacagtgtacggtttggaatattttttaatttagatattttgtcttgtgcagcaggtttttgcaatgggacctaattgaaagagggaacctgctgcagacaaaaaagatgcagctgagacaaaaaaaaataaagcaaaggaagcttgggtcaaatattagtaagtaatttgtccctataatctggaactaattatttttggttttggaaaaaatgtttctaatacccttcatttatttaattgatgcatccaagccaatttcaaactgtatgttgcagcacatgtagataagtaagaacaagatgtgagtgacttggagtgtgtgtgtgttgtggatcttttaattttgttattcatcattgagggttctctacgtaattgagattattaattttacaggtgcttggtagtgttatagagcaattcaagctgttgagtaatgaagagatacaaaattagactgcctatgaagttaagccttcccctactaaagttggtgttagagggagagggaaaaagttaagggaaccagaattgttgatcaaccaattgagaacaatgaagggatatgggatgtacatgtctctgattgttgttccttcaaacgattgggtagaattgtctcaattctcaatgaggcgcaaaaagaaatggtcaccaatgctggtttccctacattcttaaaggaggatgagccttacattgatgcaaagatggttagttggctcatcaatcacgtggatccaaccacttgtcgactagaattatttggaagaattattcagctatcggccaagctatttgaggatgtcatggtaatcaaggatgggggtgaacctatcttaacagaaaatgaccgtgacctgtatgagtttgagaaaatttttaagcccaaggactatgagttttcactgacgatgcttgagaaggatttgagggagagcagcaaaaatgattacatgtttctgattaagtttcttatggtttaattacgttttcattttaagctaaaaacgattggttttatataggagttttgtgaattacaatagttatggagattctaactttgtagaattgttctttggtacctatgggactaatatcgatatttccttgttgaatttgaggtgattttgagttagaaatcgagttttgaattttttaaagcttagtccgaacgttaatggcatttttcatttaagggctcaattttaaattctattacgtaaggatgataatatttatggtatatatgtgccctgtgaagtttggtgtgatttggataagttttggtagtgtttcagtaagtgcgaaaattgagattttcgtgttttatactttttagaaattcttaagagattagaaatcgtatttttatcataactcttgactcgggtgtccgttttggatgttccatataccgtttcaaagcttgaaatgagctctacaatatggtctatgttttagagcaaaaatataagttttattttagtgtatatatagcgtagggtttaatagaaaaccctagattgtcttatgtgaatattaagcaatgtgctgggataaacacttattggtttaccgttgttgtgatataggtccgagatcattgaggatagttctc

SEQ ID NO: 112198 - DNA, 2468 bp, Cannabis sativa
agggcataaaacctaacagctatttaccgagatttttggaaattaataaattagagtttaggaaacatataaaacaataaataatagacaagtaatttttacgtggttcgagcattaataatccctagtccatgagtccgttgtattagtcttgcaggcgagtgttggaatatcataagtatttacaacataaaccctagctctgtattcctattgtttctcccttgaagaagaaagctagtaggaattttagcagaggtttggtaagtatgagaatgttcaccttttgtacatgaaaagtaagggtatttataggcacacatgtgggtaagggcattactctttacccacctagggtttcttactcaacacgccacaagggctgatactacaacatgatgatttgacaattggttggtaggaagctttcccatcgtgtggtgtacgactgttataaggcatttcgtgggaatgaggacacgtgccgctcaaaagtttcagctttaaaagttattgcctaaacaagtcattggacaaaaaaggggcttcagcggcgcgtacgtgcactaccatggtctgacgcaagtgacaagatctaatttggtgtcaaaatatatgtaactgtcgccttgagctacgggtagggtacagccaaataggttccaggatcatctcgtcacatctttctcagatcacactaaactgctacccttctggaaaaatcgtggcgtctgaggactctaatccttcttaatagcggacgaatagtgggagtcctagagtcctttctgtcctcgctgatagggagaaccttcgactaactcttggaatataactccttttgtgatactaataaataaaagatacatattaattgcaaacaatctggcatggcaccttccgtgattgccatgtaacaggcatccgggaatacatataacatttatccccaagttctaagcacttgcgagtgatgagagcttgtagcttcctttcggatgcttgattcactatctcgacatgcaagccatgtgttgaaatgtggaagaagtcttccgtattactttgggtagctgaagcgttggtactttagtcgtcttgctaaagcatggtgcttgtttgcaggagccgtggggcttacgctctacgcttaagcacgtttcttgtgggaagtgaatgacgactagacttgaaaagatgatagattgatggcatgttggtgatgccgccatgaaatgatgagtaatgaatgccttattctctttcctcatgcacattaaatgtaaactctttgagtccccaaccattggatggagcaaattttgatcaattcaatttggaccgtatatttcaaaaatgctctaaacatcgtacaatgtaccaatgcactcagtactgctactatactagtgtcagtagcatacgaatcacaaacaacatgcatatattacacatacacatattcatatataaatacatattctatgctagtcttatctcgtttccaaattcaagtgtaccagtcgacctaaatagaaaatcacgcgctgaacagaggccctatgtcacaatcacgtaaaatggtaaacaactttttaaaacctttttgaggatctaaactcgaaacaaaaagttttcttatcgataaataacatggcaagaccttaaatatcgaggaaacacgagaaaacgatgaaatggggaaactacctaaaaaacggcaggccattttctaaaaaaaggtaggccatttttttgggtctgcaccaataaaaacggtagaccatttctacagaaacaacatgacattttcactacaaaaaaaaaatggttctccaattcgatacaaaacaatccccaaacttcaccataagctccagaacacctaatatcatcaatataaacaaaatccaagcaacaaaactagataaaactcaaaattacacaatttaccattattgacccaagtttgaattcttgaactcaaacttgctcaactcaagaatcactgatcaaaataacctcatgctagcataaacaacctcaaattaaactcagaaaataactcaagatcagccagggttaggacagaacctacccttaaatctttcactctaaaactaaaaagaaatcatcaaaactaaggaaccaaattttatgactttaccttcaattccttgctgaattctgctaggattaggtgaattaggatctggttcctttgggttttgggtgaggcagaaaaagagaaagagagaggttgattacttggtttttctttttaatgtttatcctaaaataatatattgtcttattctagcataaatatcagccttaaacaaaaggactaatttaggaagtctactaaaaaaagactaaatcttaataattagttgtaatgaccgctttagtaatttaggttagtaaaggcaattagcactaattcttattattttattattatttgt

SEQ ID NO: 112199 - DNA, 7768 bp, Cannabis sativa
aattttttcgagttatttcagtttgtaatttttatcggtttttccggttcgatttgggcgggttattcggtttgggcggtttacaatttttttggtacaaccctaaccaatagtccattaataaataactctatatatatttgagcattgttattgggcaccagtgtgcccaacactttctataggtagtgtcatacgattagttagcgatattctttaatttttctttcttaagttatttgagacttaatacttaattaaactaatagcggtattacatagaaaaagatactaaacaccaataatactttttagcaattctctatacatttttatcgaaacaaatcataaatatacttttaaattacacaagctgagattccattccagaattcacacatacctcccaaaaacctcctataaaccacttgtgctcggtccattaatatatttaaaacataccaaatatgaaatatatattataattttttttttttttggaactatatattataaattatttagttccattaatgtttaaaataacaatttaaaaagtaaatatctcattttaaataaatgaatattgctatttggcactaatattatctagcacacgtatcgtcttgcgatacttcttaaaagttattatattaaactatatataacctgatatttaattagattaatagcgatattaacacataaaaagatatcagacaccgcatgttctttttaacacttctcattccaagtttctcctgtttccttaaaaattgttctttttaattaaaaaaaaaatcttaaatttagaaaaacataaattataatttaaaataaatagaaaaggaaaggtttagtggtttgagggtccaataatcaatcgatctgtctttctctgtctctttctttactttgcttattgctttggtggttttttcaacattccaacacagacacagaaagagagagagaaagagaaagagagcaacccacgttgttcccttccttccttctctcctggaaaaccctaaaaactcacctgcgttcctcttcaccacctcaatcacactctcctcttcaatccaaacaaaaccaggtcctttacgttaacttttcctttctctcttcttaatttcacaaaacagcagcattgatcttccaattctcggtagctgatttccacaatgaacgacctcctaacggtaaattctccttctttatttgttttttcgttttttttggttgattgggttttcaatttttttatttttgggaattggtttgtttggacgtgtttggagcctttctttttttcgaattttgtcttgatctggtccggtttggatttgtgtgtggattttgtggatctgtagtttagcaaaatttaaaatttaattgttgggttgtggaatttgttttggttggagagcttagaattgttgtatttgagcaattttgaatgattttgatagctgtgattactctgatcattgtgtggttatgactgaataaaatggtggtgtaaattttgatcactgagtaatttggagagctgaaatttgttgagagaattaaattcataatcaattagctgtttagaatgctttttctggattttgaaatgtccttgttaaatcctctttggttatattgttgtgactttttcatgttattgtctcattaatttgtaaagaggaaaaacaatacaatgtatagagcttgtaaatcagaattgattggtccattgactctattctcacctttgaataagaaacttgggcaataagaaattgctgagagagaatctaattgcaaaataacaaatttttgttattagattctctcctctcttagtttggttggtaaattagttagaaagtggagggtcttaggttgactaaagagtttacttagttgtgatgagaagaaagtgttctctgaagggatccccatgtaagaaaagggtcactgacattaacttaacaaactcaccaaccatggattgctattaaggaaagtaaacatcttaactgtaaccaactttgcctctagtgaataagtgttcagaaaatcaacgccatactggtgtgtatagcctttagctactacccgagccttattatgttgaatgtcggcatctgctcgctgcaaaaacttatgtactcactcaattatttttatatattcattttacaactacactaaatttcggttaaatgtatgctaaaaactagtgtaactcaaataagtctcttaaatctgtgctttaatttaatgactgcaggattcttttgagatcccacggggtcagccttctagggatggagatattgagctaggaacacaagctcccatgaatacaggagatcaaggactggagagtttcttcaaaaaggtaaaagttttattctattatctgtccatcaatccggttctatgtctatgacttcttatttaatatggattcaacctccgggattagccaaacaaggtcaatatatataaatatatatcttcacccacaggccttggtcatcgtatgagcctgggcaatgttattttgtttcttcaattttggcttttttcaatgaaagtttgtgtctaaaatgtgatgtcacgtccttttttttcttcccgttttttcttttttctttttaaaactgacactgttatgatctctctttgtctctcacacgttcttttccttttcttttctttttacaggttcaggagattgagaaacaaaatgagaagctggataagctactcagaaaattacaggtatattgaaggcctaatatacgcataccattgccaaaatgaatatatatactcataccataccgacatattgacacgaacatatggcatttgtttaattcatataatatgaaaagagttatgcatgttagcttatcatttcttaactttcttttagatagctatactctgttattcggcttggtttatttttccaaagttttataaattgtagcttgtttagcaatctagacctgataggatgttcaatgttcatgtcttactttcctaaacatgtcatgaacttacttaaagggcatctcctcaagtacttgatatctcacagacatagataatcaactgtaagctttcataattacgcaacaaagagttttattgtattgtctagtagagtcagcttagcttctttgttcaccagagcgacatacataaagcaatggggctacctgatatagcatagatgattttacaatgcctgttttttgctgatgctttgctggcataaaatgtcatgtaatttttttttttcaaacaatttgaagtaatttatagctaatgtttctgtaggatgcacatgaggagtccaaggccgttaccaaggctcctgccatgaaaggtaatgaaaccttgtagtgtgcgtatcaagtaaattgtcatattttatgctatttatgccttgccctgtatatcatgtcatattactataaaatgatgattatttgtcatcttttatattgatacataatatatcatttcttattagaaaacataagagtaattctgatagtatcttatatataaaagctgtatttggagaacactgatagttaaattgtatgtacaaaacaagcaaaccaatttatgaatcatttgctcatgtttttattgatgcttccataatttctttctttatttgagggagagctgggtgctttctccatgaagaaagacacctttacatgactgctgtaaataaacactttttttttggtgtttgagatttctactcaacctttgatgcttctctgactttagctcttgacttctctcttaaaactaacaactacattaattgtttgaagcaatcaagcaacgaatggagaaggatgttgatgaagttggaaagattgctcgatcagtgaagttaaaaatcgaagaacttgaccgagaggtaaaacatgttgctgcttttgtgaggcttcctttaaatttaaggtcactaatttggtttgtttctcttttaatttcagaatttagcaaatagacaaaagccaggttgtggaaagggtacgggtgtagatcggtcaagaatgtcgacaactctgtaagtcaccctcctgaattgcttctttatgttttcattcatgtagaatcagatataaaagccattaaattgagagatcaccaaaggtttctgccaaaaattaatctcagggaagaaatacatttatataatgaattttaggtacttggcatattgttctgtgttaacttcttatgcatgcaagacttgcctgattataccccttactgccgaaatcaatgtagaagacaaactaacataggataacaataaattttgtaacaagtatcaacgcaaatgttttccctaatcattttgataacttaattttaattagactgacctacaaacaggaaggattgtgtgacatgtgaccaccttgttttctatttttcaaaccccagtttataaaaattcagacttagcatcctggcagctttcgaagccaaaaaaaaggctaacaggatttcattgtcctttttgctttatttcttgttctctacattacaacatatcatcaggtgtactttttcagcatatagatttctgaatatcaactaaaattttctgtgaaccatttttgttgcagttccctaaaaaagaaattgaaggataagatggctgagtttcaggtacagaagatgaaacaccttttattgaattggtttctctcccatcttagtttctttgtcattctaactatatttttcagactttaagggaaaacatccatcaagaatatcgagaagttgttgagagacgtgtatttacaggttaatataactattctgatcttgctttctgatattatttctgcaacttggtttgtcatttttgatgatatatcttaatgcaattctcattttttgacggttttcatggtcacagtaacggggacaagagctgatgaagaggtgaagcataatgagtcttaatcataaatatttattacgtcattcaaagttcatttctaatcttttaataatgtatacagacaatcgagcgattaattgagacaggagacagtgaacaaatattccagaaggctatccaggaacagggccgaggccgggtatgtttctttttctcatttcccttaccaatattctccaaacaagttgaataacttagggacgttgtttggggtccagtatgaataaattatcttggtttgacctcaattcaatttactgaaatctgttgttaacctaatcattagcaagtagtccacatctgaatttttattgaacataatggttgcagataatggatacccttgcagaaattcaagagcgccatgatgctgtgagagatgttgagagaaaacttcttgatctacaacaggtatttataaccctttttgaagtgatgaataccaaatcgttgagaatgtcatttttgttttataatacagcacacaacctaggtttcagatctcttactaaaatctgagctcatagtcagttagctcttttttgtcatattttaaatattgttaaggcaatcagatggcgtgaaaaagatgctcgaagtaggtcgttgtaaccgattcaactgctttgagttgcagtgtaacattttctttcttttaataatcagaaatgataataatgtaatatctagaaattaaaaacaaaattaagttgcagccaaagatgtcaatttttgttaactcggaaaagagaagtttgaatttattcatcaatggcatattaaaagcttgcaggatctattaagaatgtttaaacaagataccttggattgaaagaccattttagattgtaccaactacaaagagggcattcattgttttgattcaggagctgaattgtgtcggttattatatgtagatattcctcgacatggcggtgttggtggaggcacaaggggatttgcttgacaacatcgaatcacaggtacataattttgaaagaattcttcttggtcatggatgacagatttggttggatgatctaatcatgcaatatctctcgcaggtttcaagtgccgtggatcacgtgcatcaagggaatacggctcttcaaagggctaagtcactacaaaagaattcaaggaaatggatgtgcattgcaatcataatccttctcatcatcgttgtgatcatcgtcgtggcagtcctcaagccatggagcaatggcaaaggcgcttaaattcatcgaagattattcttaagatattaacgtaacaacgctgcaattattaccctgttcgtgtgagttgtgctccgtctccaaatcggcttccagttactttgtggtgggtgatgagtgaaaaatgtaaaattgtttttgttttttgaatctttaaataaacttgtataactatattatattctttaggaagcaaaatatcatcaagtgagttgagatgatttttctttcttttattttctttacatgttatcttttttatgaaaaatcattcattgttaaatatattgttggttattcttgaccaggtggtttttttgccatatattactatttttcttcttctcatagccaacagtaacaattactagttagtttaataagatacatattcatctatgtatattaaatcccaattgatcaaatcgactcattcaattctacacaattccaaacaagtgatatggattcagttgttttcatactataaattaacaaataaaatagtttttacaattcaagtacttaaatatattgtagatctttgatcataaaatatgaaataaaagatatatttaagtgtttgtatgccaacaaaattgattaacaaaacaaacttatataccctatggtagtttttaaatataatataagaatattttatagtaatccataaaattggtcgatattttagagtttagttaaaattaatatgatatttttgttttcgttatttttctgtgagacggttaaataaatatgtgcttctcacgtatcaaatcaaggtaagttgaaataatattataaatccctttcaaaaaaaataaataaaataatattataaattttagagataaaactataaaagagatggagagaggaaaaaaaaaatcacatcaagatatttatattgtaaataattactactatatcatgtataatttaatatactcacattttaatattaaataaattaaataaccactatttagaatttaataactatttttttacccatttatttgttgtatttacttcccatttttacatattgaatttatttccttattcaaaactatattttaaaaataaaaatttacacaaaatattatttttgttaaaaaatattacacttttacagtcaaatattttctttcatatttttaccgtagtctataaaaacaacacgaaaacaacaaaaaaataacatgaaaacaatattcaaacaacatcaaaacaacaataacataaaaataacatgaaaacattaaaagaccgtattttatgtaaataaaatcttaaaaataataaaaaatatttaaaattccgtacactattttttttttataattttttttttgttgtttgtgtatatttctgaaataattcctttaaaaaatgtgtataaattaaaaccccataaaatatggggtaagttgaaaaatacctcttttattaattaattaatcaaatttacctctaattttatatttatttgaaacatacctct

SEQ ID NO: 112200 - DNA, 2157 bp, Cannabis sativa
  modified_base (2105)..(2131): a, c, t, g, unknown or other
accagccagcaagctccatggaggtgaccgttaatgcagacgaaatactctaacccatcatcgtgcgagccaagccgacgagaggcgctcttggggatgagccgagctgtcttcatgctccacacgcgggacccacagtaaggacagcgaaccctctcctcgagcgccacttgtcgcctgagcaagcacgccctcgtcttcgatctcaagaatccctgaaatacccctctgtagatccccaaatcgtcctccttctcccccatcggatgctcacaagggtcgctcacgaacagcaaatcgctccggcaatccttcaccaagaaactgcgccccgacgttttcgagaaccgggaagccttcacgaagtgacccggagacgatttgctcactcggaattgccgagacgactcgcacccacagcaaaagaacatgagcttcgcgagtgtattccaacccccgcccatgcgcgtagccggcgcaccgttcgtcaatgtcgctaccatgcgcggagcgcgatacacacacagctcccgccatagatatcgctccgccaatgctctgagtttccgattcacagacgcagctgaagagatcgtttgaatatcccacttaatcgactcgaaaaccaacacgagtattcgctcgttgagtatccccgagtcactcgatgaatccgaaccctgactcagcgagttcggtctcaacctctggtttgcactcattgatgggttttttcaattacaagaatcaagaaagtgtttggtaaaagctcgtctctgaactggaagaagaagaagaagagtaaatgagattatattataaaacggcgcctacagtggagaccacagcgattgacacgtagcgtttattgtctgaatatctgccttaaagatgccaaggaacaagtacgtgtcagtttctgattggttaagtagacctataattgaatcaaaatgccgtaagagacaatcgaaatgtctcatataacatcagcggttggattattaaaattgggcaaacggcgccacgtgttgggatattatgctaagttacgaaaatatctaatttttgtgggccgaaatatctatggagattatacgtgtccaagtctacatgtaggtttctgaaacgactccactaggactgtctccttttccaaacattttaaggaaaaaagaaaaactttacgatgattctttagacacgtgtgtaaacctaaaactcccacgtttccctcttccaacgactttcaataaccgtttttcagtttattttttgggcattatctcaacagtatctttcttttaacagcgtgtactgtggagtggacctaataattcctaatcatggagttgttttttcttgagagataataaaggaatgtatatcttatcttttagaaatttaagtgaactaaatggactagtgtcatgtagatgagctataaatcgaccacaaaagaaaagtaattaaaaattcaacaacctagctaatgttgattatgtaaagcactaatcactcttacaagttacaacaagatcatagccaagtaaaaaagcacctcctaggttttctctctatgttttgcctattctaccgtcactactacaactgaggtatgtttcttctccggcctattagaaaagcaagaatagagatcttggagagaaggaagaagaaagaaaatggtgactaaaaaatactgctcagttgaaaatgcaagagcgagctaaacatatatttacaacaaagcttttacaactgaataacagactctttgtgagttgtcaaggtcaagttagttagaatcactactaacagtttgttccaaacttcctaactgtcttaaatcactttgtttagtatttccaatagtcccctcacgtgacacgggtgaatatcaagtgtcaacttgtccctgaagaaagtgaaggaggatataggtaaaggtttagtaaaaatgtctgcaacttggtactccgatagtaaagaaatttgtcaataatctgagttacttgagtttaatctgttgggaatattttaccaggatctagatttacttataagtatgtttcattgaaattaatatgaattctctaaaacannnnnnnnnnnnnnnnnnnnnnnnnnnaaatcttacattggttgcagcgaaat

SEQ ID NO: 112201 - DNA, 2100 bp, Cannabis sativa
tttgacacgtttttcaaaaaaaattatttgattagcaaagacaacactataattgacaaagcactgtaacgtgccttagcattagggcgttacaatacataaaagtgtagaaaaacaaaataaaaagaccaagttgcgtgacaaaatagataaccaacttttagtatgcaaccatctttataaagatgttatggatggattatagattatagatttctatcaaaatctcttacaaaaacatatatagactaaaccactattaaaattaaatttttaagaagaatgtaacaagtttaagtatttaaaaaaaaaataaatagaatttttacatcttgaactttttttttttttgatgaaaagcgtacttatataataatgaaacgtagtcagacctcgcggtcattataaaacaggtgttctgggataaaagaaatcgggatacaattgaacctctggtgggtaaacactcacttagccacattatgggtaataaaattacagttcctactaattttagaaaaatacaactaacaaaataaggagaggatttaatacaaaatgagacatagttctcaatctctcatcgggtaacttccctattgagagcattaatcactaccctcgaattattcttgacaataataaacttaagaccatgttgcttcgcgacatccaaagcaagatagcaagccgctgcttctccacataaagcatcaacaaattccagcttagaattatggatacagatcaccctacccagatgatcccttgctacgaccgcagaacacatgctgtctaaccccactttaacatcacaatttagcttcaaccaatcctgatggggagggcaccaggcatccaacgaacgtggaggtacacaagggaacaaagaagcatggtgaacagcaaaagaagaacaaatattgtcaatacacataataacatcaactagaccattcttatgtacctttccgtttcgagtctgccagatagtgtccacggttagcgaggcataaaggaacacctcatcggcattaatgcctttatttttaaggtcctaaatgaatttgacccagtcccataatcaaattccaacaccacatcttgaactctgacccttataaagttatgctctctgaatttttctatggtacaaatattttccttgaattaggtaaattgttgcaaatatcccccttcagttacattctactcaattttttaaaacaatttgtttatgtctctatgagttacatgtataattgtattcaaatagtctatttaataactttaagctacttgaaatctaatttattgatattaaacatacaaattgtagctctaagaatccacaaacatactttcataactcatcattaaactgttatttgtgcattttttttggagaattatcctatctattattttttattttttttttcaaatttactgtttgtgttgcttcagtagtttccatatgtgagttgctatgtggattttggttgagatttaagttgctttattgatcgctatatgaatttatgtaaaatgcgaaaaaaaaaactactttaaagtacaaaaataaaaaggtcctttattttttatttaaacttattacacagttacactagatagcagaatgcaactacatacaaatagatgtttacaataatttttagaattcaaggagaactttagcaattgagaaaaattaaggggtaaaactctaccattgtcaatagttttaaaaagaaataaatatttgaataagttaaaaaatatctttttttttatttattaatcaaaaatatttttatattggatttcattaaaatatacttattttttgagtggattgtcgaatataatttcactctccacttaagtctagcacataatttacatcaatttaagtataatttagacattatctataaaaataagtatattttaaaaaatataaaaataaatttaaatttaaatagataaaataaattgagcatacaatagaggaaattacgtagaatatgacattttttccttaaatttcatagatatggaaaaattagagatttacttaacttatggcttttttacaat

SEQ ID NO: 112202 - DNA, 2072 bp, Cannabis sativa
tattagaaattatcttaaaattagttatattaaaaaataaaattgttaattcaattattgatttgagaactaaattggagttgataaaggattcttgatttcctagttgatgcataagtttgaattgttgaaagtttgagttctttttcaactgtatagatgaacaagtatacacaaccttccacagcttttcagtaattgtaatgtgagaagagaaaaagagaatatttacccttctcttttattctattttgcttcatgtttctgttattttatattagatgacttgataagttaagagtagatgggttaattttctttttgcttagttgttatattctcattcagtttgtattaaatctattgcatatatcttttgacaggagattgagaaaaatatagccaagacataataaatattgaacttacatatctgttttgttatttgacattgatacatctacatctcatgtatgtgatttcttaattggttcttactgattgaataaatcaacaagttcaagtaaagattagatgcattttcacactattatcagtagctttcaagtactcaagtaccacactcatagtacagagaaaaaggagataaggaagttcaaacttcactagtgtgagtactcaggccaatgtcaaaaagatgtacataaatttataattttaacaatgcattttagaatcactataatgaaaccattcatgcatatatagctctatatacacacatgacatttaatcctcttttccttggctagccgttgaaaagggctaatgatttttcttgcctgccctttatctgtgttcctcaagatatcctttcacccctgaaaaaatatacataaattgaatatggatctctaaattttgtattacaacaattctctgttcaaagtaatcggtagatactaaagtttctaaaggtgtgagcttgtggttctcaagccaatcaagtggttcaacaattgcagaagtttgataaacccttttgattttgaagctataaggaaatgataagctatatttctctcaacataggccaacctttcttgacaatgtcaccgatcttggcgtctatctgtttctgaatgtttaaagggcagagttctgctgcataaccattcattttagttgccaaattggaaacttcaagctcctcttcaggcaagttcccaattagttggagaagaaacggatttcgcttcagttcaaacttctgcaagtttagtattttaaccgaacgattcagtcagtcattctcctaagtgacaaactatctcatgttaaaacagacagaattccaatgacacctaaccgaattcgataacaaatcaagttcagcaaaacaccatcatcatcaacaataacatacctgatgttcgggctctgcaggataaaatgtcccaagaggttgaatttgtgtcaaaactatatgaactttcgatctagcttgctctttctctttgctcagagcagccaatctggactcttcagttccatttgtgaaaataattgaccttaattacaaacaaaatcataagatttacaaaacaaaatcgaaaaataaaaacaccctcttctcattcattcatagtcatggattgtccttacctgtattgattacccacatcaggaccttgtccaaatgcttgcctagaatcatggctagaccaaaaaacttccaaaagttgtctgaatgtaatcaacttaggatcatactcaacctgcaagatccataaaactatataaagaaaaactcaagtttcaaaacatacatattctttatccaaatcaatatgattgaatcaagcaatatgaaatgacaccaacaatacaaaagtttgttcattctatcaatatgattgagataccattcactttcacctttgatcactcttcacctcgaagattttacctcttaaaacacatcaacagttcataaattcaaaatgaatcaaaataacttcctaaataataccattttgaattttgtattttgcaaaatttaacgattgcactcactattttgttaaatagtaaaataggacctatatttt

SEQ ID NO: 112203 - DNA, 6346 bp, Cannabis sativa
gattaggctattaccaaactgctcggggctgaacctctataaaattctcgtgtcttattattgctttattatatattcattacaacatatcttttatcgctcgcaaaaagactcattgttgttggttaaaagcaaagtccacactaataaatagtgtttctctacatgtagaaaagtactatttataagctaaaaatttaaactattttagctgacttgataaagcctcttttgaacaatatttcgttatatttttattttttgagctattttagctaataaaatgcgagtacttttaagtacctaaacaacatgttatgattggttaaaaaatttctatattatttatttaattaaggtgtataagattgatattaaattataggtgtgtgacctcttgtagtatttggtattttaagttgtcctttagcatttcaagaccgtttatcttatggtgcatggtgggagtgggaatgggagtgggaggtgagggttgggggctttataaacccttatcaaacgttataaacccttatcaaacgttacatgatactcatacaaccaaagtccttcttgcatgaccaataatcagctcccaacatattacacctcaaactactactaaataatagcaattataataaaacaactctaaaagttgtttgccttttttgaatggatagatattagataatggaaacttggaaagagacgacacataaagtagtcttaacaaaaagtaaagttcggctagagatcattataatcaatgagaaatgctaagcacaacggtgtatctgaaggtattcagtaccacaacaaatagtataataatatatccatattagtaaattttaatatcgagtcttatatattttaatttactatatataaaattattaactaattataaactattatattaatatgatattgaatactttaaaaaatcaaatatcaataatcataaccaaatggtttcataaatatgtgtcaaaaataaatatcctcattacattttttgcatagatttatgaaagtagaatttattcatttattaatatactatgcaaacgacgaagttgtattcaagaagctagtttctaagatagatggcatagttagagtttttttgtagggctgtgataaaggcaatcgtagcctgtatctaaaggcatgagataaactgtgcctcctgaaatccaaaggtgggctcggttttcgaaagaccacagaaatgaatcaggcgtttcttgctaaatgagggtgggctctactcaccaaagttgacttgttgtgctgcaaagtgttacatgcgaagtacctcaagggtaaacccttattgaaatgctcctataagaactctgactcctagttttggaagaatgtagtaaaatccaaggacttaattaagagaaatgcatgcaaactcattatggatgggaaagataccgatatttgggaggatccgtgggtgattcacggtcaaaatttctatcccaatctaaaaaatagtcgtcgtgagggttggaataaagttgcggatttacttactgaggatgggaactgggatgtatccaggcttaactccatgtttgaccaagtgaccaccaataatatccttaaaggatttaggtcgggggggacaaggcagtgataaatggatttggactttggattcaactggtcagttttcttcaaaatttgcctgtcttactctggccttagaaagagcaccgcctattttggtggtgcccacactttggaacaagctttggaactctacgatattggagcgccataaggttttatggtggagtatcctttcaagtgccttaccaatcaggtcggatcttgctagtagaattcacattgatgaggtttcttgccccctcatgcagagaggatgaggaaactatggagcatttgttcctctattgtagatttgcttcccacctctagaggtcttccccttggggcgtgatgcctatgctggagtctggagctcaaagattgagctttaatggtgtttttcatttaaagacttgtttttttatttctgttatgttggaattgttgtatggatgatatatatgtgtcatgtgaagtttgaaatgatttggataggtttcagtagacttttgagaggtgcgaaatttgggattctcgtttcttgcagaaaacagtcaaccattttggataaaacaactagtcgtttcttgccaggaaatccagggaaaacggttaatcatttcccaaaacaacacactatttctagtactgttttttaaccccgtttttcatattttcttgaggtttgaagtagtggtaccctagtgacctatagaagatccttgggaatgaatttttttgagatggaataggttagattgcttggttaattattcttttgttgttatgacatagggcccgggatcgttgatcattctccatatagatcagtcaacatacctaaaccgaaacttgaggtaaaaaaaagtatatttataccacatggcctgacaggttacgataattatagtaatgactcaattatgatcgagataaagaaatggtgattaccgttaaggtgaattaaaatcaggacatcatgtgaaattgttgttaggtttcttgattgtcgattatgtggttagataatggcaatgcgatatttgaatgccaggttatggcatgggcttgcctgattaggtaatacaatatgtgaatgcagattatggcatgggcttgtatgattaggcaatgtgatatgtgaatgcaaagttatggcatgggctggcctgattaagcaatatgatttatggatgccaggttgtggcatttgcctgattaggcaatgcgataaatggatatcaagttaaagcatcgacttgcctgattaggcaatgtgatggaataaaggtgattacttctcagtctaataaatatagttggtaatattatatagattggaatattattttttaattattttatgatgataaaatagataattaattatcatgtgtctttcccttattacttttcttgttgagtccttgtgactcacatgtgctctgtagtgcattaagggcaaggaaatgttagagaagccatgaggcgacggtcttctctggcgaatgtatatattgacccttctggctgtgtggctaagttgtcaagagttaacctgggttgtatctgttgtgtattttgactaactactgtatatagtccttttgtaaaacttttgtaacagggatctccaaaataaatttttagtgtcattacgttattaattactattgttttgttttagtaaagtttttaatattatcacagattttaatagttaattaatttattattactaaattagcttattaaatcacacacgtgacatccctataggttagggagttacaaggtcattactcactaactaaagggatcgaacctctataaaaatattgtgtctcttttactttcctgttctcattatgtacacgtagtgatattagtaataaatacgacttcgctgtcgattggccaaatctgagatcaacatttcttatctcattagcacaaagataaatcatataatacaataaaatcatatatcacagaaagttatttaaagtaatatatattcttttcaataatgactttttctctctaccatatttcattgtattccaaaaacgagtgatttgtcgtctctctttaccaatccaaagtttagagggagaaggattatgagagtgtatgccgttattcaaccataatcttccatccctgctgctatgaatccactcacagataaaatgaaaggcatcatgagccaatctaaagaagaaaaactaacagcaaccattgatgatgaagacgacgattagaatgtggcttctaatagaaacaatgtccttgttgctccaatacttaccgctaaatctgtctatctttctacactatagaagcaaataaaggatcgttggaattgtaggtaccacaccaagattactaaaaaaactacatgatatgtttgtactcatatttggttgtgaaggggataagtgtagggtactccttaaggactttcagtaccaccatattgtgttatacacgcaaatgctctggagaatgtctcgatggaaaatctcatttactcccctttttgggtccaatattataggcttctttttcttagtaagtctaaggcattggctaaagcacttggagatatcttaggtgaatttcttgaagtgcatgaaaattcacttcaagaaggttggggtcctttttcgagaattagagttaaattggatgtgacaaaacctttgttaaggggtcatatgatccaacttcaaaaagttagagatgaattatgggttgagttacgttatgaaaggctacctgaatggtgtatggaatgtggttgtcttggtcatctattttagaaatgtacagtgtggatggaaaaaatagataacggtattgaaccgaaattgccttttggcccagaattgaaaggctccgcccttcccacgactggctatgatagattcaaattaatttttccaaaggaaatgcttggccacttctcgcacatttggcccaaagtttgttaacaacaacagttccgctagtttcaaatagaggaatccattgcaacaacctctaatacaaggacaatcttcacaacactcatagtgtatgggtattggtgatttcgcataatctctcatcattctaccaataaatcttctcaagcttctcatggaaattccacttccaattcaataaatgcacactatgctaagggtgtttttgcaccagcaaaattaactaattttgctccaaaacttgtgggaattaagacaccaaaatcaacaaaaactttctcactaaccatcactgccactagataaaaaatttctgatttgtctagtattttcatacctgatcttggtcccttgccaaacataatagcaacatacccacccaatccaccatgtattttaatcattggaaactggttttgtgaattggcctactaatccacccattactgtctccactaaattaatcctaagtatgaccactgttctgaatgaaaaaaaaaaaaaaaaaagaaatcaggtcttctaatcgttacaataagagacttagtgaatgaacttctttaagaaagaccctcaaaagatgcaaaggccaacaacaacttttgttctcttctcctttgtatgttgaagatgaactgaactaggttgtttctaatactgaaatggattcatctggctcttgcaacaaagatgtggaggatagtttccaaccctgcaactcgccatgaaaatcgtcagttggtatgcgcgtggctcgggaaatcctaacgcattctaacaccttcatttacttgtaaaagagcaatctcttcatgtactatttattatccaaattaaactttattctaaagtaatatctcgttttcgtcaagctttaaattttaataatagacttgaagtccctcatgttggtttagggggaagttactccttttatggaaggatgatgtaaatgtaactcttctaaatttcaatgtaaatttttttgattgttatatggctttgggaaatagttctacttgacactttattgggttttatggggcatcagaaactcataaaagacaagaaacttggattgtattgaaaagattacgtgatgtggctccattgcagccatggatggtcattggcaattttaatgagatcctttccaatcaaaataaaataggtggaggtttaagaagtgaagtagaaatggataatttcaaaagcactcttgactattgctccttctcaaagtttccttttgaaggagatccttacacttgggtcaaaagcaagcattctacggatacaatcaaagagaggcttgattggtgtttcataaacaacagatggaattctttgtttaatcctatggtcacataacattttgattactaatatttggaccatcgtgccattagtgttcaagttgttccaatccactcagctccaaatctacagagaaagaaaacatgattcagatttgaaaattctagttaaatgatgtcgaagctactgctttcatcaagtagaattggacagtgcctagtttggattgggttgtggatcacttcgtgacaaatctacaagtttgtactaaatctctacaatgctggcatactcaaaagcatggaatatgaagtgttgcccctgaattcgcccaaaatacgtggactagtcgaattaggacacgtggatcagataacctgtaaacatttgataagtctttgtgcgcc

SEQ ID NO: 112204 - DNA, 2236 bp, Cannabis sativa
tctctctctctctctctcgggtgtgttgtgtgttttctcaatctcaatgtctcatgagtttagaatacactgtgatgaaacaattgtttttatctcgttaaatttaaaagctcactcttttcctgagtgttgaggctgatagatattggtgtgaagtcttcgacggggtctattactgaattggatggttattttatttatacaaaaagtagcaaggaaactttgataagcaacatgataaatctctatactaattagttaggattgtatcatgtattattgtgttgaggtaaatctctatactaattagttaggcaacaaataattttttaaaactgaatccacttccacagttttgatgcgactctgatatgaacctaaaaactaacaaaaacctctctaagtctagaacaaatcagcttggttgccactttataaataacattacaacaaccaatgcgacgaaactcactaacattttgagggcattttgttttcgggataagagtcacagtggtagtattgatcaatttaagaatcttactagaatgaaaaaaaagacagaacaaccatacataaatccttacccattatatcccatttttgtttgaaaaaagcactattatatccatctggacttagagctttttcatccagaattgataaaaaaaaacagctttgacttctgcttatgtatactctttaagcaagaattcagcttgataagtagacaccaaatttccaactcacttcacactactaaaaacaaccttcctattctcttgtttggttcctaataaaccaccgtagaagctttgaaacaccaacaacaccctcttaagtattaaaacgattactttgcaaatcccatatagaatatatagagacttgaagtcttctactacaaatactcttgtcaaacaactttatattatggtctcctcccttcaaccattcacatttcacttgcaaaaaccgaaccatatcctcataagcctgttgatatgcaaatctagccttaatctcctcatccataagaacaacattttcaagatcacgaattaacttttcctgaatatcaattaatgtcacaacttttaatctctccaatttactaacaagacaatacattagactcccttgcacaccctccacccaaatttcagcaaccaagttgtgaaaatctttatgggtactccaaaaattgaagtacctaaaaggcctccgaatcttctgaggagggaaataacatgcaattaagtatggacaatggttaaaatcgccttcaggaaagaaagtaaccccaatagtcttgtaagcatctaaccacccttctgaagcaagaactcgatcaattttttcataagctctagatctaccttcttgtttattattctatgcatgaatataatatcctcaaggccacactcttccacataatgttgaaaaggaaacatatcggaaccatcaccattgtacttcaacctatccccaattgataaattgcattacaatctcccataactagccatggatgactaatttccttctttatttgcatcaaatcaacccataggctttctctccctttggcatcattaaacgcataaatcacagtaacttcaaatttctcaccattcttagaatttacaatacagagtgatatcaaaactacatgatttccaaaaaatttctcaccatccattgactagcactgccatgcagagtgatatcaaaactacatgatttccaaaaaattatctgaccattaggatggtgcatcacattaaaagtgaaacaccacccttgaaacatattcaggtgtaaggcttccattttggaagccttaacccttgtcaataggagaattaatgttatttaataaaagaaatatgtattttacctataaatactagacattctcacattgggaggaggattcgaaatcggtatcaagcttcaacgctgccaaaacattgttgtaattctctaaagtgtttaggaaactcgattgactctggaccattcgatcttgagcactttttctcataaacaatttataaatttttggtgtcgttttattgatttctttgtttttactatgttatattattaaatttgttatcaatattaataattatgtggatgtccaaattgtaatcaacattcatcttttccttagtttccctttttcttagtttcttaatatctcactcttttatttgtataaataggg

SEQ ID NO: 112205 - DNA, 3104 bp, Cannabis sativa
acactatgaataatgttcttgacaggttctgattatcaacctttcccgccaagattatggctattataatctgcttgacatagaaaatgaagaacaaagttcagaacaaaaaaaaatatcatggtaagaaataacatactgaaatttgattctttgagttctttcttaacatactgaagatttacctggcatataagcattactattccgccactaataagtagaactctgcggccaaatctgtcaactactgtcatagacagcagtgttgatagaacaagaattgctccaattattactgaaggatacaagatagttttgtctttgtatcccatgttaaaaaacaagatggatgtgtaataaagcagagaatttatgcctgtgaggctccggaacataggcacgaggattgccaagaccagttgaggcctgttctttttccaaaaaatacttctaaaaggggttttaactgttttagcaagttcacttgcagaaaccatgtcttgaaactctgcctctacttgttcagttcctctgagtttctccaggacttttttccctttctctttcgatcctcggtgaattaagctgttgggtgtttcagtaaggaatattgctgccactatcatcaacaaggcaagtgctgtaaccaaaccaaaggagggaccatagttgtagaacaggtccacagcataccatggtttggtgaggtgtctatctgtatagttgtcaatgcttgctatcgaaattccaagggaaatcgctagctgaaacatgaaatttgagcctcctcggaaatgtgttggcgcaatctctgatagatacagcggaatggccttaacacaatcaagaaaacagactaaattagtttagtttggaataagatctcaatatgtatcatccaaagataataagaaaataagatacctgagctccaaagccaatgcctaatccgagggatatctggccaatgaaaaagataagaagatctggttttttggaggaggcaattaatagtgctgctgaaacacaaaaaatggctgcactgataattatactcttcttatgcccatattttcttgtaacaggagaagctatgaatgcagctactatgccagggagatatactattaataacagtccaaatgacattccagcaccatccttgcagtaagattcgaaactgcttttatctttgtatgagtaatcagagaacatttcatagtattctcctgtggttgcaaaccaacctgcatatataagaagaattgaatcaacttgatccattaatcatttatctttatgttgacattagagttaatattggttttaagattctaacaagctcctaggatattgtgctgcttctgtgttagatttcaatagatccatacgtacaactttacacaagagtgaatagttgtatagacttgatatgagcaaaattatgtgaatggtgtcaacccgtttcccacaatgatatcatatcagaatgatgtatataagtatatatatttaatttaatattatggtaagtttattattgaacaaatagaatttttcatccagaactattatcacatttaaatcatgtcatctaaattttccatcctcccaaactagtccccttatagagttttgccattcaattacatatggccaaaaggctacttaatggtatttttggagcttagggaagcgccacacatataattaaaaaaaattaaaaattatttattacataatttaaaaatatatatatttaactagaaaactgaattttgaattatacaaaactaaatcattttttagcaatatattttagagttttctttcaaaaaaatcattcaatatatatttttataaattgtattattcagaatttatttattttttaattattatttgttagattagacttttgtttaataaataatataaatatattttttctatcattttatttttaataataaattttgaatattttaaatttaataaatattagattagagttttgtttaaattaaataatataaatatttttttataattttattttcatttagttatattcgtggggctgaattaatactactactaagctctaaacaatgccacataggcagtttttcggccacatgggcaaaactcgggaaaatagttcaaaaggagagttttgcaaagaaaaagtttaggggtttaagatttgaagtggtaatagttaaagggggaaaagcatatatagtttttatagtttggatattatctaaattagtccgcatcataaatattttttatttcaaaaaatattatgtggccatatttcgtttgagtgatagaatagaattgcagatttagtaacatcagatatagaattacgaacaaaaatgttgatttgttaaaaaatgatgaaatgaaaaggtgtttatatatacctggaactgtgactgaacctagtattacgcctccaattgcagctataaggcaagttatgagaagatgaatagtgagtttccctttgtgtacttcttgttctgttctcatgttgttcaaaccagcttcaccacccatcttcagcttttggctgcttctttcttctaaacccataatatctgagtttatcatctctttcatttggataatgtataataatgtaaatgtaaatagaatgtgacttcattagtttatgataacagctatatttatatacttacatattacatgtgtgtcatccaagtttgaccagagaagaaaagtacgtgtggggacaagagaaatgtcaaatgtctatgtatgtgcctctaacaatctaataaacacggttttccggcaaattgtaggtatttcaaataggggggcaaaacaggttttgacactgcacaccaacacgacacgaattttatgagttagggtcgagaaaatttgacacggatcgaaaacaggtcgatacgacttgacacaaaatgaaaacaggtcaaacacgacacgagccgcttaacacaaatgtgacacgtttgacacgatttttttaaatataataaaataaaaattaataacaataatataattatataaaaaatatatatttagtgattcaatgt

SEQ ID NO: 112206 - DNA, 1352 bp, Cannabis sativa
taattatttaaatatctataaattattttcataattaaacataattaactgctaatgtccaaattaaactaagcggtctttacatcaagggttaaaggtccctatcagtaagaggggtgactgacgttgttgtcccatctacctgaggagaaggctccctcaacacattggtttggtttttccctccaataattgaaggtatttggtgtatcgcgggtaggccctctaggtttcggtgaactccacctgggtcatctctagtggttggtggtggagggtctatcctgttagcaatcaactagttattgtgtaggaaaaatttgatatcttataaacgtcgggaatgcgttggcatctttgaaggacaatggattactttgaaaaattgtatctttggacattgactttcccacagactatgccaaattatttttggtaagaattcttcaatgatgttgttggccaaattttctatgtatgaatgacaaaagattaggaggtaagtgaacttgcaaaagcttaagaataatttcagcgaaataatggtgaaaagatggatgttttattgatactcataagctagggttacacaaagtttccaaccaatttgaatgagagatgaagtcctaattattagtaagctttggtagctcatattacatgtggtcgccaaagggacaacctagtacttgtatcttcctcagctgcagaggtcagagtagtggttggaaggcaatatatacagtgtatcattggtcaggtatgtcaagttctccaggtaggtgttgatcccactacgtgtatagttcttttttctagaacatattaagagttatggatggacatatgaggatcaatccccacatggtagtcccaacatagtcttcctattatggtagtccccttactatttcccataaccatttattttttcctactcaaaccttcatatatttcttcggcaattactaagggttagaagtcactcatttgaatgagggtagccttcattctcataagattcatatcaatttactcatggaggtaaatcccaaggaaaccaagggaaccacatgaataaaattagttaggcgagtggtacaacaagaagtgcaaagacctctaggtgaccaggctcctagtggtgcagggcctagtggcgcaactcttgatggtgcagggcctgctgtcaccaatgcttggtggtcacagatttttgctctctttctgcttatttttggccttatgtctttccctgtcatgatgtgacagtcagtagtcccgtgatccataaggggaaataccaggtaagctgtacaatcccacaccgcctggggaaggtcaagtgggat

SEQ ID NO: 112207 - DNA, 1052 bp, Cannabis sativa
ttatttaaaatatcattttaatagaatgcactaccattttgataaaatgtctattctattttaaattagaaagaaaaatcattctaatctaacatgagaaaaaattcaataatttttttttcatgtattttaaattttattttattttatttcttttttattccaccaaactaaatgggatgaattctcatttttgtggtcttagttttcccacaatagtcatatttatgttgatgcttttcttttctatatgtattttgagtagagtattggtttgttgtcatagtcactatattcctcatgataggaatataaaagtggtctatttattagaattagcacgttcttctttaaattttatggattccctttacatggagtggatcaagatttgtcctttgcttattttgtgttatatttctttacctcttttgaaaaagttttggttaaatagtatttttaatacaaaatgatgtatgtttggtaaattttcttgttcttatttgtaccttgctagtatgtttggtacatttatgatcatgatattataaattgatattttactcgtttgtatagagactgtattttaaaaaatcaaaacttgtatattttatattcaatatacaatatattgtggaacaaaatgcatttcgtaaaataagagtaaaaagttacatttaaaaaaaataccatcttttgagcatatatatatatatatattaaagaataatattgtatacctatatacaaattaaattattctacaaacattataattaattttaactacacaattcacaattatttgattcacttttaaataaaaaaatagtgactaaatataatgtatacgaatttcatatgtatctagctagctagtataattatcccttaaaacaagaagttaatttgtaattaaatattgaaatatatatatttgtaattagaaaatagaggcttaatttcacaaatgcacaaaaacaacaaaaaaaaaaacaacaaaaatacgggttcacggaattttaaacatttttacgattttttttttattt

SEQ ID NO: 112208 - DNA, 740 bp, Cannabis sativa
ttgtaggcaaagagggtagaagaaagatcatagatatatatagatatatgaaggatatgtattaatattggttaaattttgtacttaatgaggcagctgaagttctggctggataccacccgaaacttaaaacaataatgaaaaaagaaaaaatagtacttagaggggccacgtgggtttccacgtgggaattgtgtggttagccaattagaagaggacaacaaaccaagtgagcctcccacctgatatgatgatcagtctcatggtctaatactccaaccagctgtgtttagtcacgtggggcatttacaaccaccatggaccacccaccactactcgtgaaaataaatataaataatttaggaaataagagctattacattacatatctttcttactaaacattccaccattttaaatgtgaataagaaaggaaaaacatgtactcatgaaacaaaagacaatataaaatacataaaattctacaatgtgcatagatccatttatatgtgttttggaatttggaaaaaaatttagtgtaattttattttatggtcatttatgttgtaggtatttaaaagatcaagttaggtttatttttatacaattttagaatctattttaatgtgtggtttttttttttttttttttttttttaattttttttttgggtttctaaaatcgttgcagtactagttgcaataggagtttctatacgattttttgttacaatttaagtt

SEQ ID NO: 112209 - DNA, 2331 bp, Cannabis sativa
  modified_base (2282)..(2282): a, c, t, g, unknown or other
tgtactattttagaaaatatagggtccattttgtcatttaacaaaacacagggttcaattggtaatttttgtaaaacagaaggtccaaaatagtatttaggcgagaaatattagtaatatatttggaaggaaagatgaataatccaatccaaccgtatagttgttaatttttcttactattattattttactttatgtacatttagaatgaatatgaatacttttatagaatgaatatgaatatgaattaagaaaaataatgttaggtttacacggtggactttgtgatcctttgcatcggacgattcagcgacttgccaaacattccagacttcccttcaaagaaaggacctgatgtctttcatggacaagtcattcattcaaaggattatgccgccatggatttcaaagctgctactgaatttgtcaaagccaagcaagttactgtcgtaggctttcagaaatctgctctcgacatagcaatggagtgttccactgtaaacggtattaagaaaacatttacaagaatctcaaactaaatcaacaagcaaaagatgattatgacaataatgatttcatttttatgtttacgtatatacaggggtggaaaatccttgcactgtgttatacagaacagaacactggaatattccagatttcactccatggggttttcctttagctaatttataccttaatcgcttctctgaattacttgttcataagcctggcgaaggctttttactgggtctcttagctaccttactgtctccaatggtaattattattttgttctttaattaattattaaaagtttctactcttactaaaataattatatcatacaaaatattagaaattggcattctcaaaatttgtggaaagtggcataaagcataaacttccattggagaagcatggaatggtacccaagcatagctttcatcaaggaataaatgcatgttcattggcatcagtgcctgaaaagttttatgacagagttgaagaagggagcattattttaaagaaagcacccactttcagtttctgcaaggaaggtattttgattgagagtgaaatcaatccaagaaaaactgatgtggtaatactggccactggatataagggtgaccaaaagcttaaagacatctttacttccccaacttttcaagactacattgttggagaccctagtgcaacattgcccctatataggtaataagtacaataaatacaacacaaattaattttcatttctctttttcttcaatatatttcttgatgaggattgttattcggcacaaggtaacgtgttaagattagttaaccatattgcctaaaagttattttcttaagttatatgggacccgatacttaattacattaatagcggtatgacactgaggagggtgcttagcaccagtgtgccttttaacaattttcatgtactcatttagttctattttattagggaatgcattcacccaaaaattccacagctagcagtgattggatactcagaaggtttgtcaaacttgttcacctcagagatgagatgtcgatggctatcagagcttttggacaggacttttaagctacctaatatcaaagaaatggaggaggatgtaggtaaatgggatgagtacatgaagcgttactctggtcagtactacaggagatcatgcgtagctgctatccaaatatggtacaatgaccaattgtgcaaggacatgggttggaaccctaaaagaaagaagggcatctttgcagaattatttgagccttatggaccaatggattatgtttcaccttaattaatgtcactcatcaccacccttgtcatttacaacttcttttgatcagtatcaccatgttattctcttttatgactcgttttcatactaaaaaaagaatgtaattgaaatacttatatttatgaaatttttatttaaagaataatgttttaaaatattttcatgtaatgataaccatagttagacatgtcaaaaaatccatttagttggagcgggttggagctctgatccgatggatcacctctgatccgaaacattcggatactattggatcttggatcagatctgctctgccccgcctaatttttttctagatcagatctgatcggacccgattgaaatttatttaaaaaaaaacttaattgaagactcagatcccttgggatccggacccagacctggtgataactctatgaaaatagagttatttatatctttttgagcattaaattagctttgttctgaagnatttttagtttattttagtgacttttatttggttttatttagttttgca

SEQ ID NO: 112210 - DNA, 4711 bp, Cannabis sativa
  modified_base (4638)..(4652): a, c, t, g, unknown or other
aattatactattttaattattactattttaattattaattcatattttaattattaattcaaatttaattattaattcaaataaaaattattaattcaaataaaaattattaattcaaataaaaaactttaattcaaataaaaaactaaaattcaaataaaaaactaaaatattaaataaaactaacactacgtggcttggcacgtaacaacacctagtatataatcaaatgcatatcataaatatataataaaataatatatcatatttttatttaataattaattaaataataaaataaaaatacttaaataacataaaattatttatgctaaataatattttaatcactaatttagtataaatattagttttctaaaatattgatataaatttttagtaatttaaaaagaacatatagtctttgttagagaagaatatatagtttattattatattgtttctcttataatcaaattagattattattattatttaatattattttaaatttttatagtttatgcatgataatttaaaattatacattttcacccattttaatgaataattttttgataaaaatctataaataaatttgaaataattaattcatttaaattcttattaaatttaagatttattaacaaaatcaaaattaaaaaaatgataaaaaaagatctcatttgtatagaattatttgtcccacctctatataggataaataattagagtgagaataatctcagaagttatctaaatttttagcatgcccaaatactattttatctaatccagtccaattttgcataccaaacaagtcctaactttattaaaaatgtgttatggtatcatcttactcgaagttaaaatggatttttacaccacgtactgaaatttctcattttttttttctttttactatgaggtagaatttttttaaaaaaatgctttcaaaaaaaagattttttttttaaaaacagtatattttttatattgtgcattgtgttaagtttttaatattgtttcgcagttgttttttagttgttctactgttgttttacaattattttataaaaaaaataatatttttataaaaatttcggtgtaaaagtaaaatcataaattttttactcaaaatctaataattttataaaaaattccgaatagcaataaaattataaattattgttcaaaatctaatattttcataaatttttttacgcgaggtgaaaattgtaaacttttactcaaaattcaatatttttgtaaaaataacttaaaattcttcgaaccaacatatgtagttgcctctctctctctatctctgtctcatcttcttagctcaatctccgagtaagtttcttcttaccttattgtttggtttggatgcaaagaaaataggaagatataatttaatgggtatttctaaataatggactcatctggttatttatattaatgctcaccattatttagttattcaattttgattatcatatcaaccttattgtttcaaatttttgtattcattgtaaatttgagtttcataaagcaattagtattagtggtgctctatttatgaatcaaaggaaaataaaggattatatacaataatatagaatgagatactctctttcattctcctttagaaaccagcataaactagtataggtattgagtcccttatttatgtgtgtataaatatttgtatgtataaaaaaataatgggcttttgttatctttgtgtgttggcatatttttctgtcattttgtttaattgggtgattaaatttcagttttgattattatattggattctgcctataaactgtttgatataatgcttgttagaacaaatttaaacctaccatgtctcttaacttgtgaatatagattatgttttggccattttggggtatttaaggatacatttttccttcagtttgtaacacagagagctgtagagagagccattgagagagcttttctgtagaaaaccttgtgaaaaagagagaacacattgttctgtcatttcctcagtgtgtatttagaggctcatatttcatactcatgttagacatttcattcaaatacaatcttggtggagtcaagaatcgcgctagccaacaaacagataggtttagaatgaattgggtaaacaggttcttccacaggtgcaatggtgctctctttagttgattgcatttagttcataggttatcttataatttttttgatttgaaatatatgtagctgcatttgtttactttttttctacgcataattaagaatttgaacgttcttagttttatatgatacctttagtgtacatgctcaagtttaacttaactcagttttatatgaggcttgaaattctcaaattatttctatatatggactccactatgattttgcttgtattctcttgtatatttgtatttcatatttggcacctcttaggattgagaataagataaaaatactgctagtattagatattttatttacttttatcatttctttttggaacttggaattggagaattcaattttttttccccaagtgaaacaagatatcaatattctggacctaaaacatatatgtgtgtagtgtagaacaataaaaataggttagattttctttgtttcatacatttaaccatttgtactgcgaccgcgttatttataattgaaacattacaatatgaatatgtgttaacaatgaatcatcgagattttgttctaatcttgatagaaatatttgaaatgcaagggccagggccaaagaaactttcataagttattttatgtgaatcccatttgtatggttttgagtttgggataattctacatcttagtgttgataaagtgttggtgacaaagaaaatctaagttatgttttagagaattcttaaagattttattatttgaaatatagtgattgattttctattgagaattgtaataatataatgatgttttagagaattcctaaagattttatttttggtatgtagaaaatgtctatgtgttttccatctaccccgaagaagatggcatcgacagtgggatgctttctcaccggtgctgcactttttgcttatggtcttcatctgtcttacgtaaatgttgctcctcaacaagcccgaacaaaagctcgaagtgattttgtaagagaacggcttaaaaagaaatatggcgaacattaaactcgttctcttttttgtttgttcagaataaatcatttgacatttgaatgctgttacttacaccctcaaaattcacccaaatgagcaggtgatgaaatgttgtagtatttatttattttttttgtttttgaggggaaaatgagatcaggaaagggtcatagtgctattgtctacttaatgagaattttgccaagttatgaacaactgtgtgaacttgggaaacattagggaaagaagataacacagtttggatacaatcaattagaccaccatagtcagaaatattgtcatttatggtgttactatgctgaaccagtttgagacaatcgatttcgatttggttgatgttaagttgctgcgcactgcatcattttagtgcttccaacaaggtccatgcttctgcaatctttggtttcacattcacagtgccttgatgaatatttgcaagccctgcaactacttccccattgttattcctcaccactgctccaagcctactaattttccttctcgctgatatggcaccatctacattaagctttaactgactcgagtttgatctgtgtgagtctgtgttgttggtacgtttgccatttgtcttctgagcttgctactagtggttgagatgtgttctttcttgaatggttaattaagatttttgcctttcgaactttaacatggattaaatcatgccttttaaacttgtaatactgttaaaaattttcactgaactattaagattgttggatttatgttcaattttagtgagaaaagtttaacatggatgaaagttcaggaagtatgatttggtatatgttaaaattcgagtggcatgatttagtagatattaaagtctggaagatgatttagtacatgggtcatcattgaattagtaaaattgaataaagttggataaaagtccttaaatctaaaaatatcactagtttaagaaaaaaatttaacgatcataattgttataatttaatacaagtcattatttaagaaataaaaatcttaattaacctccttaaaaaatgtcatttagtttctctcaaatactccttaagggaaaggaattcttgttgttatagatttttcatattccaacaaatgtttcaaattctaaaattgaacaatgaaaatttgatttaatttttacatatttatactctttatgatattaaatctgaaaaaactatcttactaatttctcttcttatttatgatctcatatatctttgataactatttattacaaattatgcaagaaaaaaaaaactggccattttgtttaaatatatttactttcataaatgaattgtggattatattcttactatttacttaagtctaacatttatttttttatatcgaatatgaataaagtaaaaactaaaataaagtaggaaaacttacaaaaatactnnnnnnnnnnnnnnnttttacaaaaatactgtcacactgaaatcttttcaagaatattgtgtttttataaaaca

SEQ ID NO: 112211 - DNA, 2644 bp, Cannabis sativa
  modified_base (1016)..(1019): a, c, t, g, unknown or other
  modified_base (2449)..(2467): a, c, t, g, unknown or other
ttaaaaaaaataaaagaatcgttaaaccaagaattaccgtcaaaccaagaattgccgttaaataggcacttttaatatataaagatatatctatatatgttaggatttgagggttctttttaaatatatcattattggttcaattcaatatatattgagttctacacattttaatttaataaataacatagaaaatcactaaacacttacaacacaactaatcgatagatctctagatactttaagatgtctaatagcaatgctacatcagttagaactaataacaaaaatttgtaattattatttacactataggagaatatcttgaaaaaaaaagttggaaaccaccaccatcatcaccaaaacagatatctaagaagtactcgaagtccagccctaattctgatcgtttgccaattcgaaaccctgatcaatcctgggtgattgattggtggtggaatttgaaaattattgaatagggttaaggatgtggcagtactagtcatgaagcacccaaaaacaaaaaatcaaaatcaaaaaaaggaaaaaatgaaaaaaagaaaataaagtaggtaaaataatggagaagaatcaaatcactacttaataataataataatgtatgtcgtcatgctcaacatcagccattcagatatgtaaggcatctttaataaaaacccttcttttgccctagctatagatcctttttctcttctttataaagatatttcattctctataaaaattactaaaataataaaaaagaagtcactttatatttatatatttgaataatttacgttataaatatttaattttaattttttactgtaataatatactataaaaaattatttttagttataacaaaatttatgactacttccctctcaaaaaaaaaaaaaaatttatgattacttataaaatatatgtgactaaaaataagtcttttggctaatattattagttacaaaaattataatatttattgtgactaaaattaaattagtaacaannnntatttaaatactatgttttagtcataaataattactttatttgttgtgacttaaagattatcactaaaataaaattttttatagtgatacttaagttataattctaggaacttctgtaggtacttgattataaaatgctatgtaaattttcatgtgacaattctctaattggtcgtcattaaaattttatttttttatttaaaaagtaatttgaatataccaataagtaataaattaacacgtcaataataaattgacacttaacgatcaaatatttaccgtaatatattaaaaataaaacttagtattattatgtaaaaaatatatatttataaatcttttaatttgtatatttgagtggcattaaatgaagaggcaaaaactgtgtgctgtatatatatggcaaaagaagaaatataatgacaattatttattcttttgtatacgtacaaacaacaacaaatagtatcattttattcattattaattactttttttaaaatatatatataattaaattatttattacgtacgtacgtactagaaatattttggcattaaaataaaagtacgtaagatagcataaatatatatagctttaattaattgttcatctacacttttagttaattatttatgttacttttgctaattttaaaagtactcaattattatttgtcattttaagcttattaaagcaactctataaatggtcccttttaattaatcgagttattaattataattaacgggtatatatactaacttaattaattaataaccattttattaaaaactacttaactgggcatttatggactattattagtaatttttgagaggttatggaagttatagaatcgagtacaaaagttcataaaacattgaaaaaaatacatgctgaaaaataaactgtctttttaagtttcaaaatttcaaaattaatttggtaacaagtttccagttaccaattttttagcattaacagttcaaaactttctacattaactttatatcatttatataaagaaataagtctccaacaactatttaatcaaatttaaatcctattagtaactcaatttattaattaaagagtaatgatatgaagatgagtaaacattgttaattaaacaagaaaattcctttttctaaaataaaataaaataaaacatttgctttttgatcatgtacgtatatttatggaaaagaccaaacaagctttcaatgaactgaaacaagtaatacatttattttggatcaaactaaataattaaacatataaagagtagtatgtatatataatttatactactcaaactagaaaaaaaggttcagtcttttcactacaaaccctcataaatggaaatagtactccagctcagtccttttcattttacatcatcatacaataataataataataatannnnnnnnnnnnnnnnnnntaataataataataatgaatgaatgaatgaatgaagttttattttttttttattatttaagatttttgtcctccatagtataacctatgtattattgtgttccttgaatttttcagcccgttaaaaatagtctctaaactatttatagtgttgtaaatattgggttttatgccctaa

SEQ ID NO: 112212 - DNA, 1800 bp, Cannabis sativa
  modified_base (38)..(38): a, c, t, g, unknown or other
  modified_base (1744)..(1744): a, c, t, g, unknown or other
aaaactaactaaaattaagcaaacaaacacattttcantactcttctcacaatacttttagtttaaaagcataaaaaataactctataccatactggtattttgaacttaggcaggagtaatgtgtatactgagaatgaagaccctctcgacctgtctagttttaggtctgacggccttgggctgagtaggccctttatcatgtctctaatttgatctaattgtgcttgcacaaatggatttgtacagtggacacttgttcgaatgccctttctaggtcgggttggagcccttagtcagttaaacctttgttggtcaagccttggttggctaagcctttgctacgtaattggccttcaccggccagtcctaggctaggcatagttttgttggttgttctccttggttggccaaagtagcttgtgtgtcaataagaggttaattgtaccaatttctagtttttagcgcatccactagcctgaaattattgtttatttgcagattaaagttactttgattctagctcctcgagttgaagttgtcctttgtgtttctcctcatcttaggacccagtctattaagaaaaggcctcataatgccctattccttaatattttagggaggagcatcactatgttggttggccagatgttggccgattggtgatgcttctactccaagaatgtttggctatccccgtacacctcttagtgtcagggactggctactcctatcatacgatctctttggcaagatttgagtgtgttcaggcaggggaaggtctgtcctcatgctcgagggggctagttggatagttttcccataggccctacttgaactattgatgagcctcccatgcaaaagatatcttattagatcttggccacttttagcagttctctcattgaaccgccttatcaggtcatcgacctccttgttatagcggtccagcttcacctgatgggcccagaggatagcctcctggtcgtccatccatcttaggaatttgtgtctctattggccaaaagcattgccaccaataacgcattgttcttctatttaagtgacatggcccacaatttctctgagccaagctagcttgatatcttttcctaggtccacatgaggctcactaatagatgatttgccaattcctagccctatttcacccacataatactcagtgatagtcctagttgtgctccatcgacttttttccatgttgataggacctttagttcgaggtcttgttggttgatctattttgggcagtaaaggctagtcattaggattcactgggctagcaggatcaacgagattcgtggtatttgttgggtttgcaggatttgcaggattctttgtaatggcattatgagttagatcagtgaggcttttcgttgtggtaggaactcaaacattgggattagccatcatatgttcttaaggaagacccgatgaaatgggggtagtggttctcctagttacacccatgataactgattaggatgataaacaatgatctcaatgaaagcactaaaatattgacctcagattttgtcaactgagaatagagccttatttatgactgacaatcaccacgtgtaaattgtaaaagcaaataataaaagtgacacaacaattgataaaggtttggccctattgtttagcggagaatgacctactccccttttagttgtattgattctaaagataataccatgcatgttatagtgagatttctctcncctagaaactcgagaccagacccccactaaaaggacacgtatactcagattttcca

SEQ ID NO: 112213 - DNA, 4703 bp, Cannabis sativa
tcgtttttctatcattttacttaatataaagtgatgtatggtgtatgtgattatggtgaaattaattcattgttaaaaaaatactatttaattacattagttttttgtatattcgactggtttgtagaatatttttccaaaattgtgctttgttatatcaaaacaagtacgggaatggagcagtaaattaagtttagtgaaggtatgaagaagtacaaacctgattttgtctacgattgtggtcttcatttcttaatgctagagttcaaatcccagcatagagagagatacattatatgtaactactacacaaaaccgtgcatttaggattctcggggtgacatcaaaaatttattgtcactagtgcacaagacattatttttgttgttaataaaagtgggtatataacgtgtccttttaagtcgtagttgggccctcgagtttagtattgtaatccgtgtggttagaagaagaggatgaagctaggcgtccctagtagtaacgtctgtacgcgcaagagggctcactaattatgaaacccattactttagccaaccaaattgaggaaaaggtttgacaagattccaggtgcaaagactatttacaatacatttcccaagggtcttagctctctaggaacagcatcaaagtttccagcatttacatctgattcaagcattggtcttttgccaattttccaaactatgccttccgcaaggtgttctttatttggtgtcagcatcacaaaatttggatcagctctttcgtagctgcgaaacacatgaaaatagtttagtgtaaggttaagccattcatatcagcaatgaatgataatatatggactagtgatcatgagtgcaaattcatgtatcctcctccctcagttgccgtcatatcaaatagactgggtaagagaaccctcagtgtttactcttgaaatgtatgaaatcattaaatgaacttgacgaggtagggaaattatgagcaaggaataagcctacctggcttccctgaggtgctcaacacgtaaaccaaaaccataagccgtgtttccaacagtgtggtctcttgtagctgcaagacaatgatctcaattgatacttgttgcagacttggatcaggacagcaactaattactttctttacgtcatagaacatcgaacaatatttatatgatataatcaatgtgttcttggagtgacttcaccatgttatctccgattttcacagcttaccatcaagctaatcatatacctagaattccttttattattttctgtgggaacaagaagaaaacaagagacaacatttccgctggatagtccttgatagtagcaatttcccagccattgctaatcaaccagtacaatataaagtcacctttaagagacttttttggcttgtagtgtgaattttgtacgtgagtatatctagatctatactaaaaaaacgtacctcttccttcctcgtctgtaagcatgtagagatttaaatattcaagagtgatttaaaatatgtacatcttttaccaacaagaggtacctgaaatactcaatgtgaaagaaggtttccaccatgatttgaatgcacatgtccctgatgaactgagaggacccacctttccctgcatacgtgaattttagatgtcagctgagcatgttatcatcgtgaacaaaagcatcagatctgaataaattaataataccttcagcaggaagtttttattggcttgccaagatgcaccaatttgaaaggtagaatcgtgcatcattgatgtttcttcaccgtcaatgcttcaaataggaaaagaaggcatgatataaagccaaacaaataaaggaaaaggatatcagaaggaacagaataccttgtctgcaattcaaaaccgaaatctatataatttgtaattccaacgacttcactttcttcaagagggttcttcacctgtttagttaaagcaatcaaagcttgttatattctagaattaataaagcaagacaataaggtggaagaatgataatgacacaaaatttaaaacaattatacataatataaagacaaaattgaaattaagataaaagtataatgagccatgaatcatcaagagagagagagaggaagagagatacccgtctttggactacaacgtgttgatagaatgatgcaataaactgcgaataaaatttaggcatgagacaccttgttcatctagttcatattcatcacagttcataagatttaatttcatttgaattaaccatccatgtgttagaatttagaaggcaaacaaaatatataaatatatatatgtataaagtagctcatcaaaggatagatttttcatgaaacccgatattggtaagcaatacaatcaaacagttgggaaaagggaatgctatgaataattcagaatatatagaacaaaacctgagaacttttagcaagttcaagacaaaaattgaatgatggacttagaggactgcctgatcccgctccatagcctatcgccccactccaattcttcaaatttcgatactttgcactatctttgcttccatctgagcaaaacatggggaagggtgggcatcaacaaatgtgaacaacaccatatatttatttatgttcaaaatgatatctaaatcctacaaatgcaaattgcagggctgagtttacacacctatgcccaacccaacagtgaacatagaatagcatcacacttcggacaggtaaaaacaataatataaagtttcagtcaaaatgacgcaaggcaacagataagaaatcttagctccaggaaccgcatcataaattagcctatatactttgaactagagttggaaaaagaaaaagaaaaaaaaaacttacagtcgggctcatactgcagtccagcaattacccttcccaccttactcacgagccatgcgctttttggaaattcatctctcactgcaaagtatgaaaattatgaagagttcagttcttaaggtaccaggtatgtttggatggaagtaaacaagcaaatggaaacaaaaattcaagggcattctagaagtaagaaagatggtagaactaagatagtatcactacaaaaccaagaccattactaaaggattaaacgtaaatgataaagaaactcataaatttgatttcaggtaacatacaggagaaaggcatgcatgtggctccaaaggagaagtttcttgaaccatatctcaatcccacaacaccatagtcttgggaagatactctacaatgaataggaacatttcatcaacatttaagttaacgtgtgcacactcaatctaaaccaaaataaaaatctcaaatttgcctaaaacaatcctgatatagctgcaccttttcctcatcagcaaagggaaaacgccaaatcctccaattccaagtttggggtcaaaaaagcatgatctcatttgcaaaaccctgatcgaaacaaaacattggagtatgtcaaaagatacagttttaagtgagactaaataaaccatttttcgacaaaagagcttcttacggatcagagctcgacacgtaaaggtcaacaaatgtatgagggtcatcaatatccctgcaaaaccaaaacaacaagaagaaaaaaaggatcataaagaacttgttctatacaattttaacgttcaaagagctacataacagaagcaattcatttgcaaaataactttacttgtacaataccgttgccagcggaaaaatgcattgccaacaatactcttctcaggtttgtgatccaacggacctgaaacctaaacccaatcaaggaaacaagaagaaaaaaggagtatccccgcattccaaatacaagaattaacatttagactttgtttacgaattcacaatggccatgaaaagaataggaatacagggaaattttcgctttctcatctatccattcacgtgtctatatatacatttatggaacaacaagaactaattcgaaacaacattaataataatcaaatgtaagatgtaaataaatggaagaaaaaggatacagtagcaaccaaatcgacatggggatcatcgattggctttagcattatcattgtcctgaaatgttgagcttcttcgaaataatcctcgaagaggcatttcaaagcaagcttcccaaataacaagttatacgacgactcaaccatcctgtaatacaaggaagcactaagttgagttcaaattgaacaaaagcatcaaaatcactgaaaatgtggatgaatgaggataagtcacctggtacgtgcagcgagaggaggaaaatcaaagagtggagggacgagcaccattggcggtggcggttccttgtcgaagaagttgcccattacagtcttgtatatatggctagggttttttaagggcgttgataagaagaagaagaaagtagcctaatcaatttcaattcctcgcctgctgaatcggctctcgctccctctcttggcctgagaaacgtgtcagtcgcggcaaccttctcacctttggacagaacaaaccaagcaatccggcgggattacgcattcctcacatatgggcttgggctattcttataaatacaaaatgggcttaagcaaagacaactttgaattacacatttacaattggggtaagttgaaaaatgcctcttttattcatcaattaatcaaatttatctctaattttatatttatttgaaacatacctct

SEQ ID NO: 112214 - DNA, 1137 bp, Cannabis sativa
atatatatatagatttttatttatttattttttaatttagcaattaaattattcataaaaattaaagtttctcatttattattggcaattaaattaaaatttaataatttaatatttttaaaattgatattttttaattattattttaagcagggtcggccttaaatataggcgggctagatccgtgcctacggcccattcatttcgggggtcaaaaataaaaaaataaaaaaaaattaattagatttttattaaaataaaattaagtatattataaacaataaataattatagttataacttacttataacatattatacaatgtcatgagtttgaaatctcgtaatactctttttaaatttttgctaatcctccagctctcacaatatattttggtcatatatagacataattattttgcataaaatataggggaaaggcttacaaatgctattagtactagctagattattataattattttacataaaaattatctagtatatttcttttttcttaaaacaaaattttaatgttggaaaaaacccgtaatgctacatgaaatgacattttggataaccctgtttgaaagatgaagataaagatatccattattacataattagtgggtcccagtcccacccaaaagatattacaacattattgaatattatgtccagttaatatttacatgttttattactttattcaatatgtttgaaaagtgtgaatgccttatataagatatgctttattttgtttagtttctaagtctaaaaaaagattcatttagaaaatgattggtaaaggtgttcgtgaattggatcactgcacaaatacaatctaattttttttggtctaatttggttgtggcttgtgattaaatgccactatgtatcatatgcttggcaatttgctattcagtacctgttcaaaaatacttaatgcaatacaaatgattcatataatttactattaatttatatatatagaatatttgaattgaaattcgacatgaacttaaactaattaacctatttttacatattttagttatagacatagtttagtggttctatatttttcctcacaaagaaaaaatctcaaattctcccaattgtcacaaaaaaaaaaaa

SEQ ID NO: 112215 - DNA, 6579 bp, Cannabis sativa
aaaaatttcttcatgtttttcaagtcaaacagaagctttgctattatcaataataaccacctcactatctgttcctgccatctattcaatctacgagtctttgggacagttggctaagattttgttagtcgctgggcgacacttttgtatatgaaatattttggtatgtttgtaaagcaaaatgggatcctagaattatataactttacatatatagtatttatttatcaaaggttcaagtttgttaattttttttttaattatgcactcaatgaaccctttgattagccaaggagtgcacggtaaattagaaaacacaatgacgtgcctaatttagtagggctttacaaagtccaaagccttcttagatgtgactgtgttcataggccttgcttctacaaatttggtgaagtagtcaacaacaacaatcacatacttaactcctctttttgcagctggaagagagccgaccagatcgattccccaaacgacgaagggccacagactactcataagagtgaactcagttgatggagctcttcacatttttagacatattcaatgcaatcttttttcgtggttggctataaatacccttgttggataattttattccacaaagtgggtcaagacgtgtggtctccgcaaaaatcttcatgaatctcatgaataactgcactaatttctcttccatctatgcactttaaatacgaaactaacaaccccctgcgatatagctgtccatctagaataacatacttggggagcttgatattgaatcttttaggcaccagccctgtcggatggaagctatccaaaattgtgaaattgataaatagggcctatccaataattagaatgatcaataacctttacccccaatacttcaatacttggtactttaaggtggaaatgggcactactccatattactaaatttctgaatctgttgctaattttgccaacatgtccacaatctcgggggacttggcggatgctatatattttaaaattttacagcagctctctagatcaagacatgtgagtggccaatttctcacccttggtttgatattctctggatatctaatttaccactagttggaagtcattttacacttcgatattttggggtcctacttccttttacaggcataggccagcaatcattgcttcttattttgctttgttgttggaggttggaaatttgaagtgaagggcgctttggtgttgatgtcctagcagggaattaagattattcccaatccaatacccatctcatttgatgcttcatcaacatggattttctagagctacagctcaagaattggctcgtctggattgtcgttcatttaatacaatccacaatgaaatctactagggcttaccccttgatggaaatcctgggttggtaatgaatattgaattggctaagctccatagcccattttaacagccttccaaatgactccagtttttgtaatgcctgacagtttgggtgattggttagtaccttaatggcatgggcctgaaagtatgaccgcagcttccttgaggtgattagtaagtaataggacaacttcccaataatgggatatctagactctatgcccaacagtcttttgcttacgcagtacaccagaagctggacctttctttcttctcgcactagggcatcacttatggcatgatttgacacgaccaagtacaggtacaacagttctccctcaaccatctttgataaaattagagctttagtcatatgctcctttaatatctgaaaggcctcttcacattccttagtctattcaaactttttgcttccgcatagaatgttgaaaaatggaatgcacttatctgtcgactaggagacaaatctattgagggttgggattcttccgttcagacattggatgtcctagtgtttcttgggagatggaatacctaggagggcttaaattttttatggattagcttttattcctcgagagctgacgatgaagcctaagaacttcaaaatctaaagatgcacttcttaggattaagcttcatgccatacttccaaatgacagtgaaggcttcttcctaatcaccggtatactctcttaaggttttagaatttaccatcatatcatccacatatactttcatgtctttcctaggacgtctttgaacattttgttggccaatctttgatatgttgctccaaagttctttagccctaatggcatgacaatgtaacagtacactcttttatccgtctagaagctagtgtagtcttaatctactacgtgcatcttgattcgcaagtaatgatgcagatgatgacgtagtcaccttagacgtctcaggtcttagaatctcaaatgccacaaatgatgtcgacacaaaaaatgtcacagatgccgcaaactatttagatgatatcgacaccacaagggtagcaatatgggcagcagacatcacagatattacagacacaacatggacaacatacatctcaaataatgttgacacaacacggacaacatacatcttatatgatgccaacaccacatgggcagtagacatctcagatgatgacgagttcgcagatgctgccagactatccacagatgtcagatattcgtagagagtgatgatgacgacactacaacaaatttcttttaatttttttttattttagttttataaactatcgattttatatttattgatgttttatgaatactcactttactcttgtagtaagtagtcttaatttaataatatggtaatatttgtgactcttaatatttaatatgaaaatatttaatttttttatttttaattaaatgactttatatattaattaattaaaatatgtaaataatataatctaatttaatttttattaaaaaaaaatcaaaatagatttataatttttttcttttaaaaccgagtctaacgacaaatccaaaatcaaaaccaagaattgatatcaatggagagaaatactttaatattagttaatcataataacaataatatatgatattgaatacaacaaatcatacacatatatgtcaacctttacaagtgtactttgtcttttcttatgtgcatatatagctaccattatatagcagtctgtttagacagaattttcttctacctgatgatatgactaactaataatattgttatctaataggtaacaaaatggatatagaaattaattaattttcaaaagagcctcacacatcttacaatgaattaagatgaccaaaaaaataccataagcttagataaagtaattttaccatgtcctccaaagattatagcctcatgaatcatgatagcaactatatatatttttctcttctcaatccattagggataatttttttctttttgtaaggtccattagagataatattattgcttattaaaatattatatgttggaatataaattgataatgagaaccaaaaaaggtcaacaagaagatcccaaagagaaattgtgaaaggattttaaatccaactgtaaaagtctcttgtaccatacatacacgtcaagatcgtcctcattgaaaatctagctataccttacgctaagcgctgcaacaagtttgctgctacttgtccatattatattattattattattttcaatttaaaataagtttgtagagaattggtaaatgtacattatattttctcacattatatattacacaatagtgaccgtttggcttttgtttttcttcatgcatgcgtggatcaaatcaaaatgcatgacagttgctaaaacaacagtagcactatacagcttaataagaaaactgtaatttgtaggatcagatcgatggacaatctaaaaacaacaaagtacaatgtagtatgactaaaaacaaataggaaaacttaacttcaagggttaatatattataaaatagtgatatgtgagagatgtgaccttttcagctaaccccttttcccctcttgtacaatattagtaatttagtagtagaacaagtatagtaataatactagtgtagtactttgtcaagtcctataactataatataatatatatatatagcattaaaataaagtttcttataatggagaaagcttataatacttatcatcatcaatataattatatgatgactacgatgaaatcatcatcatcttcatgggaagaaaaggcttttgcagaagagacggttgggggttgcatatggccaccaagatcttactcttgtagcttttgtatgagagagtttaggtcagctcaagctctaggaggccacatgaatatccatagaagagatagagctaggcttaagcaatgcctaaataatattagtccacccaacaaccctcatgatcatgatattattctagatcaacatcaatatctttcttctaaaccgtcgatgatcatgaccttagataaaccgtttcttttgccttgttttgaccgaaaagaagaagaagatgtagaaacagatttgtgtgtgggccatggcagcaggaacaacaaaccaataattaatagtactccccaactttttcgtgatgaagaagatgatgatgatgatcatagtaataataatatcgatacaacaatatccaaggctgctgctgatcatgatcttgtttctcctcttgaggttttcttcaagccctcttcttacattcatgatcattctcttcatcgccgatcgcaggtaattgaagtcaacgcttcatataattccaataataatatggatgatttggatcttgagcttaggcttggtcaccctcgtaaaatagtcaaatagttatatattgtgtatgcagtactttcgtactataaatatatatcatgattatgtggatatatatgttaaagattaacttcataattaatttactagttatatatagctagtaaatactgatcatatatatatttatctaatttcaactattgatgatcatgagaatgatatctaataatgtataacgatcatttttaagttctctataaacttttctatttctatatactgatgttatcatatttaatgatgaaattttattgtttatacataaattttgtttacattttctatatattaattaagatggcacaggtatatataattagtaggattattcttggtgggtccaaaagggtaatgtcattaatttggggatggtgtatggggaaaccatttgactgaatttgcagaagaaaaactcaaattctggtacacacaatagccataagtagcactcttcaactattcaactgccactttcttacgaatctctagacaaataatgtaatattggacagagtgaaagaatagaaagagagagaaagaaagaatttaagttacaggggctgtaggttttaaaggggtgagaaaaaatgacaaattactgatcttaaagtcatttctgctgcatatctgtcgcatcaatacgtgaaacccttttcaccacagtttcgtatatttaaaaaaattatatttatatcactaaaatatcaccattataaacatgattagatgaaactcttataacaaaaatagtttatactctaacttagtcggtagtaaaacatactaaattcaatattttaacgatacattttttttgttgaggtaataacgttttttcttttcagattgtttgtatgatggtgtttattagtcagaataattctttgttttttaatttatgttctagataatttactacgatagttatttttttgaaccggctatgatagtttgttatatatattgagcattttttttttaactttctataccagttgaagaaagaaaagcaaattgtttgaacgaacatatctttatgaaaaaatcagaaaataaaaatatatattttggatgcttcaattaaaggtgtatttggatttaaaaaaaaaatgtgtatcgtattgataaaatattttgtgccacctccatgtatgcattatgggtacaaaatgagttttgtactaattaccaggattcacattatatgaagacgatgaaattaaaatttaaaagcatcaatttatcaattacttgatccattattactaattaccggttctcttcatatgataatatatgataatacgtttatttattatttttttttatttaagcgtttatatagtataattatgttttacctgagactcgaacataaaacacacacccacttatggccacgagccagcatcaagtggttcacatgataatacgtttaagtatctgttgttatttatgtgtacaagtgcacgttttaattcaaaaataaacaaatttatttttgttccttctcttcttctccaccaacaaccacggaatctaatttattcaattgtttcataaataatcaaattatggagacaaaaaggtaatcaacaaaactcacatcttggaattattagggttagatgtctacatttttgttttttcatttggtatctttatatattaaaatgtctatctaacgacatttcttggttaacagaatatacttaaaaatatgaatattctgttaaatttaacgattaggtttg

SEQ ID NO: 112216 - DNA, 1679 bp, Cannabis sativa
agaggttattcttatttataactggcccaaattggaacttaattttttttaacaaattagaggttattcttgaatagtgtattcttaaatagagattctagtgtaactcttaattacatgataaatatacaaatatttcccttttaacttgtttaagctgacattaaaaaacccgaacttaatagcagttttgatatccctactaccacaaaaatgagtattgcaacagaaattaaaaatacttcagtttctattcagccacaaaaaaataaatgacagcaaccataactgagttcaaaatttgatcctgcaagttgtcaagtggatccgaatgccagtcaaatttcttaactattcaaatattaaaaatactagcaaaaaataatgaattgatacatttagtgtatcattgatgcatgcaaaataatataatcatacttattataagttttatagaaccgagtgattctcatgctaagtattcatatgatattgtatagaatggttgattctgttttagctattgattttttattttaattaatttttttcttaaataaaattattttaaatttttgaattaatctaaattatttatattttaaaattaatttttaaagaaatgttaggtgttttaaaatcaataatttccaatagaatgctaaaaaaatattttattactatgttttagcatgcttaaaaacaccatttcaataattcgattctccttttagattataaagtattagttgatggtatttctcctaataaagctccatgctacaagagaagtatttatctatttatggatcagctggattctttgattgatgcccgtgtggtatggattcgtaggactcttaacttttctgctcatgctcttgcggcgtggactgctgctcattctttttttgttttttcattccctggggaggtggaacctcttgtttccacttaagactttgtcttttggtttggccttgctttgtttaggaattcgttgaaaaatatcatttttttatattcattaatcaaaaatactttcatattatattttattaaaatatacttacttttaggaataggttgcccaatataccccaactatttacttaagtctagcatatgatttacattaacttaaggaatctaatagagatatcatctataaaagtgagtatatcttaaagaatatgaaaatggagataaaaattaaaataaataaaataaaatggatatacaatgtaatttcctctttgggataagttgaaaactatcactttttattacacattaactaaatataactccaaaataattttaattgataagtactctcttttataatcaaagtacaaaatataacctcatataatttatcaaaattagagttcttaatccacataatgagaatatgaccaataaaacggtatataaattaaagagttataaaataaagataaaaattaaaataagaaataaaaagtgactatacaatgtaattttctctttataaatttcttttatttttttgtgcaaaatttaatagaaattttaaatagagattattccacaaatacacataaattatataaaaaaaaattacaaaattacagttgtacgaaattttaaatatttttataattttatttacagaatcataacaggattaagatcat

SEQ ID NO: 112217 - DNA, 8078 bp, Cannabis sativa
tttatttgtctatataaaacaaacctttattacaattaattcagaaaaaaaaaatagaaaataatagaaaacaaatattattatgaaaacagtaaaggacaggattgccaattcaccaacatggtataaaattgtgcacagctccacctgtacattgtcacgcaaaatcgcagctattcctctcttcttctctctaaatttcatggtcttctcatcttctcagacctcttcctactgtgaatgtgaaacccttcttcctgcattgtcatgggtttgaagggagtcgcccagaaaggcaagggcgtcgccgataagggcaaggccgttgccgataaagcttctccagtcggaaagcggaagcgcagcgacgacgggaagaagtccggtcgtcttaggagtaacccggaagtcttaaggttttttgaagattccgctgacgcctccgatgatagtgattcgagcgatatcagtgactacttcaaaggtgagagcagaaaccccttgtgtcttaagattttggttctttttctttccccccccttttttttctttttgatttttaaaggattcgaggttgattttgacatattgaagattgaaatggtcacaccctgctttcgtcgcatttcattgtttaaattgtctagggttttggttttcattttcggttttgatcgtacaggcgactttttgcatgaaattgtatggtgttttgtatccgttatatgtgcttgttctgcgaagctgtgtaaattttacttgatgattgaaacatttgaaagctagatagggagtgtttgatcgtgagtcgtgtccgttgggttttgtagacaatgtgggtgtgtgtgtgtgttcacctggattgtttgaaatgtttaaatttcaatcatttgtgagatactattcaaaaacatattttttaatccgaaaattgataaatatgttgttgtgttaacgatcagcttgacagtatgagctaattgttctcactagtgaaactatgtaaaagctgatgctgaaatttaaaccaatggttgcagattttatggaagaggattttggactgggagaaaatgttgatactgaagcaggaaaatcctcaagtattccatttattcctaaagaagaggagatggatgaagaagaatttggtagaatgatgggagatggatataacgatgtctctcaatctgcttcctatgctgaaggtgatcatgagaacaaaagatcaacagacagaagttcgcgtatgccttttgatgatgatgcagttatctggaaagtcaaatgttcggtatgatttttggtttatggatcacagttttgttatgaattatattcacctctctctttctctctcatactaattttcacttttcttgtaggttggacgtgagaggtttttatctttctgtttgatgcagaagtttgttgacttgaaagcattaggaaagaaaatgcagataatatctgcatttgctcttgatcatgtgaaaggatttttgtttatagaatctgacaagcaaaataatgttaatgaggtactcttgtcctctcttttacgctctattttagttaaggtggctgttattttcagctgacttgggcttcccgcccgtcttggtttaattctaggcatgttatggtctaactggtatatatgcttcgagagcaatgccagttcctaagaatgaaatttctcgcctgttctctattcggcctccaaagaatgagatttcaacgggcatgtgggtccgtttaaagaatggaaaatataagggtgacctggctcaggtatgattgactctagacttagcagtcattgattgtgatactttttcctccctctatatttttattttttctaaaagctaatattggcgttgcaggttgtgcatgtgagtaatccgcctagaaaagcagtggtgaagctgataccaagaatagatctacaagcgatggctgaaaaatatgtactccaatgatctaaattgcttcttcccttctcgtgtgtgtgtgtgtggtttgtttttattttaattctgttgtagatgtgcgtgttttgttgtctcttagtaagaaattttctgtggaatttctgtttaatactctagctgcaatctgtttctttagttaggagaaccagggttggtggaacctttgagtagatctagcgaatggttttataatatatattaggctgcttagttcaagcctggctccagtgttttttagattttagatgcgcttgggttccctatttagtgatgtagagtagatattttgtgttagtaggaaatgtgtttttcttcttacgagaaaatgctttttattgcttgtcgaatggggatttatgacttcatagcctttttgttcgtgttttgcaagacttttcttttccttttatttttggtctgtgtatctgttggttgcatttctcaatttagataatagcgttttttttttttcaaattagttcttagcttcaagagttcggaaaatgaacagagctagtgtactatttacttgtagttcttatataatgtaccttgtcagtgccactactacaaatttaagattcagtttaactatcgtgtctgtggttgaagtttaaaaattatttatgttagtatttatggatgttcccaatcaagctacttcataaaatgtgactaagaaagttaatcgagttgccagcatattttttagtgaagggtgccattgggattgtaatggtgcataggtggaaggatgaaagttaaagtgccctaagcccaatttcttaggatatttgcttacctttaccaaatctgatttctgctttaattgtcattaatgtccttacactaattactggggataatgtattatgaatcacagtaatgattttttaagtccttgtgtatatgtgtttttagtatgtgaaatttggtttttaatattggaaggtataggttatgccgcccattgttggataattaaaacgaatatcttctgttttgtctattgttaatttgaatgctcacaattcattttgaagttgtcatctcaagtttgaattgtttcgtttggaaatattgttggcatgattagatttccctattacttgcgtgttagggtggaggagctactgccaagagagtatccaatccagcaccgcgattaatcaattcaagtgaacttgagtaatttatttaatcccttcctctgtatttttatgattcttagtttcatttgcatttttagtttctgaaataatttttatttattaaatctgtttagagagttcttacctctcattcaaaccaagaaagatcgtgatactgggatgattgttcaagttcttgatggcatgatgatcaaggatgggtatttattcaaaaaagtagccatagattccataagctgcttcggtgttgttccatcagaagaggaggtgatgaagtttagcacttctaagaacaatgaacctgacaatgcggagtggctttcacagctctatggtgaacagaagaaaaaacgttccattagaaatgatccattgcgcgacagagtgagctcagggtcagttgcaggtggtaaaggggagagctcagggtcagttgcaggtggtaaaggtgagttctcaggatcagttgcaggtggaaaaggagagagctcagggtcatttgcaggtggaaaaggagagggctcagggtcaattgcaggtggaaaaggagagtgctcagagtcaatctccatgaatagttttgaagtgcatgatcttgtgtgtgttgggtgagtagtatataatagcttgttgaagagcaatctttcagttatgaactgctcatgtacaatctgatttttaaaatatttaatgctgttaaaatttatttttatatttgttgttgactttcttatggttgctattctatataatgttgcagccgcagagactttggggttatcataggtgtagagaaagatgatagttataaggtacatagtttagttaatacattcatatttctttattatggtgactgacattctgttcaacacttcagatactgaaagagggtagagaaggacccatggtggtaactgttcaacaaagtgagttaaagaatgagccatcggatatgaaatttactgctttagatcaccgcatgaagacgattggtgtaactgatactgtgaaggttatggaagggccattggaggtttgacattttatttaagatcttgccatctaaatgtagttgacttgggaaacgtgcttgttaaaaggtgcctggaagattttacaactctttcttttacttttttagggcaagcagggaattgttaagaaaatttatagggggattgtgtttatgtatgatgagaatgaaacagaaaattgtggttatttctgctgcaaatctcgtatttgtgagagagtgaagcacactcctcctaccacttgcaatgaaaaggttggaatccctttcttatcatgcatgctttgttgtatgcaatttagtgtacgcattgtgataatattctcatgattcagggtggcgagtctagtttcccttcttttgatgatttcccatcatcccccaagtcccctctatcccctaagaagcaatggcaatcaagagacgacaaccgtaattgtatgtgtgcccttgcttgattttgtaattgaagttctcaagttatagcttctgactagcaagacttttgctttatcactgattggtttcttgaatgcagttaatcagaccgataaggatggtatattcaatattggtcaaactttgagaatccgcattggtccattaaaggggtatctttgccgtgtcattgcaatacgtcgttctgatgtcacagtcaagcttaactctaagcagaaaattcttacaggtttttcaaaccttgtttattattgatatttgtgtcctgttgttactaagttggttttagtttgttttttctgttagtatattatattcttcagttatatggttaactcttcagattgttatatttgcagttaaaagtgagcatctttctgaggttcgtgggagcagctctgttgttctgaggtaatcttcataatcaatatctgtttgtacaagtatgattgtcattcttaacatgtgcttactgttctgatgttctcgtgtctctctttaaagtgaggatccagaatctagtttcctgaaaccttttgatctgttaggaggcgaaggattatcttcaggtgagagtctgtctccttttctactctttctttgtttgtatagccaataaattcatatttgtgtttttcttttttccctttcaataatttttatttttgtgttgatccttgatggagtttgacttgaagaattttgatttgttttgtttctttgtttgtatggttaataacttcatatatgtgcttttcttttttcccttttcaataatttttttttgtgttgatctttgatggagtttgactgaagaattttgatgttttttgtttccttcgaagactgggcgggtggtgcagggacatcaggagcaggtgatgggtggacttctggtggaggggctagtgaaaggtagcaatttgtcctatttgttcattctgattcagtttgtaataattttatatgaggtagtgattgtcgatgaatcatcttgttttggtgaactttggtcatttaggactttttttggttttaatcatgttacaaatctcaaaggtatagtaacatttaaaaaaattggattttgaatgggcatatattcctttcgagctgggatgattgtttagaagcagaactattagtttgaaaaggggggaatatttaatgtaaaagaatctcaattatatgtggttctcattgatcgttcagtggcgtggctcactgtgtagctgcatggttttataacttttgaatattattgattaatagctgttgttataaatatttatttgttactatttatatgaattaatttaatttgatgcagtttttgttgtagtagaaacaagaaagagtgaatatgaaaatagaaaatccaatgcattcctagccattaatttgtttataattgtagctttgccttttatgctcttttgcttttgtaatgtgccactgtctaatttaatgttccgctgatgtttgtaggagttcttggactaatttatctactccaggctcttcttcggtttgctcttaacttgttctgctgtttcattctctttgtgggtatggtgcgcatgttgggacatttgctgataatcaacctttttaacatgcagatgcagtgggaatctggcagtgcaaacgatgctggtgctgataacaatgctaataaaggtatcaagggaaatacatttacttatcccagtcttatgacttatggaaagttttgtaatagcatacaaatttacaggcgtggaagatgcttgggggaagaaagtgacttctgagacaagtgttgcttggggtgctcaggcagctgacaaagatggtgctgaaaatgaagctaatgaaggtatcaagggaaaaacatttcattataccaatcttgtgagttatggaaaattttgtaatagcatactactttacagatgtgggaggtgcttggggtagcaaagtgacttcaaagacaaatattgcttggggtgcccaggcagctgacaaagttggtgctgaaaatgatgctaataaaggtatgtagggaaaaaaattacttggactaatcttgtgaattattgcaaattttttaacagcatattcctttgcagatgtggaagatgcttgggggagtaaagcgacttcaaagacaaatgatgcttggggtgctcaggcagctgacaaagttgatggttgttgggggaaaaaagacaatgataaagctcttgattcctcaaatggtgcttctgcttcctgggagaagaacattaatgtgcatgacaatcaggatagtggaaaagctgtggaagaaccctggggtaaagggaagaatatttctgaaaattcagctgggagttggggggctgcaactactaaaaagaatcaattagattcttggggcaacagtaaaagtgtggctgatgacaaagtctctgacgattcatcttcttggggtaacaaggcttcttttctagataagaaaaacagtggaaaatttggttccagcgacaatgatgacagccgagatgcaaagaaaagtggttggaattctggatctggtgaagagtctgtttggggaaaaaagaccaatttgaattcagaatctgggggtaacaatgaaaatcaagactctgtgtggggcaagaaaagcagttggaatgcggaatctggtggtgtaagtggaaatcaagattctggttggggcaagaagagtgaaaacagtgataatcagggcatgaagagtgacaacagtaataatcaagactctgtgtggggcaaaaaaaatagttggaatgcggaatctggtggtgtaagtggaaatcaagattctggttggggaaagaagagtgaaaacagtgttaatcaagactctgtgtggggcaaaaaaagtagttggaatgcggaatctggtggtgtaagtggaaatcaagattctggttggggaaagaagagtgaaaatagtgataatcagggcatgaagagtgaaaacagtgataatcaagactctgtgtggggcaaaaagagtagttggaatgcggaatctggtggtgtaagtggaaatcaagattctggttggggaaagaagagtgacaacagtgataatatgtggggcaagaaaagtagttggaatgctgaatctggtggtgtaagtggaaatcaagatactgcttggggcaagaagagtgactggaactcagaatctagtggaactaattggagctcaggaagtggttttaaggaaaaccagtcagattttggggatgatagtaagcgtagtggtggaaactggagaggagggtttggaggtagaagcggagatagaggaggctacaggggtagaggtggagacagaggaggctacaggggtagaggtggagacagaggaggctatggtggtagaggtggagacagagg

SEQ ID NO: 112218 - DNA, 4319 bp, Cannabis sativa
  modified_base (4124)..(4124): a, c, t, g, unknown or other
aaagggaatgttgattacattaatggtaataaataaaagatttggacatccacataattaatactatttataacattcttgttattttcgtgttgtttttaaataaaaatatatttaaacgtaaaaatgtaattattttttataaaagataatgtcttaagtaattattccttaattaatcgcaaatttattatatagtcagttccaaaagaaaaaatcttactacttgcaattgttttgcatgatttgttcttcgagctctacttctcatttacccttgttcctattctaccgttccaaacaagatcatatgttaataagtgtttcacgtgctaattcgatttatatttttttggactttaaaaatataggtcgtgtcgtatcgagctataagaaaatatggaccatattgtactgtactataaaaaattatgaattatgttgtactgtgcaataattttatatggtaggcctggtacaacctacaagttcagtaatttcgtgtcgtgctcgaaatcgtgtcgtatttcattcaggtcggctcatttttcttacacagaccaacttattttttttatacgacacaaattcgtgctttatatttttgtatttttattacaattaatgagctaaatactaaaatatatgtatattttataggtttaattatttttatatattctttgattaatagttacacacaatcatataaaaagtaattataattattataatttcgtctttcgtttctttattatttatttcgagaaatatatcgatcaattccgattctttatttttctattgattctttttcgatcgagatgtatggtatcatgggtctatgtgtctattattgataaataaatatttcttattgttatcattattaaattattggactttttaatgtgttatgctttcgagttaatttatttgtatttacgtgttgtattttcagacttatcgtgtcatgtttaaatctatattttttcggatcatgtcgtgtcatgcctaaacacatatttttttgtgttgagttgtattcatacctctcagacttgtgttgattttgtgtcgtattaaaaaattcaactcatatttacaacaatacatataactttgtgtcagtcacacctttttataaccatagggccatgcttctggactattaacctagttgtatatcaacttgtagggtgaatactaatggaaggtttgtgtagatttttcatctcaaagaataaatgatgtcaccttatcaaatgttatatggatatttttataatttatgttagaatttaagattatatggttaagaaagttaaaaaagaatgggaaggataaaatatataagattacatctcaaaatcaatttataaaaagagaagtagggcatatatatcttatatactctattatatttttacacattaacaatgtgactatttttttttaaagaacattacataaatttatttttttgtaaaaattttatacttttatgtttaatttttttgttcttagaaaaacaaaatcaaaacaatataaaaaataatatacaaataaaaaataataataaatatacaacataaaaatacattaaaagaccgtattttattttctgtaaaaaaaaagtcttaaaaattgtaaaaatgtttaaaattctatataactgtactttttgtaattttttttgttgtttttgtgtatttatgaaattatccttttttaatcagttttttgattttttgtggcttttttttagattaggttttttaaaaattttgttaacctgcgaaaacctttccttaatgtagacatcaatgtttgacatgtggcaagaaggatgacgtcacagagttgagtagacccgagtcatagtagtcgacctagaaggggaccctagccctgcgcccaagttgacttcgggagtttcgagatgaaagttcagactttaataacttgaatccaactcactatctcttagtcaataccatgaagatatggaacaatcaaatccatgtcttgggagctgaaattacatgaacctgcactctgaaagctaacctgggtacctaggttttcacccagtgcccaagttgacattccaaaccaagatttcagttttcgggactatcttagtgcaaatgggtcaaaatttacattgagacatcaactatacataccacatacatatttaaggcatcacaatcaaattcagagcaagtttattttttagcacccggagcaccctatgcacggcacccaacgctcaggttgacaattcgtcaatatggatgccttccaagtatcacattaacgatctgaattttgcatcttcttcttcgtcataaaaaataggaaaatatgtactttctgggaagaaacaacactttatgggtgccaaaagcaaggcccagtgcccaggttgacattttttcaacttgggccaattcgatcatgtgttctgagaactcttccaagcatcttctctattttcaacaaatattaagattcaactatttctagggaccaaacataactttcgaagggccaaaagggagacccaactcccaggttgacacttggcactaggcccatgtcaacttgggccatttccaaccaagttctcaaaaacttgttccaggctttttttcataatcgaaaataatgaagattcaagcaaactcggggagaaacccataaactcgagaccctagaaatagggcccagtggccagttgacctaatgttggacccagtgcccaagttgacaatcaacttggtgcgttggtttcaatcactcaaatatcaaatctaatttgaccattgaatatggaatggtcaaaatttttttggagacctcgtcctcaagttcaagaaccttggaaatatcaaaatgacatcttgggaactcaaaaatgaatacccagtgcctaggttgacaaatggcctggtacgctgggttctacttatccgaatctgattccattttgaccgtccgtcttattttttacaataactaagatgcattaagtcagaggagagaagtcaaattcacaacttcgcatttctaatttttaacatgggaaactcactcgaaaatgaagagtttcgagtctctcatttccgctgaacaaaaacatctctgagaacttgtgaccatcctcgccagaatacataaacagaataagtgatgtcaaaatatcacttaggtatcttaaagtacatcccttggatgtttttgcacttattctgcgtccaggttgacgtcatatgtcaacttgggcgttaggttgtgaagtaccttcaatgaaacagccatagctcactcaatattgatcttatcgaagcgattcaacttgtgttttgaagctatttcaatgctctatcaagtcatgtctcacacttcaatcgcaattttaaagttatcgacttcaaggtttaccctaatggagttacgaaaataaactccaagttacctgcgatgggtcccgtcgggctccgaaaaatggctatcactatcaaaagttgattttcaccgttagatcatcatctacgttcaaaaatgtctactttgtatttttttttcctatttttgtggatctccttcacctacaaagagagagctctattagctcattttttatattgagaaaattactcacaaggttagagcttctctctctagtttttctctctagaaattggagctttgacacttagcctatttctctaataccatttctgagaaataaaaactcaaagtaaacgtagcttcattactatcatgatacaaggagtgaactactatagatttgtggcatctgtcttataattacttaacaactatttcattcccgctaatctagtgagcgagtgtgacctaaaaggctagcctaaatttttcagtcaacgaaatcattaatctttgtaagtcgtcatacgtgatgatgttagaaattacatgtgcctaataacaatgccttctaaatgtgatggatggagacactaccctaattagacaagattgacaagttgctggatactaaaatatatatatatatttttttagtaattttttaaaataccacacatatttttaaaaatatattttttttnaaaaaaaaaaaaaaattgagctcataaactgagtgggtcctaaacacaagtctaatttaccttaactcaatcccggtcctgatgcctcttttggttgggtaagccatgctattttatcatgacctagtgccagggccggccctgacttttagtgggccatagaaaaaaaaattattttgggcccttatttagaaa

SEQ ID NO: 112219 - DNA, 7715 bp, Cannabis sativa
aaagagcattccattggaatgctattccaatactttaaaatgcaaccaaacaaaagaattgaataaaaattgtttcctttcgccagctaacatgctaaaaatttaataatttaataataattaataaatattaaaatttttattattattgtggaaaaattatataaaagtaattaaaattataaaaaaaaaacataagctgatctttggtttttttacgacattttataccttacgagcttatgtataaatcataagattttattgtcaattgtaaatgttatcatcagcacaatttgataaacccctttccgatatgttttctgcgttttgaaagttgacttatctcgttagattcttcttaaatatttaaaaatagtttaaatacatctctatctgttcatgcaactttaacagcaaacaactaaaccacaaaaagtctcaaccaaactgaataatatcattaagaaatgcataacttctggggtttcaattcatgggaagaaagtaggataaagtccaacttctttctcaatatctttctctctaacaaactagaagccggacactaaaactaatatggtgctaaacaagaacacaccccgggggtttcaaaaatacttgggatgtacataataaaatccacatccaaaagcacataaaaattaaacataatttcaagtagcaaaacttcatgtttttcagcataacacaatatcacagcctaaaaatgcataatccagaaacgaaatagaaattatctaaacattattgagttccttttttgacacaagccctgcccacatgacaggccaatattccttaactgtagcccacttgttgttgttgctgctgtggctgctggtagttcccgtaaccaccagggtaccctccatagtacatgttggggtcttgagaaaccggggcataaccatatccctcgtgtcctggtgcatatccataatagccgccaccgccaccacccccaccattccattggcttccttcttgttgggtctgaggcaaacatcacataatataagtaggtacacaagggaaacatatcaaaaaaatctgaaagaaaaaaaagaggtcattaaacgtaatcatctgatgttaaggtatagactagactagaacctgtttatttggactgcggccccaagatagtctaatattttgccctcctaactgagttccattgagtaaccggagggcttcttcagctgagctcctgatgaacataaaaacagaacagaacaatcaagaacacagttcccgaatgcatgtcattgataaaattactagaaaataatttacctctcagcaaattggacaaacccacagcgcttgccagttggtatcttaacgtgcacaagctcaccatattgggagaaaacttgtctcaagtgatcatccgtaacagtagaatccagattaccaacaaatatctacgaaaagttcatagtcagtagaatgttccaaaaagtaaaacttatggaggaaatatacaaatatgatacccacagtagtattatttggatcattctcattctgtccgccttgagaattctggtatgaggctgaaattgaaaataaattaaaaagatatacttaagaacatagcaaaaggaacagtcaagaaactgaatgctattacctcaaataagaattgatttttaaaataaataaaacaaaatttgatatccaaatgaaactatgcatgacttacacttcactaccctaaacaataccattcatacttataggaaagacaatttagtctcaagagaggagaaaatataggaaataccatatcatatagtggcttgaatcaatcaagcagaaagtcataaaaacaactagtaaggaattagaaaaaggcctataaagccataaagccttgctgctatcatcataacacatattgacaagtcagaaacaacagacaactaagtaaaaggatagggaaaactgtgcatccttcttcaatgtcatattagaatagtatttgcacataaaacacattgataacaaaactttaagtcagcaactacagacaacaaaagatcgaaaaacggcacagccgtcttaactgacatttgtccattagaatagtgatttacatatgttaatagaaaatagttatcaagctaaaggagattgtaattttgtaacaaaaggcatatccgagtcaacaggacaagtcatttctcctagacatattttagcacttcaactgacacaaatatgcccaactgaaatttgaacattattcttttaaataataaaaatataaatatagaagaaataaaataaagactggaaatgattaaattgaggtagaagtgacagtcacaatgattactagccggcaacacagtatctggaaattccaataagtttccaccagccctgctaaaatgcctgccttatggactgatcggtaaatagatagtcagaattgcaaattgcactgggaaaatagactaatttttataaatcaggaaatgagggaatgaaggaaaacaaaagtaagatctccggtatcaaaactcttgatagaaaaacagagaaaactctattaaacataaactgaattttactggactttaaactttaagcaacaaagaacagtcacgaattgtaactttatggaaagctcaaccaaaagaacgagccggaaaaaaaaaattaagcaatgtagcataacaaatgccacatgaataaagggcaacgcatacgtaaatgggaaactgacctaagggaggccacgccctaagggaataccatttcagctgaaatcagtagcaggcccctagatgacagagcctcttgacacccctgctttgagacaacattagttctaataagttcccaagatttcaatagcatgtacgctgcccatatttttttaaggaaattataggaagtaaatgacaatggaaattcgctgcttatcttcgagagcataaccgaaagaaacttcaaaaatcaaaaatgttcaacatactgctgctcatcaaatagaacttgaaaataaaaccttataattaaaggcagcaatctagctaactacccaaaaaaaatgcaaattagaacaataaaagtgaaccaaaaaaaaaaacaagcatgaagtaacaccataatgcaacatagaaaaacgattgccgtgagacaagtcacagcaccaaacgaaaggtaaatggcaaaccttttgcaaattgctgaccaccaccaacagcattcttgtttgcagctgggccaattctcataggtcttgaagagcagaggacaccattcatctcagtcatagcccggatctgttcagtttcatcaccaaatctaacaaacccataacccttggtgcggcctgtaagcctgtcaatcacaacctttgcacccttaactgaagggaatcggcccctgaaaacctcttgtagagtgtaatctgtaacatctgcagctaaatctcctacaaaaattgtaaaatcaggtgtttcttcagtggagcgcttctctcctggagaagcccaatttaatctgaaattctgggcaccatttggcatagggctgccattatatgtttgaagtgatctttctgcagcctggcggttaacaaattcaataaaaccataaccctctgactgactagtttgcttattacggatgaccttaacagaaacaacctgccacaacaaaataaaaacatgtatttactaacaaaattcaccaaaactaccagttcaacttcaactcatctattcgcgcttgtgaataaatatttccttctactactacttcgatacaaaagcaggttcagccaacatccaataaaaacgcttccttaaataacatcctctcaccttaaaagtattacttattcaaaacaaagattaatgaaaacctcgtattaaaacaaacctggataatattaataataaaaaatatagaataaacctaaatcttgtgcaagatccacacttcaataataacaacaaaggataataaagttggtaagaaaacctaaataacagtgcaaaagaagatcgagaaataagagttagaatggggaaacaaacctcgccagtgtgagcaaaacaaccgtagagatagttctcttccatccaatactgcaagtcgccgatccaaagcgtccggacctcgtcggaacttgtaggctgaggctgctgggaaggctgagtttgctgcggtggaccctggggctgaccagcccacatgggaggtgcctgagcagcttgtggcggcgggggtggcatcatcatgtatggctggtgaggttgctgagaatattgctgaggctgctgggccatggctgggggaggcacacctgagccgggttgcatcatagtgagaaaggagagatagaggaatatgggactgagagggttttggttttggagcgatagaaaccctaaccctagatagataggagaggtcccaaaatagagaaaggagggattaagataacggtaggcactgtatataataatatgaatgattgtaaaagggctcgctcgggctaacattttttttatttttatttttatttttaaatgcacgtaatctatacacgtggcatatacttttttatgtgattttatctatttacaccattatatcattttttttttagggtaaactatcattatatcatcaaaaaaacattactactttttttttgaatgctcaaaaaataaaaaacatatgtttgtgtcgtatatttcggtttataaatttttaggatttttaaaatatgagtcataataaagaaacataaattgtgtcataaaaaatataaaacatatcatgtcgtgtaataaatttatagagtaaatttacgacccacttatttattattgggtaaactatcactatatcatttgatcaaaaaatattactatgatattatacataattataaatacatttgtgttgtgttagtgcagtttatacttttcaaattttttagtatataagtcgtgttgtgtcttcgggtgtatataaatcgatacagtataatgataatcgactgtcaaatattagatatgtgattatgatcagatcgaattggatattatttttatatatctaattaaatcagatcagatgttggacagtgtatccaaaaatgtaatacatctaacacctaatcgaactaattagttttttcatttagtttggataagtaattagattttatattgttataggtaatatataaatttatatgtgtgaaaattaacattgaatttttactctttttttttttaatgaatccaatccaatttaatacatattgaacttaaaataaagatggatccacgatccgaaaaatataggtttaaaatattgaataaacataaattaaaccaataagtatatttgaaatacatttgatgaatagagtggatgactgaaatttattggatcagatctgaatagacctaaaaatattagatgtgatctaatgaacactgattcgtgccagaccataaaaaaatatagatcgtgtcgtgtcgtgccataaaataatacgaatagtatcgtgttgtacaacatttattggataagctcgacacgatctgcctagtaaattcatggtgtgctttattcaggttagtttgtttttcttaaatacactaatctatttttttatacgagctcgaattcgtgttctatatttttgcatttttattacactcgatgagctaaaatactgaaatatatgtgcaatttcaattatttttatatctttttttataattattacacactataacaaataattatacttattgtaatttatttattaccataattttaattggtaaataaatatttattattgtcaaaatgtgaaaagtaaaatctgattttaggtaaattgtataaatttccctaaaacatagatataaatctgtaaaactctcttaatttggtataaatgtaatcgagcccatatttccctgtgaacttagatctagcttagcccattgttttgctgtgtcgaaaaccatcagagatgcatgtagtcaactgtagttgtcggtcgtactatagacttagatagtccaacaacattcctttgcttagagtgtcactctgtctggtctctcagtcttcctctttatctctccgtgtctgtaatggaacaaccaaaattgctctccaaacctggtatgccacattaatcaatctttcttctttagaaaaatccacttactctaacgtttgtgggactttgttgttctgtttacagttcagattatgtatatagtgtgatatttcatctgggttttgggtattgtcaaggaattgattagatcagatctggtaaaatagcttagattagatggatttttatttgaagaacttgtttgatagatttcaagaccaatttggttcaggtccaggacttggtcctggatttgggacatgtctcatgaaagttgaaggcattactcctaattatattaaatcagtgtttaaagcatccacagctctttataggactgatccatggaaaaggttgcgtccagtacatctttttggggtcatggttgggaaggattcagattggtctgggaagaaacaaccttttccatgtctacaattcattggaggagatggtggggatgttggttttcacatgtttagatctgtaaatgatgctaggaaagtgactggtagaagagaaactattagagttcctaatgtagagattttgagggtaagatatgaacctgagtcattgatgttcccttcaaatctcaagatgattaaaacattgtcattagaagaatcagggactaatcgatatcctgtaattgatgttgtctgttgttgcacaacatctgggtctctacagtttaggactttaactcttgaggagcttaggtttgtgtatgctgtcatgaaaggcatgactttggttcatcctttgcttcaggttgataaagatagtggaccaaagtggtcaaggctaatgaactttgaaccatttattgagacagttgatgttcaatggtctcaagaaatggctaaaggtggcaatgacctggttgcaacgacgatctcttacccgcccggtcaggcttatgaagacaagactagctctacggcaagctcaactccaaccaaatatgcagaaccacataaggaggatgcttttgttgatgatgttgaattgcttgagtggcagcttgtagaagggtgcaacttgtgaccaaagagtttcatggagaatcaaaaggtcatgtggggggaagtgttgttgctattcaaattgcccttttggcccctttgggttgagtttgaagttgaagagaatccctcttgcatcaccttttccaccataggtaacagagtgagtgagggtgaatcttgtgagatgtgtattaggaggaaacctcctttaaattgtggagttttaaagtggtgaaatttgattgatctcagtgaatttcaacataaagtaatctttagtgtgtattttttgttttctgttcattgaaatggaattaccctttcctaattcatttttgtccaatgatgcttataataatgattacaaggtcataacgagttcatttgctaattaggatttttttccttaaactttgacatgtaccaaatcatgcctcttgaacttttaaggtcgttaaaaatgtcccatgaactattgagattgt

SEQ ID NO: 112220 - DNA, 5406 bp, Cannabis sativa
attgtgattttccaagagcacaagttcctattgtaagcattgagaatcccaaattaccaatgcagacatgaaaaacttaaataaataaagtgaggatcgatgtttttggaaaaaatcaatccttcatcaactttcatctcaagaaaatgatggtacttcttttttcatgcatttcaagagtatcaagaacatttctaatatttcgaagtgcaaacaaaacagcttactatggtttgtttgaggaaagtgaaaatatataaacttcaagcaatgcaacaaggcatgggcatgggctcacaacccacagcagattttgagacgtgggctcacaaagtaatctgtttgttgggcttcttcaaccagcgagactagtaattgtagcccataatataagcccaaaaagcatattgttgttccgaaaggatttaagcaaatcactctacatatattcattatttcactcttatcgatcacatcatgtacagcagaaactttttttttttttctttttgaaaagctttcttattcttttctaaatcttgtacaaaagaaacattcccttatattccaccaattagatgtataaattcttggttcattcatatagcttgtgaaaatctttaacatgtaatctagaacttgtcacatgccaagtcataaagtcaaatatccgaaactatagccctgggcgctggccccggaccactcatgtgcttttgcttagattatattccaaccccccatggtactctctctctctctctctctctctcaaaattttgaaaaagaaaaataaaaataaagaatccaatatgtatatggttggcacatatataggcactcttttatcataacttgtgcagaattcattggggtcaaatgatcaattctttcccactgaacaaattaactcaaaatttctcttaaaaatggtcgtgagtctgcgaacacttctagctacaagctaaaattatatatatgcaacattatttaagagctatattgaaactaaaatcgtatattcttgtcaactaatataatataacgtcgttaacatatatagagaatacattgcactttcagtcatataatatttgttattggtgttatttatctattttaatttctgaatatgtttaggcatatatgtccaataatgctattcagagaattatgaaagccagcaattgagcacatgcttttagaagcctgcatggttttgattgcttaggcatgaagtttggtcaatgtgtttcctttatgtagacttgaaataaatatatatatatatagaagagcatgaaatactgtatgtacgtacccctaaattataaatttgacatgccaagagacgttggtgtgtgagattttaaactcaatttgtcaaacccaatcatcgagatggacatatgcatagttatcatgattcataaatagaatgcatgaccatgccagcttatttggatcggaaattaattacccaaaatccagcgctagaattaaagccccccaaaacacaaagaattaatcacttcaatcgatctcaaacctgtcatatcaaactacaaattgcaacttgctccccttaatttctttcttccaaatattcatttgtagtcttccaaggtcgaaattttaaaatttattggtgagtatacgggtcaattacgcccaatatgcattgtcaattcttaattaattaagttttttttttaaaaaaaaaaatatatatatttttgatccacggccacttaaaattatacataattgtctctgcaatattctatataaagcttttattttttgaaaggccatgcacacgacacacaatttttaagaaaacgtgtgatattaagtgttcattatttattgttgaaaaaaaaagttcattattaataattagtttatgtctttgcaggctctctcataacttttccaggaggtcaacgtttataatatgtaaaaatgaactctcttcctaaattcaataaatgaatgcataattcgtctttttattatatttattaatattatgtagttataagcagcgcggccgatccaccatataaatgttatatcaattatcaacaaatcattattaaggcatagtttattttgtacactgaataaaaattaatgtactatatgcatgtctttatttatatatgtataatatatatatgtgatatgcatcacaattaacatataaatatatatcagtagtacttaaaaacgcaagttttttttttatataaaataaaactatatcacattaataattatagttgagtttaatttactgaaaatgtgtgccccctaagctatataatatattaaactgtgtagccaagcaactcaagcattattaaactattttcactgttccttttccgatcgattctagctaatgtatttgtggccgaaatctcttatgtatatatctttctgagtggtccctatagtttctgcatttttctggtttaattaatcatcgacaccgattaattgtaaattatttaaccaaaagaacaagttcatatataaaatcgaattaaagtatctaataaatttgccacaccaaaaacaaaaagaagtatttaataaagatcaaattgatgctagctatagatatattgatgtattaatgttctctcaaaaatcgccaatatgacgtacctgatttatgattgaataaatctgaggactgagatgatgatgataatcatatatatatatatatatatataataatttaatgcatggttaattatgagaaataaatatactacattacatatatttgatgttaacatgtacgtacgatcgacaccatgtttttattattattaattgggagtaggaatatctataccgctcttctttttatttcattttcaaagttgcaaattgctgctatttgttgggcatacatgtgagtgtgaaatgtgtgatagacaccattgtgtaattcctttgattacaaacgatccatggtcgttttttcatatgtggacacgattatgtatttattgttaatatttctataataatattgtgagaatatataataattaattgcatgatggatatataatttcacatattctagggatgtgatgggaacacattaatgctcgaaaatgactatattttgattattgttattattagatgagattaaactcacttaatttgtcaaaattatcatatgaatttaaaaaaaaaaaattactgtgagttataacaatatgattttattgccccaccaacatatataaatagatcgacgtgcctgtactgtagctctcaagaaatcttcaaatgctcatacttcaaatttcagagtcaagtttagagagaatccaatatcacaatgtgtgtggaggaatgtaataggagtatcactcttgaagtgatttctctcattttgagacatttttttgtaattgtttattgtgttgaattgtattcttttacatatatctcattatttactactaactattcaataaataaagatctatgattcattcattctcaagctaagtttaccacaaatggtattagagctcgaagtttagagttcaagaatcacattcaaccaatcaagattcatcttcaacattttgagaattcaagcaatcaagagcctgattaatttaaatggctacaacaaggtttgaggtggacaagttcactagttcgaatgatttcaacctatggagaatcaaaatgaaggcttttttaattcaccaagggacttgagatttgtagccaaacacaatgtcattctcctcagtcttagtgatgaggttttgagagaagtttcaaatgaagacaaggccttaggtctctagaacaagctggtttcaatctacatgaagaaatctcttgtaagatgattataacaaaatcattcttgatgattataacaaaatcattcttgatgattataacaaaatcattcttgatctgaataatttggcgatgaacattgatcatgatgaagaccagactataatcttgttgagttcacttcccaagatgtatgagaactttgttgatacaatcttgtatagcaaagaaactttggccatgacagaggttataaagttgtgtcatgtgtgtcatggctgtattgaattctaaagaaatttagaagaaggggccccggggatgagaaaggagagaccaatggagaaggattactcattgttaaggaaaaattccccaagagagaatacaagggaattcataactcaaatggctataaaggttattcaagatccaattctagaaactttacaatagggccaagctctaatagagctgtaagaaagcaatgatattactggaagaaggagggccaccttagatatgattgtttagctttgaaggctaaattgaaaagagaaaatcatcataagtccaaaaggcatggagttgctgatgttgcagatggttatcagtcatctgatacacttttagtgtcatatgatgcacttgtttcgccaacataactcctttttgccaacgaaacaacttgccgacataagtgctcaacctgataattggaagaaaaagttcacctacatttgtcagcaaaactaaaggaattttgccagtaaaaagtgatttttttgtagtgataacatctctctccgaacccctttaatctctcacaagcagaatagaatgactcattattaggtaaaattcacatggtactgatcttgatattgcatttagatttaccttaggtcaaacacattaatgttaaaattaaattaaaattaaaaaaacaaattcaaattagaattagaataaaattcaactatattgatattaactagaatagccccggcaacggcgcaaaactagttgtgataaatctaacacgcaaaatgacatggcacttttttgactcttttaaatttttactaaacttgataattggagtaagtagttaatttatacacaacttttttttaaagagtaatgctattagatactagtggtgcttagtactttctagatgtgtcactttgcgattgattagcaatactccctaaaaattattgtattaaattatataagacttaatacttagttggactaataacaatattaacaagtaagaaagtgttaaacaccattactacccattagcatttctctttttaaattaaaagaaaagctatagcgcaattaagcatacacataagtttcatctatcatttattatatgttcacaaatcaaagtttgagggctaaatcgacaatattacatcatgttacgtgtgcccaccagtctatgcattactgtatttttttttttttttttttttgaaaataagcgtagttatatataaaaagaaactagacctctcggtcattacacaaaat

SEQ ID NO: 112221 - DNA, 6138 bp, Cannabis sativa
ataatcagactaaatgataaaacgttgattataaccaaattaaagcaatttcgtttaccaagttcacgtgttgttgagaataattttacaattagaatgcatttatatcagttggccccaagtttcttttttatttttaaacatgtgactgaaacattcattaatttcatggattgcatgtgtaaatagtcaaaatgaaaaataatatttatcctaaaacatcatcaggtaacaatagcaaacttgtattgtgccaagccaaaatctcctaatggttctattttggcaacaaagacttgttaagtagtgtctaggaattgggtcactttcacaattttagctatttaataatttgctttattgcccccaaaattgaccttttaaaaagcagtttaatatgcatacattcatttgtcacaaaacattttgatctatgtttattatataactagtaaataattggcgtttcgcagattttttaaaaaaaattatatatgtgaaataaattatttcttttattagcaataactaagtaatgggcgcagagaaaaacaattcttgagccttgtcaagttccaggtgaaatttttttgggtcgaataggccttgtacatggctcttgagttgatccattcgtgcttgcactaactctggtcgtccgttatccgaccaactcctcttttagattgataggaggttggttgtatgggacggcaagaattggtctatcatgcgcccttggttgatcattttggggtagtatgtatccgtcgaaaattatttcttctttgttttgagttatttcgaaaatcttctcctaccgaggggcccattctatcaaacacagaatttctagacctcgggtcagaatgtgttcgagcattccggggaggaacatcattattgcacccgatgttattatgagttcttcaattagtgtggtcatcaatagaggggctagtggcaccatcctcattgggataagatttccaacagtgagacctacttcggccctacctgggtgggatatctttcccccttccttcatctttgaaaaggtctcagaactggttggtccagccatatgccctttcagacaggacttcatcattaagtcgattgggaggcggccttgtttgggaaacagttggccaacttggtacaaagttacggtccctggggcgttgagtttcctccaggacatagggaccttttccctaaaggggggtcccttatgagtggcggttcttccactctggacccagctcttttgttgaaccttctaattaggtcattcggctccctattgcggtagtttaattccacctgatggacttggaggatcgcgacctaccgatccatccaatcttggaattcttatctttgttgggcgaaagcatcgcctacagtagggcgtgtttcttcttgctcatgatggaggatgtttgtatgatcccggactagccctacgacctctcttagcttggctagctcaaaattatccctcaagtcaacatggggctcattgacactaggttgggcaactccaggcccaatttctccagcatatacctagggtagctcttgttaaaagaacccccgtggtactttggacaggttgtccaacattgactgggacttgcccagtatttgttagatcttgcttattattaactgagccttctgatcgaaaacctgtagatgggtttgcccgaggtagctgggcaaggttggcaggatttttaacagtgggtggaacacaaacattagggtccacagccatcggatcctaaggtttagtggacatgctttttcttgtcaggaccatggtgattatcaagtgaaaagagatgagatcttcgtaagaatattgaagctttcaatgaaagtaccaaaacgttggttgggaaatttgccaactgacttgcagtctcataaatgttgattaattaccaatatagagttaagaataataaataaatagaaagaaagaacacacagaattataaaagttcgtccctcttagatttgggtaatgacctactccccttttagttgtattatttatcatataaaaattacaggttacgggtattactaaaaaaatagtgctattaggctaatattgttggaataaaaaaaacaataatattaggctaccttaaagataagatgcaacaaagggtgcagagttgggaaggaaaacttttgtcggagtttggaaaaaaaaaatcctcatcaagaccgtagcacaagcgcttcctaactatgccatgaatgttttcttgcttcctttaaacttgcaaggaactggagagaattttgtgtcaattttggtggcattcatcgtcaaagaagaaaaaggggatccattggatgagttgggacaagctatgtcgtccaaagacaacaagtggtatggggtatcgatacacgcatgatttcaacatatctcttcttggcaagcaggaatggagattaatgacgaaaccaaatgctctggtcagtagaatttacaaggacaggtattatcttaatggatctttcttgactgctgatcttggaggtaatccaagctttatatggaaaagcatttttgagtcccaacatgtcataaagaaaggggcagctgttcgtgttgggtgcggtaatacagttcaggtgctaagggatccctggcttccaagtgaggtcgacccttatatccatatagtaagtgaatccttggtggaggttacggtttcaagcctcatggttccagaccaacttcaatgggatcttgagctcctttaggatatcttcatagagagggacattaatcttattctttctattcctctgccgaatggggggaatgattcttggtatttgaggtttgaaaaaacaaggcattactccgtggagagtgcgtacagaagtttacaagaaaacaagggggagtaacaccagtgatagttctggtttttggcaaaaaaatctaaaatttaaaagtttcgccaaaggttaaaaatttactatggagggctgctgcagggtgtttaccaaaaaaatcccagctacaaactaaacatgtctaagttaacaaactttgtccgttcagtaatgctgagagagaaactatctcgcatgtgctgataacttgttcttattcgaaagtctgctggaataggccaaaaataggcgtcccaacactggtcagcagaccttctcaacttggcttgaggaggtttataccaggtttgttgacagtgagcgaaggctgatctccatggttgtttgggctatatggaagtgtagaaatgatctggtgtgggataacaagagcaaatttgttagagaggttgtgacattagcaactactgtccttaatcaatggcatagtgctcgggataagatacaagacacatctttgggattcttaaattcaaaagatggtgatgagcattggcgaattccaaatgtagaaacaattaaggtaaatactaatgccgcaatctttgaacaatctcaatgttttagttattctttggtggctagaaaccatattggcacgttggaagaagctagatcagtttgcactagaaaaagcattcaaccagaagttgcagaagcaattgggattcgggaagcgcagagttggataaaagacaaactatggggtaaggttgtcattgaaatggattgcattttagtcatccaagcgatacgaagttcatctactatgttgtcttattttggcagagttattgatgactgtaagagtctgttaattatatcttcttgttaaaaaaaaaacaatgctatttaatatgacagctaatattttcaaattaaaatcatatgtcccaaaaaaatgttaattattatgaaagttatgcactccgtcttaacatacaatagctaagaaggattacacttaaaaaataatgtatttatgagtgtgtaataaacagctaaatacccaaatttgaaggcacttttaatggtcactcaataaaattaagagctgatttgtatttgcatgccaaaatactgcaacaattataaaattcactctaatttacacactaattagagtaaatttttataaggttttttatttttgaaagagaatataggtaattctcattaataaggttaatttgacataatttattacaaattcaaacgaccaatatcagtaacagcttattacaattttcaaaagggaaaaacacaacacatttaaactaattctaagaagcattatttagtttccaatgtgtaaagtaaactaagttttcttttgagaattgacatatcaactctaataatacaaacaccttgacgcaattataagattaaaggcttgattattgaaaaataaacaatgatttaccacggccatgaaaactaacttcataaaccgaaagacttgtatcgtgtttgtctagatccagatatgattgaagggcaaacagagaagtactgaaaatcacaaaacttaaaactaataaacgagttgaccaatgcatcaaagagaaaccaagaacaagaaaagagaaagaacttcgaattggtgtgtaacaatgaggaggcacactctatttagagactttcaaggaggtatgaataagtactagaatcaagcaagaaaaatcaggtatatgctcaatctattgattggtataaattgatatggattaaccttttgtggctacaccgtgctcgcagaatgtgcgagcgcatacaagttgtatgtatttttgctcccctaacgataatttatacactcatatgcgcgcaaaagagaaactagttacttatcaacttaccaagctaaagatatgaaattctatacacccctttaaaggggtactcaaattttcatgtaagaccaccataataaccctattatttttcacttctcatactaccaactttaggtgacaattactcgcacatcataaccatggaagataatagattgtttgtatattgggggaggagggattcaaatttgagattttctccttgtgagaaaagatgtgaaactactagactatgcttatgaccacctcgaatagttacattcgaaccagtgaataataacgtttgtattatatgaatcaaaaccaaaaataaattaagaagtgtattgtgcatatgaattattataatataatgtacaaaacatatacaacagagacttcactgccaaacttaatctctctgtttaagcagcaccaccagtccaccaccaaacacatttgagcaaacactactagttctcatcatcatcatcatcatacaaccagagaaaaaaaaaaacagtgatgcattttacagagaaagaaaaaagctgcaatgatttctaagcagcctttttttaaacaaccttgaagtgaaaaaagaaaaagattagcaaaaaagccagatacaaaatggggtcaagaagaagtcccatcttttgattcaaaatgtaaaattctagaactttttaaatccatgtgagtaggtatcaaagcttcaatgacaaagctgaggttgaagaagaatgaatcaaagaagatgaaggtggtatgcaacgtttttgcctactacttctggatgcagagccattgccgtctccagaagtagcaggcgtcgaagacaatgatgttgacgataatgatgattgacgagtagatgggggaaacctacttgaatggctcctcattttcttcttctggctgtcacaaactccatctgatcttacttggcgaacctttgtttcgttcaaaccagcgggaagaacacaattgcagaaaaggcctaattaagttcatataagcaaaagtaaccaagatttagtaagtacattgcaactcaaattaggatttgcttagaatgagaattgaactaatgttagcaaagactattttacaaaagttactaattaccctattttgataaatgacaatttgaactctgtatttttgagcctaattttagtcaattttttttaatataactaaaacataaccaatggaaaatgtaattccaaagtattgttaattgttatgttcaatattaagctcagcctactattatgtttcgtttcgaataaaacaaagggtgtgattggtaacttttattgaatacataattggtaacttt

SEQ ID NO: 112222 - DNA, 2614 bp, Cannabis sativa
  modified_base (2532)..(2551): a, c, t, g, unknown or other
ggttcgaggaggttccagcgccggtggcggacgtgggcgtcgtaaattcatgagtgattttaatcactttgtcaaaaaaaatatatatataatttaaataataagatatcataatataatttaaaaataattaattagttattaaaatgtacaaaaatatatttttagagataactaaaatgtatcttttatatgacataaatttataaaaaggtaataaattgattttttatcattatcataagtaactaaaaaattacttttaaaaatacgaacaaaaaaaataaaaaatagaattttggaattaattgtattttaaacatattagttatctctaaagaaaaacatattactttcgaattaaggtatgttttgatagcgtgacaaagtgattagaatttgtgaagatattgttatagctagtttgtattatgtaatgattgtgagaactaactatttgatgaatatatttttttttaaaaaaaagtattttaagtgaaaaaaaagcctctatattattgttatttcggtgtttgatgagaaggcggaagtaagcccaaatcacagcagagggcagagcactccatactttatggtataaaactgaaagaatgaactaaaatggtataaaaggaatacttttgattaaaatgatatgaaatgaaatactttttagtttgatttgggagaagcaaacaaagcatgtatcgtcaaaaaataatcaaagctccacatgattaacgcaaacaaatgacaagtggaaggatgaatatattcacgaaagaatctcgccaaaaattatatttttagtttgggtaaatatcattttagactaggtaaaagttacaaattgaactttctattttgttaaatgataaaataaatcctatattttctaaaattgtacaaataggagaccctgaactaatttttttgtcaaaagaaaacttaataataatttgatctagagatgttatgataaaactggttacattttctgtatctgttcgtattagaaattgtcttaaagttggttatcttaaaaaatataattgttgaaaattgagctcagggtcctatttttaccattctgaaaaatatatagtctattttgtcatttaacaaaacagatggtccaattggtaacttgcaaaacagggtctaaaatggtatttacccttttagtttttattttagttaagtatatttttaattgtataattaattttgttatgttattcaataaattatattatttttattaaaaaatatttaatttaagtgttatttataaaaatttatttgtaccatatatgcctaaactatataggttctggtaagttggtttccaaactttatattttaacaaattagtccctaaactatatacgtttggtaagtttatccccaaacaatatgttttagtaaattggtctccaaacttttattttattagtaacattaagtctccactcttagatattaattattttttaatttattttattttacttactttaatttattttgtgtgttaaatttaattttttttttaattttaatactttaataaaataattatattaatatatatatatatatatatattttactttggagctaaaaatgaaacctatgaacttcccttaagaaactgtgaagtgtattttttagggttcaacttcattttgtactttctgatgatcgaaaaagcctcttccaaatagtcactatgctcctcgaatgtttttgatttgactagcatgtcatctacgtagacttcctattttctttaaaacatcttggaatttattattaactagacattgatatgtggcatctagggaatgtgatttcaaagatcattcccgcgaggccttgctttatcgcctttggctctttctttctttgcattagatgttcccggaggtcgtttgctgagagactgctacctaaaactagttgaattttttctatttcttcatcgctccagtcaacagaattactaaggtatttttgtttccccgaatggttgacttttatgcattagtattaggcctatcctttcgcatagcccttattctcaaataaatatgatcaccttgccctagagcattgactacctttgctttctacaaagtttatctggtagtatttgctttgttacgcgtagcgatcatagcagtctttctcgaaggatcccccatgatatattttcctttgtccccattgggatcaaaaaatgtcaggatcttcagggtcttttcttttttttttagtattattatcataaggaataagatcattaggaatttcttcatcatgagccatgttctcttgctcatgtttatctttcatgtcatctataggatctttatcttcaggatcttcttctcgaccctcattgatgagattttcatcaacatatttttcattacgttgagtcttttttgcaggacaattggttagcactgttggatctccatcgactcctaactacgtctgggttgtaggtgttggaaattattttannnnnnnnnnnnnnnnnnnnacaagtatgttgattaacaccctcaatatgaactttctacaaacgatgaaataaacacatata

SEQ ID NO: 112223 - DNA, 1691 bp, Cannabis sativa
aaaattcggccaccacgcacaaccttaataacacaatcttataatatagaaaaaccctaaaaaaatttataaaatagaaaaataaagcaatgtacattactaaaatcagtaaaaattagatttataccttaatggacgttgagatacaatgttttctccactaaaaactgtggccagaggtataaccaccacaaccactacctctaccttcggtttaccctaaaaatgagaaaacatgtgatctttttaggtatgaaaaatagaagatttagaaagaaaaaaaaggagctaaaatggtaaaaaaatggtgaaatgggggtgattttttatggtggttggtggagagggtttgggggtttctgggttggctgatcgaatgaggaagacgaagggctgggtagggttataaaccccttttggcgtcggttatttagaaataactgacggtatagggggcacaccctatgccgttggttatttctaagtaactgatgccattagaggcgtgaaaatcccttcagtagatttcaaatcctatggtgtcagttatttattactaagccaaaaaaagtgcttctaaaggcttattttgtagtggtgagagagtcctatctctattcaggatcagatgctatctttgaataaatcctcgtccctctgttttagagtacttgttgcacttggtgtttagtgattgagacattttcctcaaaataaaagaaaaagaatgtgagaacattttatgtgacaaaagataatctaaataataaatattgtaaaagaattatttctctacaaatttcatgaggacatttacctatacatagtagtatatttttggttcatttactataattctcaattttaaatccaaaattcaaatttcaagaaattagattctgctaattttgttttgtttgtttttataaagaggtatttttattaatacatatataaaaagttttttattcatttttatggttgttaaagaattcatcaatacaaaatctatatttcttttttacaaaaaatgtggttcaaacacaataaacgcattataaaagaaagtcatcaaagcaatatactataaaattacttattatcaatcatttttaattcatacatgagtattgtaatattatatttatgcatatttatatatagtcatatatattttttctttatatttttaggctatattatgttattgtattgtttgaaatacattgaagtcaccttttttttttttcttaatgtaactcatatgatgtttcagatattattcaatttatttaaaattattttataaatttattaaaatagttttataaaaataaatctttttatttaatcttgtaatgtctaaatataaaaataaaaaaaattagtaacttattaagttgtttgatacattacattttatttaaagtaattcatttattgttatatattttatgaaactatgtggttttcttataaaatatgttgaaacttattaaattattctacaaaataagctaatgtttaatataatttagtaactattaaatattaaaagatagcgagctaatgtataagattattttataatgtttagaaaatatataaaaaaataaaataaaaggaaaactctctattaaaaaaatgtaataaaaaacaatacatagtaaaaaaaaaaaaataacaaaaga

SEQ ID NO: 112224 - DNA, 9950 bp, Cannabis sativa
ttaattcgcatataataaattataatataatataattctacaataatactcaattaactagttagggctttgctaatccatttccttaattccagggtattacactcttgttccactatcttagagattgtttcaaaccatatagagacttccgcaacaagcacaccagtgttcctttccagcctcttcaaatccttcaggttgtttcattagaattctttcatacttggaatggcttctttccatgtgtacacctattttcatctgatgactttaccgtcttctggcatcggtattacattccaagtccagttcttctttagggagtgcatcatctcttttaacatagctctattccatttcttccgattttcggttttcattgcttgtgcatagctggtaggctcttcatgtacagtttgaatagcaacatgaaatgcaaatgcgattaaattagcatgtccatatctttttagaacctttacttctctccatgttctgtctctatccagtttataactctttagcttatcacttccgaaatcatcttctgagtcatctcttttatgatctataggtatttcagtctctacccttctcggaggctccacctcaagctcagttcttggagcttcaatttcttctcggttagtattggcttaacttccagcaggtttgtcaataaatttcattacagattcattaaatgtcacatccttactaattatatatttctcattccgggctccaaacaccacatcctgtatcctttgactccttcaagatgccctaagaaaatagactttaaggaacttaccataagtttgtcttgcctaactgtgcataacagacacatctgaataccttcaagtgttcataactcattggcttccctaaccacacctcatttggcgtcttgaaatccagtgttgttgatggacatttgtttattaagtaagctgaagtggacacacctttcgcccaaaacactttgggcaatccagcacttaatagcatgcacctcactctttctaagatggttctgttggacctctctgcgagtccattttgctgaggagtcttcctcacggtcttgttccttgatattccttcttgcttacagaacacatcaaactcatccaagcagtactctggaccattattgtttcttagtcattttactttccttctagtttgattctcaatcattatcttccagtgcttaaatctctcaagaacttccgtcttattcttcaaaataaacacctataactttcttgagtaatcatcaactattgaaacaaaatatgtgctcccggagtgtgatggtgtccttgaggctccccataaatcattgtaaacataagccagtgttcccttggtatcccttttgccagttccaaaattgactctataagctttaccaagtacacaatattcacagaagtctaattgctcaagctttacttttccaagtaatccctgcttattcagttcatggaaccttctttcactaacatggccaagtctcttatgccatacttcagtttcatttatgtgcttgcttgaaacacacaccttcgtgttttcactgtggtaccttccataggataaatcccattttattttcttcctctcatcaccacattggaacctctacaaactttcatgattcctttctcaattttaataagaaatccttgatcatctaacatatcaacagagatcaaatttcttttaagatcaggtactagacattcttcagcaccctttcaacaccatcatgaagtttcaaccttaaggttccaattcccatcatcttacaagacttgttatcaacaagatacatagtcccataatttccagatataaattctttgaagcaagatttattcggtgtcatatggaacgaacacccagaatccaagatccatttagaatctaaattctcgaaggttaccaacaaagcactagttgagtcataaccgtcactactcactactgcatctccttcagatcttgaatcactcatcttatgcctctccagacacgcccttcttagatgccctattttcttgcaaatctagcatctaacattcttctggttatcagattgtgatttgtatcttgattttacttttgaagctttgtgactttctcttttctcacttctgccccttgtatacaatccatcaacacttccagaattctttaactcactcctctgattcagctcttttgaattcaaggctgattgcacatcatcgagtgtgatcgactctcttccataaatcattatatctttaaagtgcgcaaaggactttggtaaagaactgagcaaaaacaaggcttgatcttcatcttcaatggcgacactaatgttttcaagatcgagaatcaacttattaaactcatcaatctgctctccaataaatttgtcttccatcattttgaatgaatacagggcttgtttcatatataatctattcaccaaagatttagtcatatacagaaattcatgtttcagccatacacctacaaccgtattttcttttgtaacatttttcagaaccttaaagcttcaaaataatcgcactatgagcctttgcaagagtctctttcttatgtttatcaaacatcgaattaggaagagacttatttcttagcagagcctcataaaaccgttgatgaactaacaaagcctttatcttcatcctccataatccaaagtcattcgtactagtaagcttttcaacatcgtatttcgcaacagccatgattacaaaccaagctttgataccagtttattatgcaaaatagaataattaatgacttacgattcaatttatattaccaacaaacacgcaacacaatcaagaaataatataccaagtgatctcaagaattcaagtaataaattaagtagtaaaatagaaaagaataacatcaggtttaacgagtttgagccatgtgtaatgctctacatctcggttggaacaacaaaaatcgtatctttattgatattagtatttacaagattacaagaatcttcacaaacttctcagagactacgagaagaagtttctctctctagtttagagtctctctctcaaccttacactatcacgattttcacttaagcaaatctggtctgaatctcacaaacaattacaaagatttacaagtatatatagatttgcgttattgtaaaaaatatctcctaaataattatggcacatttacactgccttaaatgatccagctcatcaccaacaataataatccacgtcatcttgaaatacacgctttcagtatgaacaatccaaaagctttataaactcataagccttttggatacatacatggcttccttccgaatacttcaaggctaacagtaagctgtccgggagtcacctccaaatcagtgacaagttatctgggagagaaattccatgcacaatacaagcttatttggaaataccttctggattttacaagaccttcaacatagggctttctggatccacactaagcttccagtatctgctcttcagattcacagcttccaattctaaatgactaaacttgtaaccataaccagtaatttttcataatttaattgcctatgcaattttaggcgatatatttttataattgtgcgacatttgtgcgagtttatctcaactgtatagaaaggtaggcacaaccaaattggtaggcacagaagggtagtttatctcaattgtgacattctaaattggggttattagcatttaacattatttgaaaacttaatgattcaagtacttataattagttctaatagtttttgttaatatgtgattaaaaggcattttttttcaaaatatgtgcaaaaatattagtgtcgtgaactaatcgcaaaaaatatactatgaactcaattaccatgtcaaattctggtaaaataagtctacacacgacttatatctaaaggtgagcatgttattatctataacatgctcaaatgaatgatcaaacatgcaatgcttaatgtattcaacgacatacattccacaatcgtaactacaaattaaataaatagaaactattagaaataataaagttaagtaattcacaagggactacaaaataaaataaatggaaaattagacatttatcttttgtccatctgcgatacaactttggaggtagctcttctataatgcattggtgggaggtggctgagatcaccgaaatcatttggaagtacataacagtttaattgaaaatcatcactagcccacaataaggatgcaaatagcttgatcaaaggcttcaaatatgatttcatgttgtcctcaatcgtggcctcgatatcacagtcatatacaacaatctctcaattctcaatgtctacctcaataaccacctaatggtgctcagcgggaaagttcaacacaaagtagatatattcttagttctcccaacacggaaagtgtctatgcttcatccccaccacttaattaagaaccgattgatcccatttgaacgtgctcctatcaccatcatgaaaattccagcacatttgtaatatttgtggggcagatgtcttagaactacacatttctgagtgtatacactagggaagagcttttgtcttcttctcaacaagtgcatcatggcatcaatttgctgcattgcaaataaaaaaaattagaaacacattgcataaatgtcgcacataggtcacacaaagatcatacaaaatcaattataagtaaaattgcatataaattgcacaaacatcgtacatatgtcacacaaaagaccaaataaattaaatgtagtgctgaattgcatagaaattgcacgaaaaattacacaaacatcacacacatcaaacatgtgcatatttagcgatttctttgcgagtttaagcgatgtatttgaggtttacaaaccacatcgcaaatacatatgttagatgtcgcaaaaactcgtaaacacgtcgcataaatataaatatatgttgctcggcaatttaaaacaccaaatttgaacaattaagaaactacttacagtatcgttgagtcattctccttccatcactgtacgaactaggtccaaattgtactgctagtgtgaacatccctagcacggtcattgtcccttgagtaagtaatctacttttggtaaaatttgtacatctatgagtctactggcctcaaagtatctactttagatggcccaatttgttgtttcttcttcctctctgtgtagtccttcaagaaaaataactttcgttttctcttagccctcaaaaattccactccacgaggtggcccatctaactgttgcagcaatcataatggcatttcttggagtagaaggagcctcatctatgttggatttctaatcttttggatacacatcatccttatcacaatcgactgccggttgtgatggttgtatgtgttctaatggctctgatagctgcttctgtaacaaacttatcatggtcgcaatttaatccatgataagatttttcatctctttcagaatactttgaaaggtaaccttcatctcaatctgtgcagccagaattgcaaattgttgggcttcaattcaaccttctctaatctctttgccaatcctaggtagtcgacgtcattagctacaagacttgaggttgggggcaaagtggctgatgtggagggctctgtaggttctttcaatggtgatggtggaatggttttggcactttgaacatattcagccacctattttccttgggtctcgaatacagtgaaatcttatgtaccaacttgtgtttcttctacctcatccaagcccatatctatcgcggggacatcacccttacatttgaacttccaatattcaccatcccaattctaagggtacaaaatttgaagaacaatcatctgcaaaaaaaaaaaatcgaattaatgtcgcctaatattgcataaaaattgcatacaaatgttatgataaattgcacaaaatataatggaaatcacaaaaaaaaaaaaaaaaaactcatgcaaatgttagggtaatcgcacatatatcgcacaatgtcactcaaaatataatgtaaattgcaaaatacaaatgtgtgagtaaatcacacacaaattgcacaatgtggctcaaaatattatttaaattgcaaaataaaaaatgcacatagattttaggataaattgcacacatatcgcatgatgtcgctcaaaataatgtaaattgcaaaaaaaatatatattgcatatagtcgcaaaatcttaagcatatattgcataaacataaaaaatgtcgcataaatattgcacaacaactacaacagtcacatgtaaacacaaataacacttctatcaaagtagatatcaaaacaacaatgataaataaagaaagattcacatacccttttctcaaacaacacagccgcattaggttgcttcacatcgcggttcaacattcgagggaatctagtccctttgcactggccatacttctttcctacatcttgcatgacctcaaactcccaatattgtagggctggtgcatatccgtacacattatacttcgcttctagttgagtaacttttttctccttcttagatttcttattcctcttatcttacttactcgagaccttatccatgtagtttttcctaagctgctgcatatttttagctgtgaaagacaacaacttctgataagaaaggagaccccaaggatactcacataatctatctacattttctactaacttcagcatatctgtccagatatacacaccctcggatcgtgacaacaaaaggccttcaacaaatgcatataaccccagcttgtacacatcgtatgtagcatcacacgcctcaaaagcttgccaatgggttttaaaggtcacccttcttgcattgtagaaatggtcccacagtatctgatcaatatcgcattgtgtattcaattcttctgttgaaaggccaccgctcatatttaggactgtgatcaaaccgaactcagacctcccaaatctgacttcagttttacccacgtaaaactacacttcattatttttgacctcactgactttctttttcctcaattattttttgatgtacaatcaccccagagaatttcaaatcattgacattccaaaaaaactctaaagggggtttccttgaccttgtcgatcaacttaaaggcttcgaacttagcctttattgaagcaaagtacccgtcccatctataaatgatacacttggaaaatgctcaaataatgggagaatgagttctggagccatctgcatttacaaacaaaagatgattattaattgaaatataaatcaaacaaactcgcgaaatagcacgaataaattacataaaattgcaaaacaacacatataaattgcacacagatcgcacacatgtttgttaaaatcatttaaaaataatatcaaatgtatatcgcacaaaaatttcacaaatattgcccaaatactgctcaataacaccaacacaaaatctatgctagagagtcgtataaaattgcacaaagtcacccaaatatcactcaataacactaggacaaaatctatgatggtcagtcgcataaaatcgcacaatgtcgcccaaaatcgctcaataacaccaacacaaaatcatgctggtcaaacgcatgaaattgcacatgtcgcccaaaaattgcaaaaaaatatgaacatagaaaccattgtaacttggagttattacacgcacaaaatcacatatagattgcctaatgtcacaaaaacatacaaaactccaaaaaagctatatcctgaaactcaaattcttttgcaaacacaaaaaattagaaatcgatatgtttaatcatcaacaatttcaatttaatcacaaatttcatatttaaaggagaaattaaagaaaaatccaaaaaaaacaaggcacctgggttcgagtgggtctcgtcaatggtggacggtgacagggacggtgattgaagattggtttgagtgggtttcgtgagtggttggggttcaagtgggtctcgtcggtctcgtgggtcgatggggtcgattagctcgagagggtcgctggtttcgctaattgttgagagggtcgctaggtcgctggagtcgagagggtcctggtttgaatggagggggtgggctcgagttcaacagttctagggggaccttcggttctgggttcgaatggaaagggaaggaggagagagaatggagttagagagaatgggggagttgaaaagaggggtaattttgaaaagatattgaaagattacaatatctttcctatgtattatatttaggtttaattaaacaccatgactaattttttagcatggtttatcaaatttcccaaatcaaaattccttttttttttttaattttctgcatatgccctctttgtctctttgctattttcttcatttgttgcgaccattttttccaacctcaatcatgttacatcctcgacccttggtaccaaaagttctaaatcagaaatcatcaacgttgtttgaacaaccaagaattcgatgagtttccatttttaacccctttctctcttttttctttttgtttcttttgctatttttcttgttttggctttgcacgattttgatttgaagtagtaagccaattatttttaggtcttttaagcattccctttcccccctctaaattaaattctttccataatttcagattccttaagacatttcttatttgtgacaaagaatgcctctgtctgattcagaactgaaatttctagagtttctagaatgagaatacctaaaattatttgccttacccttcaacttgtagcctaaacaactaaaaataatactagaaataaatgatgagaaaattaggtgatttcataaaaaacttgattgaaaggatgttttggctcgctataaatggttttaagacgagatcctcgatggcaagcatcgctctttgcgagattaggcatggccagaactccctagtttaattaagtatcctctagcaaggcttatgtttttaccccaggttaccgttgcatttttttttctaggtgagttagatttcagcatcatgcctctaaaagagcgcaggtttaaattacctcaaaacccaattttccaattcgagactcagctaattgagtctaaagttagatcaatcactgttaggttgtttttagtattatttttaagttaatttttagtgtgttttaaatttagttctactcttgtttggagcaattttattctttttatcttttattttagtagatttaaatagaaggagattagaaaatatcaaaggaatagaaaaaagataaaataatctcacaaaatgatgaactataaaatagagaaaattgtacaaaaaaaataaagctaaaacatcaagcctaaatttgactagcatctgatgatattttggaaaaagtcaaaacataaaagttctatatctctcttttatctttctggagcatcttgaatcgtccaattctaagtaatatcgagagagttatggccaaaatactatcagtcaatgcagcaaaaaactcattgccccttctaatcctaagcagaataggttttttcagcgttttttattttttttatcatttttttagctataaaagaagtggacttcaatagttttcaaagggcaattcagaagaaaataaatagcagaatacggggtacgaatttcagagatcaactgcaatactggaggcattcttcagagggttttcagcattcttttcttctctattctcttctattttcttaagttaatatgtgtgattttgcttccataaacatgagtagctaaacgcttaactagggtttagatggatattgttgacattgttttatggttttaatatgatattattttccctcaatttctatgtattct

SEQ ID NO: 112225 - DNA, 1660 bp, Cannabis sativa
agcttaggttgattttcttcaagtttccaagatgctgtaaaaaaaaaaagagaaagaacaaattatgctcctaccttatcctaaaactcaataatttaaggctatttaggacttttatcccaactatgtatatgaataatgttttctgattttttcagttcgtttcgtttttgaactattcacattattgtaaaataattattctgttaagttctgtcagtcatacgtagcttacaaaatgctaacatgattgtttaatttatgaccacgtgataatagtctaaacatttacgtcaataatctatttgtcacgtatgacaaaactaaacaaaaaaaaaattacttcacaacaatgataatatttcagagatcacttttaacaaactggaaaaaaatcaaacacaatatcacacatgttatagtttgggacaaacattctaaatagccataattcaatgatgaaattacaataaacttaaaatccttacctcaaccaattcagatggccaaagtttctgcagcttgctatatggcatggtgagttcaacaagatgatttggagcaaaatttgatggcaatgatttcatagggtatgcttgccaatagactaatctaagtgaattaggaagtgattgaagtgcttgaaggctcactttgcactctctagagctagaattgtaaatcttgattaatctcaaattacgcatctttgagaaagctgtaggacttacacacaccacgttatcacaatccgacatgtcaagaaatattccttcaacttttgttgttccctaatcatatgatggaaagagatcaattgactaatataaatttgcttacaatataactaataatgtatatatcatttgatttgttcactaaaatgcttatattcatttctgtttgtaactttataaatacatattatactaatacagttgtatattttttgataattaaataataaaattattttcgtttctgatcaattaactatgcatacttaatttttatatataattgttaatgtcttctaatttatatacaaaatttgtaccttatttaattttctaacctaccctagttagattagatataagcaaaccagaaagagtgagctaaaattagaaaagtgtgttttatgaactaaaagttcttcaagcataggagagttttgtaaggctttgagggtttagggtgtactctctttgttttgatagtggatttgactaagttcattgctatctttctttggattcaggtctaaccaaacttgcatatactaatataataaaggaatattttatggtgcaacccttgtgtttatgacatcaagatggtttaatcttaatttaattttttttttatatcaaaggcatcctgcaattttttaaatttaacttgctgaaaataaagtttaaactatttgaatttattttttacattgtaaattattttttattaaaattttacaaaatattttaaataactataatatacactatcatataaagaattgaaattataactatttaaatatcaaaagcacaaaaaaagcgcatcggtacatatattttgagagtacattgtagtagcactctataataaatgtacaattaaatgagcaattgtgcacacataaattacacacaattatgag

SEQ ID NO: 112226 - DNA, 1707 bp, Cannabis sativa
gagagagagagagagagacgatagcggtgccagatttaaaatgttttagaaataaaatgtttttggatctttatatgtttaacactctatctctcacagtttaaaactgtccggtatactattattgttgacggtttaagaccgtcagctacaatatactcgacaattttaagtccttgggatagcgttataactcatttttcaattttaaaattatgcatgttttatacagtcgaggattctaaaacggctgtttaaaaacatcgagattagtggagtattctcgatggttttaaacggtcacttaactttattagcaacggttccctaaaaagccaatttgaaaaactgacgggaataagcctttttgtagtagtgttggaaacttttttcaatattcttagttgtgtgagattgtcctatcttatacgtaacttccaaattaagtgctctagatgagtgtagtttgatggatatgggttattctggatcaaattacttagtgtaattctcatgaagattcttcttttacctaagtgattatgggttacaaattttgccaaaattacctctaaaagctctttttgtagtagtgaagagaaattagaaagggtaacacataaaagaaggaaaaaattgaaaaaattgaaagatttgtggatcttgcaattcgaattaaggattggaggattagaccagttgtaactccatttttgatagtgcatactttgagcttctctgaggtgagatcaccaacaatgtaactcggattttgagtgaactgttgataaatccaccttgtgccaacctgtccaaaacagtttaatagtaaattaattcccaacaactattctaaccgaattccagctcagacaaatcagttagaagtcgttacctcaaaccccttgaccccagcagtatttaaagtgctcctagaagccagatcaaatagagttcgaagttagttcacctcgtagagaagaaaatacacagattgagtgagagagaaagagaagaagctttgagagaaaaacaagctactgagagttgtgagaagagagatctttgagagaaacaaatataaagagattaccttctgagatgtggttggaatcgatgaactctgatgtaatcttggcttgagtaataagattgactgagcaattcttctggcgagctcgacagaggacataccctagaatttttgggcgaacctctataatatgtttgttcttcttgatcttctctctatttttttttaattgtgttgcaaatctctgttgattcttcttcttgcttgaatgttttgaaaaaaccctattgcttttcattttgtgtttgatattgggttaaattcgaagatggttctgaaacatgtgaaatcaaaacaatattagtaaagtagattgtgtgtgtatgtggtgtttgaactggtaacatgtgtggttgtgtgtccaatatgtggttcaacaaaagacaaagatagttaaccttaattcttgtctaaattggtattgtgagttggtgtaggtgtgtgtgtgtgtgaacgtgtcaattcctacatgaaccttgtaaaatctggttgtgtctttgtttactctcatttttctttgattatttctctctctctctctctgtgattgaatgtgtgtgtgtgttgggaatcatggggttctaactcaaaaccaattggcaatgagtggagta

SEQ ID NO: 112227 - DNA, 6586 bp, Cannabis sativa
aatgaaatgtgtgaaacatttaattatcttataaatgtttcaaaatcttatactttatgataaaactattaaattaaatctacataatttcccgtgggataaattaagagaatttaatttaacatattatcctaattttttatataaacataataacatccctatggggtaaaattgtaatatccatataattaattataattaatgtccattatgtgatcatgatccacttagtatatataattttatataattaaggatgttgtagctactccctagttattcaaaattatgtagttcagtagacaccaatgtataaacttaagataaaatatttactaaatctaaaattacatgcgagcaaaatattaaatataataaaatcagatgaactttgtgaaatatttaattaaacaattagtttaggaaaaataaaggtttattatctatcttaattaaatttgtgattacactattaaattaaatcctcataattccctatagggtaaattaagagaattaatttaacatattatcctatttaattatataaatataacaaaatccatgtggggtgaagttattatacatatatcattaattacaagttatgtccattaagctgaattatgtttaatatattattttatataattaaagatgttgtgtctattccctaattatttaaaattatatttttacttagatattaggtattgggctcgacttaaaagcaatttcgttattaacacaagaaatttctgagattagtgcccctagtgtggtcgtttgaagattattaaaaattgttctagatatgagcatttgtcaccgtttcatgctttatttttatatcaaaccacaaaattacttacgttttattcatattttataaaaattaatatgcaaactaaaatattcaacctatcttaatgtttgaatatactcttaatatatctaatactatttatgaaatttatatacaacatcttaatcatataaatattaattaattggactaataataaatttttaaaattaaatacaaaatagtacaattattatatgataataaattaaatgagaaattcgataatttgtaattaatggcagatatttttcaaaaaaaataaataaataaataatttagacaagaaattacttgatttggtaaataaatgcaataattgtataattttaaatattaaagtcaagaaaattattaaaattgcatgcctaaataaaatcacgtatttatttaccaaatcatatttttccaattttaatttataccagataacatataaattctaaatatatatttttaagtaaagatgaaaaatcaattaaataaaatttattgattaaattcaaaaaaaataaggaaattaattaatattcgaaataaatgaaaacttatttataaaatttagaattttcccttgccttttttttttgaaaaattgttctcagaaaatgacatgtagttttccttaataaaggcaaatgagattcattttccaacaaaaagatgacactattaccttaaatgacaagtcgtatggaccaaaacaatgggaaatgacgcatcatttgcgtcatcttctctagtaaacctgatcgttttgactagaatatttgcgcgtgggtcaatcagacgtgatcaaaaaattaaattctgacgtctaaaatgcacgaaatcaagtctagatgaatctaaatgacgaaatatctaaatgacgaaattaagagattcatattgatttcatgcataaaaaatatgtgaaaattagactttaaatttacaaataaaaaatcgggtccgaacgtgttcttaaaatatttttacaaattttcaagatttttaaaatcgattttaatgctcaaattcgatctataacatttcatgaatgtgataatgtctaaatgatttgaaataaataccaaaaaataaaaacaaaaaacatttgtatataaaggactgaaacgtaaaaattgtgtatatatacacaataatatactatgattttatcacttaaaaatatgaggaataaataaaataaaatattcaaatcaatattatgtaataaaattactgattttaatgaaaattttatataaacatatatagaaaaaaatatatgtatatatagtgtatgaatttatatatgtatatacatacaaaaactcatttaatacatataaaacattagaattgaaagaatatagcaatcctaataataatatgtttcaaaactaattaaaataattttaacaacaaaatgaatcagaccaattcaaaagaaaacattctttccaactatcatgaacaaccaaaaatgagagttatatatatatatatatatatatatatatatgcatatacacagaaagagaaactcaaaataatcaagacataaataatgatctgataccaattgttagaaaatttatatgaaaacataaagtatacataatcatataaatacataataaacgaatatatacacgatataagtaaatgattgaaatacctctaatcattgattcttggagcttcaatcccagacaatttttaaatctgcaaaagaaaatgaaactgattaatccggcttccaacctctctctactctcttttgatggatttattattttcacagaatgagtagtgagttcgggaaccgagaccttctatatttatataagtgagaccttccattaaaatctctaccacaattaattattagaatattttaataattaattcagaatattaaattaaaaaaattaaatatttaataaattataatctgaccatatatagaatatcaatcaattaattctgttcagatttaataaatataaaatattcatttatcttaaattatttaattggttttattcttaaaatagaaaatattctaatacaacacacctaacgttactaaagtataccgtgagatattaagatgtatgattaaaaaatatgagattttatcttaaaataaatttgtgataaatatgatatatttattattaagtttttgtatattattaatgtgagattttttgatgttcttcttcaaatatatggtgctatttttgctcatatctttgatccgatcacaactaataactctttttagcttactatcatcgaattagaaatgatcttttttgacttttcttttagattatttttttaatttagatcaaatattgttattattttttctgtatcatatttataattaaaatgtgaaaatatgattaaaagattagactgtaatgtgatgttaagtaattctcaaaactgatagataatatgtggagtagtacttattgtattattaaatttttacaaattaattatgaatgtaaaattctttaacaatccaattggtaatatgtaaatttgctgtaaattatgaaagaaaaatgctaaaaggtatcactagtgcttagtaccttctcttatcatattgatattagtgcaatattgaatctcatataatttaataacttttaaaaaataaccatattaagtattagtggcttggttagtttaccgttatgttagttagtctgttactaacagtattaggaaggttgttaggatactgtttatttatgttatacttttcttgttttctgaatcatcatcatgtataaataccctgttttgggtttcttaatacaattcaattcattctttcctaatatggtataagtcgcttaaaaactctttcacgatcgctgccatggcaagaactcgagcaactggttccaggaactccggccaaactctattgccgaacaattcatccttcataccagatgctcctccaaatcctccgatcattcctccgccctctgctgtcaccggagacatcgctcctcctcctcccaatgcgacaacacgacctgtccatgaagatagttcaagtccatacttcttgaattctggtgataatcctagcctcaccttagtcactcctctcctatctgacaagaattcccaatcatggcgtcatgacttcaaactttccgttggtgcgcgaaacaagaccgtcttcctcaaaggaactctacctcaacctcctgtcgatcatccactacatcatcattgatttcgttgtaaccagatggtaatgttctggatactccattctgtctcgtctgacattaaaagaagcattatgttcttggatactgatgctgagatgtggtgggagctcaattcaaggtatgatcagagaaacagtcctcatatcttcgacctcagagaatcgctcatcactctgcatgaaggcgatgactctgtaagttcttactttactaaacttaagtgcatgtgggatgagatccaagaactttgtccatggattccttgcacatgtgctgcttccatagataactttactttcttgaatcaagaacaggttcttcaattcttaacaggtttatatgaatctctttaccctgttagagcttagattttgctcattgatcccttcctttccctgtccaaagttttctccatggttatccatgaagaaagacagtgaaaactcaaatcccctcagattccatctcttattgcatctactcaagatttcgctaccaatccagctattgcacaaaatccctctgcatccactgccaatgcaaatcaaaatcgcaacaagagaatgagaccttactgtacaaactaccacaaacctggccatttgaaagaaaaatatttctttctcatcgattttccaccagattatggtgacaagaagaaagaaacacgggcagttgccaatcaagcatctacctctactgatcctctatcattcttagccaatctgaataaaccagaagacattcaaaacctcaaatataattccaaaggtgaagttgtacgatacaaatatcgaccatttgctaaaggatacaatcaacaacatggtgttgactatgttgacacttttgcaccagttgccaaattcaatgcactcaaacttttccttgcacttgctgccctcaacaactggtctcttcaccaaatggacatcaacaatgcattcttacatggtgatcttgatgaacaagtctacatgaaaatacctaaaaggtatatacatgagggggagctccctcctaatgctgtctgtaaattaaacaagagtttatacgatttaaaacaatcctctaggcagtggtttgctaagttaagttccactcaatcaccaaatgaccattccctatttatcagatcttcccataattctttccttgcccttcttgtctatgtcgatgacatatttattgcaagtaacaatgacttggatgcatctgtttttaaaacctttctaaactcaaaatttcaactcaaggatcttggtccacttcgtttctttcttggattagaaatagctcgatccaaagcaggtatttttgtccctcaaagaccatttactctgcaaattctcactgaaactggatcccttggaatcaaaacagtctccacttatatggaggccaacctatctctcagcacagacattggccccctgtttttgaccccacttcttatagaagtctcattggaaaataactatacttaacattaacccgacctgacatcacctacgctatcaaccgcctcagctaatttctcagtgaccctcgacaacctcacatgaaagctgccacacgaatcttacaatacttgaaaggtgcacttggccaaggtctcttctttagctcctttgcatcaacaccaaatctattccaactttatgccttctctgatgctgactgggggaacctatccagacacacaaatatctatccaccagtttctgcatattccttggctcttctctaatttcctggaagtcgaaaaagcaaactacagtctccaaatcttctgcagaagcataatataggtccatggaaaacaccacatgtgaactcctttggttgttcaacattctcaaaaaattttgcataacacactccactcttgcaacactctattgtgacaacaagatgctctccatatttctgaaaatgctgtgtttcatgaacctactaacacacatagacattgattgccacattcttcgtgatcaagtcagccaaaaacgcatcaaattagtccatgtaccttcaaagcacaacacaacagacatcatgactaatgctcttttcccatctcaatttagtttcctcttttccaagataagtgtcattaatgtatacacttcatcttgaggggcagtaatagaggcttggttagtttactgttatgttagttagtctgttactaacggtattaggaaggttgttaggataccatttatttctgttttccttttcttgttttgtgaatcatcatcatgtataaacaccctatttttggtttctcaatacaattcaattcattctttcctaataataagaaaagggtatcatatctaaacagtattgtgcactactaatatccaataacaatattgattatcacactactacaatgttagtctttagaggctattttttcacccccatttataaaaagggaagctaaagg

SEQ ID NO: 112228 - DNA, 4085 bp, Cannabis sativa
tatcataaaagagtaaatcatggaatgggatgtaattttaaattaaatcatttaggtatagatataaatagtatatataagtaccttatattaagtttgatatgagattttgataattatttcagatatagtgtgtagttatgttaaatcccccaacattaaataccaaaaaatgcataaattattaaattaattattatcataaatatttaattgtatttccttttatcatcataaatactgaattgttttttctttaattacattaattagacaaaccaccatgagttttcacttcaacataccaaaattcaattacttgatgacctcccaaaaataccctaactttattactaactttgcaattgattagaagtaataaaatagaatgaaattaaaaaaaatgaagtttcattttattcttttatttagttacattttaaaatattagaatgtaattctattaaaataattttttcggaagaatgataattttgaaataaaaagaaacattatttcaatgcaatatgaaaacttattaatattttttcattttaaattttattctatttctattccctttctctttccgattccacttgtatgatttcttaccaagcactagccattcatacaaaagtagcagaatcacaaaaaaaattacacccttttcagtacttgacattgcgattgaaagaatttacagtaaatgttatgtatgtatgtatgattatgaacaaatccccactcccaaaaatatagatttatgtaaataatatcactctttgtgttttgctaatataatacattacgctgagataaatttataactatcatcttcaatcccaaaagttatatgtctagtgaaccttggatctccttgaggaaaattggatgaatggtgagaagtaggaggaggatgaggtgggaaggctttttctctgaactcttttcttatttcccataaaacctcaccacattttttcatggaaggtcttgaatttctcaaaggagctacgcattcttgagctaatttgagtactctctctaatgccatgtttgaagctggatttctccttagtcttggatccatggcaagtactggttctccatgtttcaacttctgcattgcctgcataattgaatatgaatgtgttataatcacttgtctatacttctatgataaaatataggttttttcctatataccaactaagtttgcagttctatgctcattgtttagaagattagtctgcataaatttcttaagggatacagtatttcactggccctttctatgctatcaaaacttgttcttccatttttgataatatatagtcagtcatctatgtttaggtccacagatcacatgaagaaaatagcaagtgatcatctaattaaccagttggcttcttcatgtgttgaatgtcttcaacattatggtatgaaaactgcatgaagatatcctaagcttcatgtatagtataggttatagcaagtcatagagaaaagggtatatttgctttttttaaaaaagccatttgtgataatattcaccacttccatacagctcataattttaaagatcagataaaaaagaggtgttatctactacctactaaacggattgccataataacagtttttattattagcataggttaaatttgcttctggttcatcttaatgttctagatggatattttattctttccttaattaacatctctaccagacaaagcgtactaaagttgagctaataacatgtcttcatatgatctgacaagtagattattaaaatcaaaacaaagattgatttgaaggtttctatagtataatgcaagttttaacttctgacaatgtttgatttgattgggaacttagaatgagtacttacccatcttaatgttaatctctcactatctggtttttttgtttcaatgggctgtcttcctgtcatgagctccacaagtagtactccaaaggagtaaacatcactcttatctgtcagttgataagttctaaggtactcaggatccaaatagcctgctgtgcctttaacttgggttgaaatgtgagttgcatcagtttcttgttctgcagttctccgtgcaaacccgaaatctgccacttttgctcttagcttctctgtgatgaggatgtttgatgcttttatgtctctgtggattattggaggatctaccaaaatagcatgtgaagacttcagatatttaaaattttataaatacaataatgtttagttttacatttctatttgatatttcaatggtgcatcaagtttaaattggaactggtttgcatacctgtgtacatgtggagataggtaactgcatgagctacatcagttgcaatatctagacgctcggccatttctagtccatccccacgtttaccttcattttgaacaagatttgctcttatcaaaaaaagtgcaatggttaaaaatatcacaaagttttcctctgatgaccctttggactatttgaccatacaaacctgagattaatgaaaacaaatacagcaggaagattggttctccatctaaaccatcctaaaagctcccaaatacagttacctgtgtggattggtttctgaagtttgtatttaaagtcttactacatatataatatggatatatttatatatatatatatatatatatgcagacttaccatctaaatgttccctaagtgtcccattgccaacatattcaaccacaatgatcctctcatcttcatgctccaaatatccatatagcctcaccaaattcatatgctcgatagtagaaagggttaaaatttcattactgaattcagctgatatagccctgtcatatgttttctgcaacagtcaaagattgatgcaaatcatcaatacttactgatgagcaaatgatctttatccctataagcttctaaccatgatttaagaagtgtacaaattatgaggaaaaattaaaataaatataaagtgtttgctaacaaaatctaccttcttagcacgttttacagctatcaatgtaccattttgaagtaaccccttgtacactgctccaaatccaccctcacctagtttatttgccagagaaaatttctgggttgccttattaatctctgcaaaagtgaaattgggtgtcccaatctttccactcgcggcgccaccattagagccatatgactcagataatctgtattttgatgatgaatttctgctatagcttcctgttgaaacatcactaggagctgcaaaacacaataataggagaatttaattattggcctgcagatccttacaactacaccattagaccagttcaatcaatctaaaacgttgaaacaaatgtaacagttttgttacatgaattgattaataagatccaacccctttactatagaaaaacaaatgaagaaccctttaaaattggcaacaaatgaagggtaacttactggaaactcctctgaattggccattattagtggcttttaagctggccttgctttgtttgaagagaaaagccaatgtgataattccagcaaatttcttagctgcagccctgatataactaagggcagattgagaactttggccttttttcttagattcattcctgtcatccccatgtttggatttggagaattgataattttggtttaattgagggctataagaaattggacttttcttcatttgcaggcagaggtttttgactcaaaagaggtttttgaatctttagattgttatcttaagaagaaaatactatgtattagttgcagaattcaatcattataacatttttaataaagtgttgtaggaccagttcaagcaagtagagtcgtgctcgctttcatttgcattgatttccatatccatttggcatcaactgtattttttttttaaagcttaaattaagttggtcaaacagaaaagtatccatttggtgcggctgcagtactgggcctctgttcaactgcacgttactcctcacattgacagcccaagcccagtttctaagataataatgatagggacttttcacttctcaggagaatttgaccagttttttt

SEQ ID NO: 112229 - DNA, 3588 bp, Cannabis sativa
tgtcaaaattcagttactttgtaaaaagttccaaccgtttgtaatgttgtatcatattccacaaatgggtgtaaaatctgtactttatagacgaaggatcctattaaaatctgaccaaagtcttcttttagaaaaaaaaaaaagaaaaaaaaaagtgaccaagtaaaccaataaaacgtgtactgaatgaatgaatatcaccctctttgctttgcactttgcatttagatttttttttttttttttggaaggatttagatttcagtcaaggtaaaagttaaatcacaaaatctaaatataatttattttcaattgctttcaaatttaaaaataattaatgaaattaattatatatatttttgaaaggtatacatacatgtatattgtatgagggaagttcttgtgtttttattgatatttatatctttcaattcaaacaattcaaaaatagaaaattccatcttccccaaacattcttttcaccatttactttgattcgaggtcttctttaatctttaaaaataaataataatgataaaatatttgttaaattagggaattactacatattccaaacaacaacattggcctaacattcacttacatttcacacaccataacaaaaaatagaaacagaatcgaattcctattcacttcacccattaaatacaataataattataacaatatcaaaaaagattttttttcttttgatgaaatatccataattaattaattatctaaattaataccttctggaactcgtgttccttggaagagtagcaaaactaggagccatgccaaacgacggcgttttatcattcccatcgccagaagaacaatgctgatttagacccaacggttgtgcttgttccgaagctctccacatcttcaccgacttatccaaactaccactgtaaacaatccaccgcctctctcctccaccctcctccgccgtattattattattattttccctctctttctcgacagccaaacactttactggtcccatatgaccagttaaaacagataaacaaatgtggtccccacctttaacccttttccaaacacaaatacccatatcagccgagccactaaacaccaagcttccagccgtagccaaacacagcacagccaacttatgacccctcaaaacgccgccgtgtgataaagacttatctctctcccaatagttaacggctccgtctgatgatccacagtaaataaaagtcgcttcttgattaaccgttaaagccgtaacggcacactcttgttttaacagcgtttgagaaaagaagtgtttcgttcctttaccttgatattctctccgccacactttaacggttccgtcagctgagcctgtgaataccaaaccgtcgaaagccgttactaaagcgttaacggcgtcatcgtgagcttgaactgattctaagcatttgaaatcggagactttccagactttgaaggttttgtcccatgaagcagagtaaagaagagtaccatcttcgctcaaactaagacatgagattgcatcgaagtgtttaatccaaagaacgttacgatgtcttctaacctcgacgtaattactcggtttcatcgaacattttatgtagtttttcaacgtgggcaaagtcccaactcgtttataattcggcgtgttcttattcgagactttccaaactctgatctttccatcttgatgaccggtaaagattctgtcacccgaaataactatggctttaaccaaaccactgtttgatttaaaaccagcgtattctctctggtttttccataccctgatgttcttgctatcggaaccggtgtacaacaagtcaccggcggcggccaatgaatatatgtgaccttcttctctgacgagagaacccataaggacgttggagaagttgtcatttcccggagatggattatggctgacgtgggttgaccaaggtgatttggcgtatggtgacatggagccggaagcttcgtcgtctacacctccggcggctgagtcaccaaatgggtcagttggaggacttgttaatggagtaccttcgttattatcacggtcgtcaaaatcttcagagttctttaatctgccgaatctttgtcctcggctactgaattcatctgtaaatatacgaccccctgttctcgacgagcttttcttcatcatattttatagcttcatcaaaaaataataattatatataaatataatacatgtgcgtgtatttattatatatatatatataagtaatagctatggaagaagaaaggaataaagaagatttttttttttgtacgaaggaaaccgaaagggaaaaacagagtcaatcgaagaggaagacagataataaaggaatgtttatttaaatttctttctttctatgatattattattattgttattattattattattattgccaaaaggaataagaattgaggaattttctatgatggttggtttgagagagagagttgaggaaagaaagaatggtaatggttgaagaaaagattatgtcctgtaatgttaaaatctatttttggtaattttctaaaataaaaacaaattctaaaatgttctaattggatgggttccttgtccggttgtaaacaaaacattcgttacgctgttgaaattaattgaaaaaaatgagtcacctttcagttgacttgttcaattaaacatctcttaattgtgtattaatgaaattaataatttgttaatttcatagactatataactattttacaagccaatattgcatggtgataaaatcagtcatagactcgtagtaatttaataaattaattgtaaacttagaaatgtgattaagtaaaaagatattattaacttaggatataatgtttggttaccaataccatgcacttatttcttttatttaaatatacattttacttccacctatttatctagtcccctttcaattttttattttttttttaaaaaaacaattttattaataacaattatctaaaataataccatcagaattagaaaagtagtcaaataattgtataattccaagatcgtttaataaaaaaattatattaaaaaaattatagcatcacagttaacctaaaaaatatttatattcagtttcatctaccgcttagaagacaaacataaagttgcagtaggttcattcaacctcctagcttgagcactcaattattgtacaaagtacgtaattgcactattaacaacccgtcaattgtagaaaacttattattcccaaccactaatagcaatttgatggcgagtcatcgaataacaaagaagaaccaacaacgaaacaaaacaaaataaaatcatgtcacacagataaaactaaaacacttaaaaccatgtcacaaagacaagattgtaagaaactcaaaaccatatcacaaatagaagactaaaacactcaaaaccatgtcatagagacaaaactaatcatagtagcgaaaatcgaatcacaatagcaaaacacaaccctaatcaagtcgcacttatgtcttgagaaagtttgcgggcctagctaaaaaaaaagacaacctccggtaaatataaat

SEQ ID NO: 112230 - DNA, 3925 bp, Cannabis sativa
caggaggattttggtttatcctaatgggttagcagaaggcaaaggaacacacatttcattatttttgcaattggagatttcaagtcttccaccagacacaaaactctttgttcgttacgttttgcgtttgaataaccaaactaattatactaatcgaaataatttcgagacaaaaggtgatagagttaatttgttttatggtgctttaattatattaatggtaatgatcatgatttattgaaatatttggttaattaatactactgtgtgttgcgcagccaggaactgtttctcatcatccagtaacgaatggggttttcgacaattcatgtcactggcaaagtttgaacacttagaaaatggatttattttgaatgacacttgcatcatcgaggctgagtgtaaagtgctagggattgattaataattaattaagaaattaagactgattatgtagtgttggaaagtggaaacggatagtttggtgtgtttaagcaatttggagtaatatgcaaatgctattgagtttggtttattggcacatgattatagcctcaaattgcttaatattttcgtgtttctgtatgttttgttgaacggtctgcgaacgaaatcactcattgtgtgtggctctttttttgtttagattgtgtaatgtcaaacataagcttaatactcacaagaataatagagtactattttatattgatttttaaattaaaaaaaaaatatagaatattattttatgctaattttcaaattatatgtagtactaaattcaaaattatcaatttaaaataagacatcatccttcaaaaaaataaataaataagatatagtattgggaaatatttcaaccaagagggaattaattactaagcagacaagggctttatagttctcaaatgagagttaaaaatacacaaaacatatgtaaattgagcattatagaattttttctctcatttgaatatatatgacttagaattataaaaccattagttgttactaatgttaaattggatgttaggggccatagaatcaagtaattacattcacaaaatgctagctcaaaattgcatgtgaaagattggccaagagacaagtcgcctacgaaaatcacttaaaacttgttgtgataggtaaccagttacattattttcagaattttgcaaattaactccaaattgttcaaaagtttctacatttacttatacaccatttatgcactttataaattatacaaatatgtcctcaacaactagattttcaataactactactatttaatcactgttttaagagtaatcataatggagatgagttacaaatttttataagaataaatattaaagatttgtaactccttttagattgtcactcacacatttctaatttcatatttttatgttacaatttgataaatattagttgttgttatagtgcgaacaccaacatcgattgagccaattagtaattttgttgtcggaggaatttagacagtaccaaaaaatgcaagtattcgtggaaaattgtttgtattcggacaaaaatattcttacttttattctttaaacgtttgtattaattaaattatgtaattcatgtaataaactgtcctgtctggctggttatgtaagatcaaatgatacttgctttctatataaaggagtgatctaaattaaataaattaagctgaaactattgcaaaattggatcagtcagaccgagctctgactaaaccactatacttctttgtctttttgatttttatagttcttgtttttgtctatttagcagcctaacctttgagtatttgttgttctaagtgaatactcgcataatagtaagtggcgttcttgattttgcttgaataatcgtattttttagtgttgtctaaattcctctgataataaaattcttgtttgaccggttatgtaagattaaaggacacttgctttctatataaaggagtgatccaaattaaataaactaagcttaaactattgcagaagtggactaagcaaattgaactttgattgaaccactaaacttcttcgtcttctttatttcaatgctcttgtttttgtctatttagcagcttcaattttgagtactcattgttctaagtgaatactcgcataactgtaaatggtgttcttgattttgttcatatactcgcattttttggtattgtctagaaacatgatcaagctcaggtcagagttgtagcataccaacaatgtactgtgcattatttcaactcgaaagtcaagaagcgaagtttgcgagtaggatacttagttcttcgtaaagttatgcctaacactcacaaccaacacacatggggttttcggcatattgggaagatacaagcaataattagaattaccctttcgaaacacttgacgagacactcaggcgtcaccgcgatgtgatagagtaactcgcctatccctcgagatagtttcgccattaacagacaactatcatcccgaaactaagggcatgcatgtgttatagtgcaaattttttgcctagaaatacaagtacagcctcctgaaaagtaattgacacgtggacctaattcccgagggaaaaggatgacgagtcactagtatggctctcgtagagctgacctcgcatgatgtaaacttgcaaaaatatgtgactgagacaggatctggtcgcatattatgcccaacatttttgaaagataaggatgaccaaaataaattagtataggtcacgcatatatcgattttatatgacaagtaagtacatctctcctgcaacacataacgaccatttctttacataagtttggtccaaaagacttgtgtgttcgatggcctgataggaacttgtaagttttaagttgtcaacgcatgaatgtctggatatgcgagtagaacaccctagagcttgcgagctcgtctgtttagaatatggaaagtcaaactgtgactttgacaggtcgcatacgtttaggcaatcaatcaaacacgaacaaaattgttcttacatttattctttaaacatttgtattaattaaattatgtaattaatataataaatagtcatgtctgaccggttatgtaagatcaaatgacacttgctttctatataaatgagtgattcaaatcaaataaactaagctgaaactaagcagaccgaactttgactgaatcactatacttctctgtcttctttattttcatattcttgtttttgtctatttagcccattttaacattagtacattagtaccaaagaagtaaatgctctaaattaaattactcaaattttctataaaatccaccaacttattatcctatcaagacttcttccttaaattttcctcattaattagcttttaatttatgcaaacatgtagttgcattgcacctccgactgtacattaattattttcttgacacttgcgcaaaattaaaacaaaacgacatctcatgacaaaataaaatgacatcagaacattattatttttgaactagcagtaaaatatactccctaaaaaaaagcagtaatattattacttattagtattatataggggaactgaaaagacgaaataataataattcattaattagacgaaggaaaagttgtaattaatgggataggaagtggttttcagtgaaataattatttaattgtgtattcattatatatattaaagcattgctataagaatattttttattatgctctagacttcaaaaaataaatttcaacaaatacaacttagaaatagctcttttcaattcgttagcaatatttcataagaattattatattaagttataaagaaactgttggaactttgtatgaaatatgtaaaaatagaaaagtgaagtgtgtgagtaggagtcccacatgggatagaaacactacattttaagtg

SEQ ID NO: 112231 - DNA, 2552 bp, Cannabis sativa
acgcgacagaagtaactttcttgatcaaagagaaaaatatgcaaccctttttaaacttacccagagcaatttgcatcttgtctgtcagaaataggcgtggttttgagactctatcagcaaaagtatccaaaatatcttccagtctccttcatgaatccagtagaaaaagaatgtcacagaaataaatcgtcaatcataaacaagacgtaataataatcattccatgattgactgtatagtctgtattgggattctgcaattactgtacatcattataaactaagaattagaggaaaagcaataaaagatgcccagtaaaactgactagctatgccaaaggaaacatgtattcttaaccaaaaccagagagtcactttaagttctctagttaccattaactcaactataattgaccagaattgtaaaaattgatcttataaccaccctaggatgtactactataacctaaaaatgtttgtaaacaatttacaaatctaaagctcttccagaatttatcttggcatttccagtacatttatattcccttcccaaatttcttcaaagcaaactcaatgtctattggagctattagagaatgctgatgcgtccaaccctattgcatcatgactgaatgtgttgtatgtagtattaccaagaaattgttaccatgtattagaatgtgtaaacatggtttagaaaggaggatgtacagaattccatcaagtggagtagcccatgcatattatatatggtgttaagttttcacaaattattaatgtgggactctctaacaccatacaacaattaaatcacgtttggaaattaggatatgactggatcatttcaatatcaaattggagatattgaaaatttaatgaacaaccaaaataatcctcctggctaggtaatcccattgaaaattttgaaaatttgggacaaatcaaacctatctaatccccatctctatccgtttctatggtaagaaaaaagagttgttacttagaatccaatctaatttcttctaatctattgttagaatatgatcatctcattcatttttctataatttcttatatttttcaatccaacaaggcaccccatcaagactactaaactataaaactaaagtgatggtttatgtaattatcaatttaagaatgcaagagagagtcagatttccaattctagcaaatgaaaaagaaagaaatgagtccaatgcaatcttgaaaaggaagttggcatgtgtagcttaaattcgtatgtgataatcaagttcatttaactacataggtataggatatccaagaaatgaatgagtaatggagaatgaaacatacttgtagactttccagaagagaatccgcaggccctcttgaaaggcaaccgcggtgaataaaaggactccataaagccaccatgtatccgatttcataggaagaaacgccctccatagtccagacaatatgatcaggcttattagccataacagggtactgaaccaaaacaaaaagagcttttctaacttccatgaattaaaatgaacagaaatcgtttccatacataatatttattaaaattgaaagagtaaaagaactagagaagaagaaatagaaaaacccttaatttgaaaataatattataataagaccttgagaggacggtgaggatgagaaaaggctttttggagataactgagaggaagagggaaagagaaggtcccaatgctatcaaggcatacccaactcccgctgcaaccgtcatctcattcgccctctcttctcttctcttctttctcttttctttctttcttcactccattctagcttaacatcctccccaatttttatttttattttatttttttagtaatccccaatctctttttaagaataatctaactttaaaaaaataatataatgggagttctaatgtccacctttgtttttgttgactcacgaaagtccgaccttttgtttagtaggtaatgaccgttttttttttacgtggtgaacaaagtcacacataattaataaagtagcaaatcacaatcggcgttaaaacctcatcgaattaagatagctcatcgtctaaccgaatgacatgttttatcaaaccatgagctacataattcttatcacgagtcacatagaacaaaactgctccggaattttagacaataaaactataacgttttcaaacaacacctcataacatttaaacaacactttctcattgtttatagttgtcgccaaagctaacgaaactaaaaaaaacatcacaaactaaaccaaaaattacaattatattagaataataatatttaaaataaaaattaataaacaaacatagaatttaacacaacccatatcactagttgaacattactaaaatactaaacaaccaacaaaaattctaaaaataattagccaaaggtactatcttttggctaacgtatatatgttaggcctttagatagtatgaattaattgctaccacatcagtacgactagggtattgagtataggttggattcgcggttagtcatactttgt

SEQ ID NO: 112232 - DNA, 2350 bp, Cannabis sativa
gttaattgttaatttatctatcaatatcaagacttatcaattctccattctttttagtattaagagactcccacattctacaaactctaatctttatgctccaactatctggatcagtatttaaggcggtaagaaaagaacactctattatgagagaaaacaagagagaatataagagaagaagagagaatagtaaattgaaatatgaaattaagagaaataagtcagagtatatatagaagatttgtgatagaaaaaaaattataaaaaatattaaaaaaaaaaaattcaatttgaatacacgcctcttgttagtttagttgttaataattaaagtgaaaaaatcttttttcaatataatataatatatatagtgaagtttacgtgtatgattatatatataatatataatatataggggaaagattcagtcacgcttattaaggagagtaacatgttactctactttgatcataaccattgagtgttgtacaattatatcaaatggctgaaaacaatcatagggaaagtaattaatttttttaagaaaattctgacatcaatttaattcatgacactaccagtaggggtattgcacttttccctccaacttccggtcatctatttgacgataaaaaaaaaagaataaaagtgaaaaaacacaaagaaaactctatttcttctcactttaaaacctatttacttaagaaaaccctccatctaaatctctggctttaattcttcccttcttcaacattctcttgctagttgaaaaaacaaaattacagcaatcttctcagtggtgatttggggattctcttctgctccatgaccatctaacattgccggccaccttctccttcaactaaaatctaggttttattcttcttctttttcactgcatattcattttgtttgttgtttttcctgtctgatttttggtatggataattgttaattgaatcttttgtgtcattcattgttagacaatgaaaagaaaaagaggagttggtaaacttggagcattttgccagaaagatttggcaggggacaatattgagatagaaaaatcacaaggttgtgatcaaaaggtgtcagggtgctctccccaaaagcaagctactaatatagtgacgagaagctctttggagcgtatatcccgacttgtgcacaaactttctgtagcacagaaaactaaagttcaagaaattggcttcggtgcgtacttgagagaggatttccctgcaatgtgcacctctttagccaatatcttagtgaagcgtgtggacgtatacaacaattgtcttaacctttgtggtaagtcgtatcctatcttcgcttctattttcaaagaagtgatggctttgcctgatggtccgatcgtgataaatgagaagctcaaggtccccaattgtgaattaaagttgaaaatcatgggtaacaaaagttgtattgagttttcttatttagaaggtcaactgctagagagcactgtagctgatgattatcttttcgcattatttgttttggtggtggtggtgcatgtctagttcttgggtccggtaacaagttgtgcactaactccatcaattgtgttcttgattatagccaaattagtcagtataattgggcaacgcattgttttcggaacttgatgagttcgatcaaaaaattccaagataatggtatcactcacattaatggttgtacagtattcctataggttttttcttacttatattttgtagttgctgtctttcattctatatacataactttagattatgacttttatcaatatgtttataaatgttcacagtatatgtactttaagaatgtccttgttcctaatttttacattgaccgatcggttctggcaataagtttttggaataatagaaattgtagaaaggcaaagaaacaagtgatgacatatggtggttatttggagtatgcaagagtgggtaattgattatgttttaagttgtatttttttatataggtcagttaatgaaataaattttagtctaatcctttaattttgtatctttaggaagtcgaccgtacatcgaataaacaatctggaaaagagggtggtccttcatgttcctgtgatgatgctcttaagatggtgaatggtagcctagaggctatatcagtgctaatggtcaacttacccgaccaaatccgtattgttgtcgctgaagaattaaagaaagtacttgaaaatctaaatatgaaaatgatgactcctgatttacagaatgccacatagggtgtggatgacgcaggagttaatgaaaatgagttagtggacagtagtgttagggtttatgccctaaataaaact

SEQ ID NO: 112233 - DNA, 6783 bp, Cannabis sativa
gtccagtccagtccaatcattttcagtccaatccagtccaatcctgcgtaccaaacgggccctatatatatatatttatatatataactgaagctggacaacacaataataataagaataattgagccatatcgatcgtcacgtacgtactcaagcatattaaatgagacgacttatttattttattttttgaaatgaacaacaatttaaaaggggtgtgcatgcggcaaaaatgtcaaagcaaaataatacatctcttaaatataaggtcccccacattcatattcatcatcctatatatattttcttcaacagaggttgatttaattggtggataagaaaatgatacaatgtacttatccatttttatttaaggataaattaaatcgtgacaacaataattattgtaatatcaccatccataaatctctcttgctcttttcacactatataacctttacaattacatacaacagtaataaaagtttgtacatatgactatatataaaagtttatactgttttctgccatgcatgaggatattgccaatttgtacatgtattgctctaaatatgcttgtgtgtaacaaaatctataatgcactttaagattatacacttagccacaatcatcatagtctatgatctcaaacaaggaatgtacaaaaaaagtgcaaattcactacggaattcccaagtgtgaaaagaagaatattttgttaataattctcatgcaaaaataattgtgagtacgtgtcaaatattagcatgggactttcggttggtcataaactcacttaagccctttacaagccactgtctagtcaacacgtacacccatatacatatcccatttatatatgcaaaatatatataataatatctctaccatgtccctgctagccgaccatttgtttcagctactctttttcaacgtgtagttcacccaccattaatacgtgtcacatttttattttaattctcatttaacacaaacttctctttatagtaatatttagtagactttactactactgatctgtgtctactctttttatttcttccccataaatatacaccaaaatgaaccattttccaagctcggttcactctttctcaaaaaaataaataaacaaaacacacacactagtccacatggcctattcttgcactttattaaagtttttgtaccatttggccttgttgggagtcttggttggttttgagtatggctcagtagctagccaaattggtctaggttcgaggttgttggctcgggacaacaaagcttgggtctctgacaatggtacttttgcctttggtttcactccaatggagaatggagattacaacaaacttcaattggcaatttggtttgcaaagcttcccggtgaccgtacagtagtctggtcacctaacaagtaagtactgaaactttcatatatatatatgatataatggtagtttttagcatacactatgaatcaaaaactacacaacaaaaattgcaccatcatctctagaatacgtagtttttatactaaagcttttgcaggtgaaaagttatgaccaaatgatcaaacaaaatttcattttctctcaatcttatattgtctaaatatagagactctccggtcacaaaaaatgcaatcttggagctaaataccgccgggaacctcattctctccgacggaagagccaccaccatatgggcctcaaacacatccggtgccggagttgaagctgccaccatgtcagaatccggtaacttcatcctatataacgacgtaaaccgccctgtttggcagagcttttcacacccatcagacactctgctcccaaaccaacctttatcagtaaagttagaattaacaacatcaaaatcagactcaagtggaagctactacgctctcaaaatgcttcaacaaccaacttcattaagcctagctttgacttataatctccccgaaacgtttgactcttcaccggattcttatgccaattactcatattggcaaggacccgatatatcaaacgtaacaggggatgtcattgctgttttggacgaaaagggtagtttcggaattgtctatggtgaatcatcagacggtgccgtttacgtgtataaaaacgacgaagattacggtggtttatcttctgctactaaccggtcgaccggcttatcagttctccggcggttaacgcttgagaataatgggaatcttcgtctttatcgttgggacgacgacgttaatgggtcacgtcaatgggtgccagaatgggctgcggtttctaaaccttgcgacattgctggggtttgcggtaatgggatatgtaatcttgacaaaagtcaaactaacgcttcttgtacttgtttacctggtacttccaaggttggaaatgataatcattgttcggagaattcttctttgattgggaagtgtgatcataagcagtcgtatcagaaatcccagtttaggatttcaatggttcagcaaactaactattattactcagatttttctgtcatagcaaattacagtgacgtaagaaatgtgtccaagtgtggtgatgcttgtttatctgattgtgaatgtattgcttctgtttatggtttagatgatgagaagccttattgttggattttgaggagtttggattatggagggtatgaagatactggttctactctgtttgttaaggttagatccaacggttggggtggagaaggatctgaggattcttcagatggtggtttgaataagaaagaaaaggttttggttattcctattgttcttagcatgattgttcttattggcctcctttgtttgttattatactacaatgtgcatagaaaaagagctttgaaaagagctatggaaagctctttgattttggctggtactccaatcaattttagctaccgggatttgaatattcgtacttggaatttctcacagatccttggaactggttagtacatatgttttatttagtcaagatttgttctttagtgatgaacttatatggtatggttttgttttcaggtggatttgggactgtttacaagggaagccttgcagatggtactttaatagctgtaaagaaacttgacaaggttttgccacaaggagaaaaggagttcataactgaagtcactacaattggctcaatgcatcacatgaacttagttcgtctttgtggatattgttcagaaggacaacatcggtaagaaatagttgattttaatggttgatttcattcatagcaaatgtaaaagactcaatggatgattattttgatgatgatgatccttttttacaggcttctagtttatgagttcatgaaaaatggctccttggacaagtggatatttccctcatacaattcccaaagtaagatgctagattggccaactcgtttcaacattgcagtggctactgctcagggaattgcttacttccatgagcaatgccgtgataggattatacactgcgatataaaacccgaaaacattcttttggatgagaaattttcgcctaaagtttctgattttggactagctaagttgatggcaagagagcattctcatgttgtgacaatggttagaggaacaagaggctatttggctcctgaatgggttagtaatcggcctataaccgtgaaagccgatgtttacagttatggtatgcttcttttagagattattggtggccggaggaaccttgacatgtcttttgatgcagatgacttcttttatcctggtttggcttttaaggttagtaaagacagagtcctctgtttttttgttatcctttacttgttgtaatctaatgaaaatgaataataattataatggttgtttgtaggaaatgacaaaaggtaccccattgaaagctgcggataaaagacttgaaggagcagtattagaggaagaagaactcaatagagctttgaaagtagctttttggtgtattcaagatgaggttatcatgagacctacaatgggagatgtagtgagaatgcttgaaggatcaatggatgttaacatgccaccaatgccacaaacggtgttggagttaattgaagaaggtttagatgatgtatacaaagccatgaaaagagaagttaaccactttagctctttcaccataacaagccacccttcttctcgtgccacttgtagttactccacaatgtcccctagataaaaatacatattattcaaagttggaccccacaccaaaagtcaaactttttgactttcaatgatcacccaaaatttttgtcaacctaatctatactatatcaatcaatttattcagatgtggcaagatcaaatttttaaaccatatagtcaacacaataattttttttttttttttttgtcatagcaatcattgagttctttttttactagtttagacactattcttgatagtagaactttgaccaaagaatgacacctttgattgagggtgtcattgctaccaagccatcagggaatggacactgtggtgctgcaattaagtacacattcttgccttgaaggctctaccatgcaaggtccttagccaaatcaaaatcgattccatcctgaattgcatctccaaatgatcttgaagaggattgccctcctaagaaattgttccaaagggatctgctatttatttggtgtcatcagaagacgagagcgagtagcttcccgcgcggccgcgcctctgccaattaagagccttaccttgatgactttagcttgacaaggcttgatttgtgagcttaatttagtgcaaggtttaaggttggggttttgccattgccaaatgaagagtggaaagctatgtttaagaaatcgtagttgcttgtggcacaagtttctgctggtgtgccttctttgtcgtttggctccagtaaatggcaattccactagcattagatctcacagacaaaaccaaaataaccattagagaaaggaagattggtctttgtgttgtagtcaactcatggccgaatgggaggtcatcatgtgtttgtgttgttaattattacttagaaaattgtctctgtttttgtcatttatattgagaagaaaatagagaaaaggaatatttgattaccaaccaaattaataatatttagttgtgtttactaggacgttggagaacatcaatctttacggatttatttttgggcatcttcttaaaaggtctcataccattgaacccaattttttctatttctaatcaatgtgggactttaattgtacatccaacaaggcaacaatcctctctccttaaagaaaggaccacattgtctctcctcaaataatcttctatccgtccactctccatcaaatagtgtatacttccctccaatacgttagagcacacaccttacatggagcattatcactacctcgagagttcttgctctttctcaggccaactcctctatttagagcacacccacaaatcacattgtgagattattgaggttcatcttctttgtttggcatttgagaattcattcacatggctaactttggaattcggctttgataccacttgttaggacgttggacaccatctatctccacgctggtatgatattgtccactttgagcttaagccctcacaaatttgatcttgggtaccttcccaaaaggtcttataacaatggacacgtataatattttccatttgtacctaatgtgagactttagttgcacacctaacaatgttcatttagttacgatatggtgttgatctggtcgttcgtcgtggcattgacataagttaacaaccacttaatgttattcatatggtgtgatcatctctaattagagatgtaaatattatatttggcaaaaaaataaatttataatatatttgtattaatttttggtattctgttccaatacataattacaaaatttgatgtaaaatttaatatttttataaaaaatataataataataataataactttattataaatttttattaataaaacaataaaaaaataatactataattaaatatactaataaaataataaaattatatatttatggtaatataaattttactatgtgtcaaatttatcatattttaacacactattgaacaaattttttattaagtgatttacattttaattttgcatgcacaagcatttttttaattattatttttattcttataagacaatagtcatatttatgatcaataattatttgaatatatatcttactagaaaattggcccatggcaagtcatgaaggtagtatctagtataggtacatcacatagggaaaaataaaattgcaagaattatagaataatataatttaaagaatgaaaatagagaagactgttaggttatttttagtattaatgttagattaaatttagtatatttttaatttaattttactcgtattaggagcaattttacgcttattattttctattttgcagacttaaaaatagcagaatattagtaaaatatcaatgaaaaaagataaaagattgcaaaaatatatatgtgaaaaaaattggaatcctgcttagaaataaaaaaaaaaattatacacgttgaaaacgtgagcaagggagacacgggccgcggccaggaatgggcatgccacgacccgcatatggaaaatcaagtccccacatgtgaaaaccacacacgggtcgccagtgacggacccagaatttttattttgtgggggcttaattatcaatgaaaaatatttatacctatattataatcattctta

SEQ ID NO: 112234 - DNA, 1751 bp, Cannabis sativa
  modified_base (1458)..(1459): a, c, t, g, unknown or other
ccttatgtgtttaattttattgttatagagatattcatatttaggatgttaattaacatacttgtcagtaaatcactctattctcaacagttacaatgagtataagcactctattctcttcttgagcaagtaagttaagaatctcgaaccctttccatgaagaattcagtgtgtatttatcgattagtataggtcttacttagttatcctttcactctaatggggaatttacagttaatacataaatttaggcttatttgacaaagcccagcccatgaggcaatacatgtatgttgatgcagagatctgatcatggtgctagttgttcataccgtgtcctttgattgtgggtatttaatgtagtattaatttcttaatctttaattattcaattttattttttacaatgattttattctctatccgagatttaaggaaaataattttttattctgtgcgaagcagtaaatagggaactaggcctagctttcggatacatgctaggcagctcttgtaggtacatggagttggcactcttccataggctaattagacttgacggaagctcatttggcgaggcacgtggttgttctcccggaaggacataacaattgggcttagcccaatttatgttatttgggcccactgatgggctttaaacttctatttaaaatccacgtatgccatacggaaacatggatagcaagctcgaataacacaattagcttaaatcttaatcatgccaatatttagatcgaattaatttatgataaactaagtggtattgacttaaaatattcaaagcatataatcataattattttctaccgtaatgacgtcactataattatgaataactatgttcacgatttaataatttttatatattagacatataatcacgtaaataaatatgtgaatcaagcgactaattaaattcaaaatattatttctgaaatttttgatttaaaataatattaaaatgaatttatattttatttaagtcacagaatccaataataccaaacttttaagaaagacatgaaaattatgcacatgataaagtaattttaagaaaattaataataattagaacttatctcatgaaaatctttagatttttgaataatatcccagtcgatcattatagttccacctaattcgagtttaattgtggagcaaaaaatcaactccttattattgactaatttttgtactccatcaatataaatccttcaccatagggaaagggatctgatcaatcttgtatgcagaaactctactaaaatcattgtgtattctctttgtattcaagatactcacttgaggcttcttgtgatcttgtatacaaactcaagaatataataccacgaaaaaggaaagtagcctatttacatcgaaattacagttgaacctctacaaaaatctaacgtataacaccctactagtttaggcgtnntatcgtgattttatattaactgtgcagctcgttgctaatcaacgagtttattaaaaatcatgggtaattaaagctttttcttaaatacttataaatgtaaaaaaggtaacatatatatataaccaggatcccgggtacaaaatatttacaactattacaaagtacgtattacaaaggttgtcgcctagcgtctatacaaaatacaaccagctatcccaaagaccgtacgcttcaggcctaattgcctcgacatgtacaatcttcatccactcgctctcatggctgctcaacc

SEQ ID NO: 112235 - DNA, 1787 bp, Cannabis sativa
aactgatactacatatttttcgttcaaattaaataatctaaaatttgggtcttttatgtgtcttgtttaaaacaataacatggtctgtactgatgaaactagaagaaaattacggttttaaaaacattggctacttatgtcactaaaaaaactcattaggtttatgtcgcttacaaacctaaaagtttaggtacttatgccactatttatttatttatttattaatgtaaatgacaacaaatttgttaaaagttacaaccaatatcattacatagctatttatatcatatgtaagatttatatatagttttcctttatatataaatatatatgtagaagccatcactataaattggcttagtgcctaatacgtctgaaaaactaatttattaataaacaaattaataaagcatgtgctattgatttgatcatacctaaatgaattgcaaatcctttgtaattatccaaatgttttattacttagtacaaaagcgtgttaagtaataatattatacaaaaaaaaaaagtgttactcaaatcactttccaactccctatgttttattttagtagttgtgttgaagacttcagatcattatgccaaatcatacccaaccggccaatcaatacatatgtcacactttgaaaaaaaagaatggtttcacacgtttctgatgtactaaaataatcgtttgagaatctttgatatggatgatctatttaaaatactatttgtgtaacaaaaattaatattaacatattacaaaaagccatccataataaaaataaaaatattaaaataatttaattatccaatatatgacaaagagaggcctacatatttagtgctcacacgcttgacttttcaataaactttttgaaattttctagaattttagatgatctcatggccgagtgatgtatctccttgatacaaataagattaatgttaaaagagaaattcttaaaggtgtgtttagcatttttttttatgtgttattattgctattattttatttaaatattgaattttataaaatttaatatattaatttttatagagtattgctagctaatcttaaaataatatttctagaaatattaagtactattggtacctaataaaaatattcatgttaaaaaagtgctcaacaccctttaagagtatactaatagagtaattaagtattgtattttatataaattaattaaataattttaaaaatataactaatcaataattagaaagtgtcacctctaaattagtactcaataacaatatcctacaaataattgatcaatacgtgatttctctattcactttgtcaatgaagatttaaaatcttaattattttaggtttattttatatttcagatgaataaagtgtagcttttaataggccaaattgggaaccaagattgataagggatttctgtttctattaactttttgttttttttttcgataaaaaaaaatgtttctgtttttattaattaattaattaaaagttcatgtcatcaaaatgttgataagtaatgcatcatccatgtacgtatttaaatagcaatatcttcattattaaataacattattctctcaattataaaattttgtttgataaaccaaacccatgaatttatatatttataaataaggtaaatggcggcaaaatcctcaatactttcgttttagtttcactaaaccatcaaaactcgtattttgttagcaatttaccttttccgtcaaaatttagctattaagtatcaggttggcttgtctacgtggac

SEQ ID NO: 112236 - DNA, 1438 bp, Cannabis sativa
  modified_base (1410)..(1412): a, c, t, g, unknown or other
taatagcttaatagtttcaaggtcctagttcgaacccatgacctctcccttttttccatccccctcaccactaagctagccttagtggctacagatgcattctctacttgttttggcatttagaaaaaaaattagtgtattttttttttttcatattcatgtacgttatagttatttaagatattttacaaaattttaagaaattcagaataatttactatataaaaaataatgttcaaatagtctattttatacactgcttgaatgtaatttttagcgtgttaaacttttttaaatttcttaaaattttacaaaatgtcttaaataagtataattttcatgaccatgagaaaaaaattgacaacaaaattattttggatactaaaacatatagaaatgtatcggtatatcttttttaagagggtgcattataaaattttccaaaactatatatacatttttaaaggtttgcttcaaaatctcaaaactaaaaaaacatactgcgctttgcgtgcggttgtattttataagtaataattaagtcataaaattatattaaatttaaaattttgattatatttttttttaataatataaataattattttactatttcttattcttaataaaaaaaatattatagtctttattttttattattttaaacttaataaataatcatttttaattaattaacttattagagacattccgcatttgtgtgtggttatttaaaatcatatataatataaattaaagtttcataaaaaaaatacgtgggagttatcgaatctcagtctcgtctacaactagtttgagccctatcttctaatgctcttataaaatttaattaatttcttataactctctaaatattttaaacttgacttaattaaaactatttaatacatacatacatttttattacaaaagattaattatttttctttttgagagaaaatactaacagagtaaatcggtagagagatattctccaacaaaaaacaagcttcatccaaccctaaaacatgtctagccaaccatgagccgtcatattggcattacgcttaacatgagaaatagacacattagggagagaaaatagaagacaagttatgcctacaattaaacctttacaagaggaaattgcaagataaggagcagtcaaatcattagaaactaaaagttaatccgttttcaatatgtgtaatcggcacgtccatgtgtaaaatccaatttatgttgtggaacaaagttttagccttcatttcatgcgatgcaagattgccaataattggcttagacaaggcaccaatgacttggccaagggaatcgcgagcaatcgcgccaacactaattatatgacgatgaggatccaaagtagcgtctgttaagttttatgccctaaannnaactccatttcaatgtaatctatttt

SEQ ID NO: 112237 - DNA, 7840 bp, Cannabis sativa
taagttaatcgtgtaaggctaaaaaaagaatcgttaaaccaagaattatcctggcacttttaatatataaagatatatatttaatttgagggaatcaattcaacaaaagctcttagatatattcatatgttctcggctatgtaattcaaacattagtttaaagggttttatgtgaaagaaacacgagccaacctatcttggagaactctcaatccgatcaagctgtttctcctgtctcagaagttgagctgtggtgacttgtgacttgtgacttgtgacttgtgagaagtcttctgagtttgtcacccgcaaatgaagtcatgtaagatgtacggatcatttgtttcattttggaagtaaaattgaaaaaatgataagaaaccaaactaccagatgtgcttcaaagaaaagcaaaatcatgtttatgtagtctttctcttcaggttagaattagatgcagacccattgtcagattggacctgaccaaatactgatctgcacagtaaaatataaatttcatgagcatccatttagttctcttctacaaggttaccaaaccaagttaagatttcaactgtgttcacattattaaacaaaaataaaatattgactcattctaccaaagtgttcaagcaacagaggaaaatttcacattgctcaaacgaatacagtgatgagctatttaacaaactaaccatgtcattgctaaaagaaactttggtccatgagcatatgttccaatcacaggtatacacttaccccagcacgcctcaaatttccaaactcatacataaaagaaatgtgttcatgcagatctttaaaaccttgataaatgagattgctcctcaattacaacggtacttagacgaccacaatacgactgcacgtgtataaatatgtatacacaacataattcatggtaccatagcaaagtcgtgctaaaagaacgggtgttacaacccaagactagcctatgagaggagggtttcaaagcagtcacaaaccgccatgccatctagtttcatgcttaatcaacgacggatactaacaatacaccaccatggcagcccattctagtttgggctttttccaggtttccccttccgcaacatggctgccaaaaactactataactcactaccaaaagactagttaaagaacgtgcccaaatagttgtaaaccaccgaacaatcccatacttagtaacattgacaccaactctttcctcttgataacaagtcaactttctaaaattgcatagacaaacaaatatgaactcaaccaccttccattaactaagaaatttctttattagcaagattcaaacttcttaacctagtataggcccagatctaccaactcgtaaattatatcatttgtaagaagaaccaaaagtgttgcactacaattaacaggataaagtatcttacccacaggttgaacatttcttgtgatgcttacagaatatagacaagcaaacagagcatatgtagcccatgtctatggtctttttatggcaaaaacacctgcaaatttcagcttttaacatagtgcattggaattgaaaaactgaattaataaaagtgatcatcaaatatttcagcaaaaaaaaaaagtgataatcagatcaaacatatcgtgcatatttatgaagaagaaaaaaataatgaaatgaaatatcatgacagcattgtgttactttgaaaacctcagtttccaaacaggacatgaaaaacattactgatgatgtataattgaaatcacatataagagattcaatttaattcatacagtagattatggacacctatttactctggattccaattaatcaatgcaagtcatcttctaagtgaaaagaagggtctgcaaagtcctaattaatttgcaacctcaatcctggattttttcaatttttcatatgctaaaaaggaggatgatatagcataagcagacgtaggaagatggcattggttgtaaaaatgatagaaacaatggtattaatccaaaatgaacaataataataagagcagaaatcaaagcgtgtattagtttgagattccaactaatggatttcactaacactacacagctatttttcaacaaaatgaaaaacaaaagagaagaaaaaacgagttaaatcagccagcgccataaacagaatgtaagtctaggaagttgtatatcttaggcagttcaataaactgaagattcaatcaaatgccccatccctgccctccctctaacaggtataaattaaaggaaggttcagaaagatattcaattacttggaacttggaagcatggcaaaacttataaagtatattattatagttttacgtacgaagctcgaaaatccacaccaacagacttaggaagttgtagaaaggtacgagagtgcaaatcagttgcaaaaactgtctgcaaataaaaaagaataccaagttagctttaatgtcgcgaaaatgaaacaaagtagaaaggcccccttcatacaaaaaaatagttccatgtaatagataaatggaatttgtaaacatgaagacatttctaagttatgatacaaagataaatcttcaatgagccggaaaaaagttgctgaataaaaagaatctgtgaaagtcccaaataatgatgaaatggatacccagttaacaataatagactttcctaactaaaatcaatagccatattctgtgtgctaagattaaaactgaacccaaatcaattgcggcaggctaaatactagagattagaagaagagttaactgtggggactaaaaaccagattgcttgcacacactcaactacctatccaaatgagtagcctcaagtagttatatttacataactgaaaagttccaaataatcgatttgagttaacctaccgaaagatattgaaataggccatcaagttgttgtggcttcaaatatacaccaccagttatgtaagatgcctgttactcatacagaaacattcatcacaatcagagtagcgctttatatacagatatttcatgaagcaagtattcacgtgttagttaaaatacattctaaagatacctgctgcaggaaggcagaattattagaacctatatagcaagaatcaaccggaacctgaagcgtacaggcggaaggttagtgactgataaaacattgatcttaatattgatagtatcatataaatgtttcaaaatgacaaaaacaagtcaagaaagagccaacaaaaactttagaacaacgaattcaaagaagctaagaggactgcaaactgaatcttgttcggatatagtcaagaatcaaataccatagaacgttgtgcagaaaaaattgaattcatgattgcaacatacctgaaaagtgattaaaaggaaaaaaaaatgaaaactaaattcgctataaaatgacaaaagagaacaataatctgctcagtcaaaagaaaatgaaaagacaagaattggacgaacatactgttcaggtccatccgaggatccatgcaagcataaaatctgccattcaaatgtgttagtagtaaaataaaatttcaaaagaccaaccaattcatgaagaagaacttcagaataaaaggtaaatataacaataacagcaacaaaaagaccatgaaccatgtcattatcatgcaaactaatatagagctaccctaacctaatagctagaacagtacaagtaacctgcggtgtcaaacatcagagataatttttagtagcaaattgatgccagctccatataaaatggaattaaattaaaagttaagactgcacttaaagagtagtatatagttgcacaacgcagcaaatgatcaggtagagttttcaaaaggttgtttgaagatgtagcttggaatacatataccttttctttatctgctgggacagtaaatgcatcccaaataaataggccaatcaatacaaagaacattaacaacaaggttggcccagatcacctacaagctaacactaacatctagccatatgaatgctaccaacaagactgctacagttgaatgaaagagaggtaagacaacagaaaatacttacccggggctgtggatggagtggtcctgatcgaaaaaccttctgtatatctagtggaaaaatcatatcggaaacaaacaaaatgaaattcatccaaacgtccaccaaaatgatgttacagtttatcctacatttcaatttctacttcagaaaccaaaatttttggtgtaaggtttgtcatttgtgtagagcacaatgcagcttttccatagaatgccaggaatactaaattcaaacaaggagtgcaaataaataaaagaggatacaacaaagagccatagacaatgacccggatagcagcgaagaggcaagccctttctcagagccatccttatgcaaattctcgtctttaatagcaaattcctcaagtttatgcaacaagtttgtgcaaagcgcaggcattcttccattttcggagccctggttggtagccagggaggaatcgaatacgtaatcgcagtaattgtatccagtagcaataacgacgacttggttaagttgattcaaaagaagaactgaattcagaaaggaaagcaccttttaaaacacaaaaaagtgagtcagaaagaatccgaacatcttgggagtggaatcaaaatcaaagaaagtaaatttattagggtttgaaagagaatttacatgggaaagaaaggaagagaaagacacagaagaagagctccagaaaagaggattagtatcgaggagaaccatcaaaagggtaacatcgtctgcgtaaagcttagaagaaggcgcagaaggcatggctgaatcaactgaagtgaactgaactatgatccccaatggttatcactaccaactgtccactactgcggctttcctcttttctctttctacaaaataattgggttccaatagttgtatgcgcgctaagtatgcactgtggagtcaaaactccaggttattattactcatttcatttactatctctaaccacacctatacctatgcataccaccataacacataagaaatataagatgttattccttgtactatcctgaatcaaaatatattgatcaaactatatcggtaatttccatcaatttttatatatgcagatatagaagtatgtttagcaaattatctagactccttgaagatgttctttctaagggtattgttcagcgtgtaagacttagtaggaggggtccagtgctttttcatattttttttcgcaggtgatctcattttggttggtagggcaaatatggctaaagcgaaaggtgtttggcactgtcttgagaagttctataattggtctcgtcaatgagttaataagctcaaaacctcgattttcttcagcaaaatcttttcccaaatccacatgaggcttaccaattgttggttccccgatttctgaccttattccctcgcatagtaccggggaacagagtcagtcgtggtgcgtgggggctactctacattgacaaaaccctctatacaaggtgccaatggcagatctaccctgggcagtagaggttattcattaggattagttagtttagcagggtcaaccgaacttgttgtgttggccgagtttattgagcctgccgagttggcaaggttggtaggattggctacatccattgagttcgtggaaacgctagtggtgattggaacagaacatcaggatcaacagttatggggtcttgaggaagacccaataaagtagaagttgtagctagagttctccttgttacatccatagcgattgatcagatcgatagacaacgctctcaatgaaagtaccaaaatgttgacctcagatttggtcaactgacagcagagtcttatttatgattggaatcaccacgtgtaagcaattagaacaagtaaataaatggacacaacaattttatagaggttcgacccccttagttagcaggtaacgaccgactccccttttaattatattgatatgagagataataccacttagatcacaagtgttgtaagttctagagtggctctctttgaattataatattgaaaatgtgaggcatatctcaagtaaatgagatgtggaagacttaatctctactacattgtaagtggcgtgtaggagagagaggcgtttcgaatgcttgaacttaagagcttaggaatcaaaacttagacctttttggtttaacctagtgctctttatatataagagagcttacagaaaatttaagttaaagtaggttgatatcccctaaaatgaggagatatcacctatttattacatattaaaaatatataaaaataacctattaattattcctaaagaatatgtaaatatatgatgttcctatttttgtgggttgttgaagtcaattcgtagctgacagtgtctgtttaagttgaaagttatagagacaccaaaagtgtctacaaaagagaagctggtcggcctaccatttgttggaggctggccggcctatgcttcactatggtcggccaggggtggtctggccagacccccatggttggacattttgttgtctttttgtcctgcttgaatatttgaactcttcgtcaattggtacgttgtgcatggtgattttggtcctcttactgataggttgtactccctgttacatcaatcttgcctatgtggacatgccacgccacgtgagcaaaaattgggataataagcgatacccaaaaagccaagattcctccaaataatgtttatcctccctgcaccaatttttgtctccatcatgaagaaaacatcatggtcctcatcaaagacaagctcgcgagagccttaactacctgagaactccttagtcactggaaatgccacaagaggaatcgcataagtaactaagatgttcaagcattatccaatccaaccacaaccaaggaagatcaagaatagattagaacaactccacataaccaaaacattgcaaagtaccacaagaaaataccaccaacaaaagaaaattcaatcaagagaaccaaaactcccaaaagaactcacaggagtagaagcacactgaggccaaaaaaagaaatctccaggatagccacaaaagaccacatacagaaaaggggaaatcatctcacagtttgaaccccaaaccgaaacttgagaaagccaaaaccctaacaagcgagccttaagacccaaaaacttgagaaagaaaaaatccattccaaaggctaaacagagaccgtagccatatagaaaaataaaacctagcatacccatacgaaggaaagaccgccatacagagatgtgggtgaagcccacttcttagaactaaagcttcaactgtcgcaagaggccaagctccactgagaaaaccaaaaccatgagatggaaaacacgactgctcaaatgagagaaaccataataaaaactagatggtgactaaactcagataagaaacacccactaagaaaaataggactgaggccgacatagggatgagattccactggaaacaactcgaaaatccctcaaaaacgagtcttggaagtcgaggagagcataatttgcacaaaacgacaaaattcaagcaaaatacattgttaagttgggtattaaattttgaaaaatttacaaaatagaccaaaaatatttcaacacagaaaaaatttcatttttactttttgaatttttttatttacaaaaatatatttttagtaaaattcataaattatttttttaattggttgatagtttatttatagttgtattatagttgtcattagggttgtacaaaaaaattcgtaaactgcccaaaccaaaccgaaaaaactgataaaaa

SEQ ID NO: 112238 - DNA, 2137 bp, Cannabis sativa
attggctcattttttttagcatatgatgtatagtaatgtttgccttattactattgttagtttttgactatgaattgatttagaaaaatggaactcagacattacttgtaagcatcataagcccacactacaacatataaaggtattagtggggccagccgcaaataaaccgtttatttgtggctaaaagttattagccataagactccatcgctaataactggcctctattaatgattattaacggcgaatttcttttttgtctgtcctcgaagtttccaaccaaatctatgtactaacttcattgttctgttagtacatggattgattgatagcatttgcctcttattaaaaaattaaatagaaagaaaattatgcttcttctcatatttctgaacattccattaccactattatattattggcacttttcttaatattattaaaggtagcagtaaccattcagatttacttgatttttactattcagattctctttctcttctctgttttactcttattatggtctcactctcactttattaatctgacatttttatgtttctttcacttctggcatcatagttatattatttgtttgagggcttgatttttaataacccaaaacttaaatttttgagcgaaagaaagaactaacactgttttttcttttttgtgaggaaacttgcagtgttgtgttagctaggaccaaagagtattgctcagtttttcatgaaagaatcagaataagaaaaaatttactcaaaagtgaccaatatagctatgaatatgcaatgcagagataaaaagctcaattaatatattcatagtcagggtcctagtccatcgaggtggaggccattataaaagattggtagataatgatgatcatggcaataataatattaatgatgaggcaaccaatttgtaatagtatttattttattttagttgaaaaaattatccttatattagtattttaaatatatgtttacttactaatttttatacaattataactatattatgcatgtataattaaaacaatttaaaattatagtttttattgtgtaattatttataattaagctttttagttttaatttttaaattttatttattttaaattaaacaaaattgataaaatttcaaattaaataaaaaaataaataattacaaatgtgtattattgcgttggcaaaagtcaaatattcatgtagttaatatactggtaaaagtaatatttttctcagtgtacatttgtgttggtaagaattaaatttttgccaacactttaatgcacaggtgaaagtaagattttttcctgtacattaatgcgttgacaaaaatcattttggtcggtacttttttattttacactggcaaaagttccaataccaatgcgaatttgccaactctttttgttagtgcaaaaatacattgacaaaaataaattttattttatcagcacaatacccaatttttatcagtacaaaaatacactcgcaaaagtctcatttttttgtagaatatatattatgcaaaaatgaactcttatgataaaagaaaatgagttacaatctaaacaacaccatttaaggcttaaaaaaggttgctatttcacttctctttacaaactatcaaattattatttgtacaagtgaatcaatgtgtatttataagtttgtagttccaaagaccttgatttctattccaccataactgaaaaactactgctgccattattgctgaaaatgttatccaaatttcaacagcttgcgctcctatttatccaccttagaatcggttttcagagagttgcttattgttaggcactacacaaacctgctacttttagtgacttttttatcacaatataatttttttgtgactaaatatgacttttagtcacaataaaaacttacttgtgattgtgactaaaatatagtattcagctacatgttgttactaatttagtgttagtcacaacttattgtgattaaaaatacatttagtcacaacaaattgtaatttttgtaattgatacttttagctacggagctttagtcacaacataggaatgataatttagccacaacttttttacttttagttataaattttattgtgactaaaa

SEQ ID NO: 112239 - DNA, 3100 bp, Cannabis sativa
aatgtttgctttctcaagtttacgaaatcttattgattggcttgtcacattttttaatattgttttgataaaaactaagaatgttcttgtttttcctgaattccgacctgtgaataaatttctgttctggccttaggtgtggaagtttgatgcaatgtatgatgcggtcgtatttgctgttaattcatgcgaaaagttgcaaggttgctgtggtgcagagcacacactatgcttacaaaaaagaatactggattatttcaacgaaactgataataatgatcatcctaataagatgggtcaaagcaggtttgtccagatcttacctccgacagttgtagtactactactaacaccagatgatgattcatcatgaaagctattccacagctcttcatatacttgatcctttttcattcttcaatcttattatcaattgttatatactgatagtcttatcattcccatgcagcccatttttgcgagcagatataaaagtaagaagcttttagcctataatccatacttgaattctgtaatcagcaggtcactagtgatgattttaacttaacaactttttttttttgttttgttttggaataacaggtatttctgcagggaaactcacaagtaaaatttactcccagatctattgcaaggataatgcatggcattgcaagtccagcttatccatctacaatgtggtcaaaaactcacttctggtaccttaaacaaagctatattactcattttgaatactagcccctgaagttgatctgatatgaaaggcagcataccactcattactgttggtttagaaagtaggattagattggataaaatcaaattatgaaatataaggaacaaagaaaataaaagaatgattgaattgatcaaagttgggttcaaagttatgatttttgttctttccgaaatacttgaatgtgggagtgtggataggataaaattatctcaagttttccaaggggattaattcttatcctctccaattttataacaaactcacatgattcccattcccttaaaattatccaattctattcaattcaatcatactttccaaacatcgacttttcggtactaataatttctgcattgcaggggaaggtatacacaaacagattttcatgttgtaatggaagcagcaaaagcagaactaattaacttgtcagcaaagactcaacctacatcttaacaatcaatcccacagtttcataaaggtgatgataatgttaaaaaatcccatctgctgatttatttcaacaagttagcaaaatatttatatgatgccacagttcatttgaagcttagaaacatgagatttgacatattttggtcagcagcatataaaaacagtacaaattacaagttatggggggtaagctcagctatctgtgactttgattgtgaactactttctttgttttcttatctcttctgaatatttgtattattaggcaaactccattattgcaaaactattcttacaaaaccagtcaaatatctgtattggaatgtcttgttatttatggattatagtgttgaaaatgacactttcttattttctcaagctttttctttgcagtttcctgatgtagtagcacccaaatgaagactaaccaaacctgttacaacacagagaaaatggcttcaaatgtacaagaaataattcataataataacaaaaggaattattacattattatctttttttccttctgttaagtgtgtaaattttgttatcattttgcatatcatatattcagtccataccaatttattgtcgttttatggatagatttttatttagatagtgccaaagccaatgacttgagcaagtttattcatatttttatacagacacattgggaattattatttaaagaaacaattataccgtttatagtttatatatgaaaatataatttaaaataaaaaataggtttataaaaataatttatataaagacaaaattatatttgttgtatttattgaaaaacacattaatgcacaaaaaatgacaaggtatagtttttatttttattattttggtcttaacttttaagttttgtaaatcaatattataacttagtaataatattggtgcattttgagcatatttatggcttttttttttttttaatatatatacattgattaaaatattgaagaatagactatcattaacatttaaaataacaaaggttattaaaaaaaatccaaagttaaagttggcaacttgggagtacacttttatgttaagtagtggcaaaaactcacatgatgaatgcaagtgttgtgacttgtttctttatctacttgaccaattgtctcttctttgagccttaagtttgatgatctatttaaccactattcccatatttctctcacatttttacccttatcctaataataaaatattagaaaaaatgtatatttcaaaataaatatatggcattgctttaggcattagaacacttacatcaattctcacaattataatttataaattagttaaagtttgatttttttttttgtaaagcatggcagtaacactagatgcttaaaaaagaacaatgatgatgatatgtactttttaagtaatgatgtaatgtagcaagtaatccacacgcaaaagtgcttcactctttccttaaataaaaaaaatataaataaaaagaatactaaaatggtaaaaaaaaaaaaaatcaaatgtaaatagtcaagtcaaacatattattcaataaaagttaattaaaatttttatccctttaattttgacatagctaaatcataaaaatttttaaccgttaaaaattcttttttaaactattgagattattaattttttgtccaatttcattcaattttattaattttatgattgtctatatattaaattatgctctccaaataacaaatcacctattcaaattttatatgtactaaattatgcattctgatttttcgtctacattaaaccttttttattaaaattagaaaaaaaaaatccttaaattcaataatctcaataattaaggtggcgtttggtaatacctgtttaatcagttttctgttttta

SEQ ID NO: 112240 - DNA, 5379 bp, Cannabis sativa
  modified_base (84)..(84): a, c, t, g, unknown or other
gttccactcaggttggtcggcacaaagattagtataatgatatgcatatgtatttacatgtttagcgtgcatgttagttaagcntgttagattacattataatagcgatatccgtatgtttagtattgtattggatatcgataaatgtatgctggcttaagtactattcgacaatatcacatcggtacgacaagagtacgactagcgtaccgagtataggctgatgtcatggtcgatagcactgtactacttgatagtatcacatcggtacgactaaagtacgactagcgtatcgagtataggctgatattatggttagtagtactgtcgtacgaacgttctagactcagcaccgtgttggacacggggatagggctatggttgggtgtatgggtgcctgattataattcaagttactgctatgttattatttatgttgactcacagatattgcttgcatgtgtaggtaagggcaaggctaaggttgagtagtcgtgagagcgagcagatggagattgtacatgtcggggtggttaggcctggagcgtacagtctttgggacatcagggcttattttgtatagtcgctaggcaacaaacttttatatatgcacagtaaaacttttgtaaacgggatcttgtttaatataagtatagtattttaatgtttataattaattaagtaaaattttaattattcacgattttcaataaacttgttgattagcgacgagctgcatagttaagttaaaaatcacgttaacatgcctaaactagtagggtgttacacaaacctagctactataagatgtatttataatcaatattcaccttattgacagctcatacacggtctgaacaagaccacaactcactagaaaattccctaaaataaaacttcaattagcccaagaatttctatttttgtacctactaaattgtgagcagtaagtgcgactttccttttatagaaaaggatagtttagcttcggttttctccgcaagaaatttgatcaaacaaaatgagaaactcacacaagatcagaatatcacaactggttaggtagagaagaaatgagtaaccaaacttaccctttttaccttattttctgtaaataggaaagctagacaacttttcttccaaagacaaattgcttaatattaaattcacacataaaataataaaaccaatatttacacatagccgaaattaaacaataaattaataaaatatttttatcaattaaatatgtcaaaaatagaattaacaattacaaatatacttcacacagtttgataaacttttatacattttttaatgttttatttaccaaaatatattttgtacacatcatgcatgtactgctgatgtcattcatctacaatgacactcaacccttttcccctctctttattgtccttttttttccagttttcatttgatttatttcaacacatcaaaataaggattttcgcctaaaaattgctcccccacgatctcctactgccattgaagcttcattctgcaatttatttttctatttttttttccttatatcaatggctatcaccccgttcctcctcttctccatctccttctgtgaaaaaatccaatgtttctaaacctacaacaatgggtgtgaaatcactgggcaaaaaaagtaaagataaataggttattgtggaagaagatgacactaacgaagattttttttgaaccagtaacaaaacatgaaggttcttctttgaagaagaaatcgaagaggaatgaaggtgataagagttttataccaaaagttaagaaagagaaaaagaatgttaatgaaatgcttaagattttatttcagtttcttttctattttgcctaatttataaattttgcctatgttctttttagtgtttttacatgtgattttgtttttagggtttcatatattttttgtattttgttgttatattcgcaatctcttgagatgaattcatcaatagcttcgtaatttacataatttatttctttatcaaactgcccattgaactgtatgagaaatgaaatttcttttgtttcttgaaatttttaaaaatttaattatggtcagccaactatgagaaaactgtaaataaactaaaacacaatagggcattgaaaatacaggcacaccattagctatttttactactacaaagttagcttttagtgacattctatagtgacccgcacaaaagtgtaggtcactaaatatttgaattttttttagtgactcacattattagacagtaaaaatttaatatttgggacccagattgtaggtcattaaaactattcaaagtgttttaaattaatttttattttttaaaaaaaaaataataaaaaagctatagtgtcacctaatgcgtgagtgggaaaatttttccactcacgcaaaatgcatcactaaaaataattaaaaaaaaatgaagaaaaaataaaaggacaagcgtggtgtacgaggatattaattcatttactttttatccttattaaatatattataggattattatattaaaaatatattagataacaaaaccctatatttttaactcaaaagcaaaaaaaaaaacaacttatttttcacgtcctctctcagttgcctccttgtctttgtctttctttcttttttttttttttttgtagaaagtctttcttcaatcgatagagttgctgcccaaatgcaacaacatactccgaccaccatttcccaaaacaagccataaattcgagttccccactccaaaaaatacctagactcgcctctttctctccttttctctagataatctcagactgatttctctatttcttatgggaatacgtcggtgctaatagagacacacttcgatgatgaatttgaccactgattcaagatctatgccccttttaaccccagacctacctcctttatttttctctgtcatgtttccctctcttggtggtggtggcattaggtgaagaatggtcgatcgacgctagcagtggtggtgaagagttgggatggtggcgttgggtgaagaacggtcgatcatcaatctgcctctcttcgatgtatatttttacttcaggttgtattgttcctctttttgttttattatttttgtttgctctctctcactatcctttgcctttttacttttctttgcacgtgataaaagcaatggctggagatttggttcttagtggtggtggtgggttcggttcggttgagctgtatataattttttatttttctgttgggtttcaaaatatctagaagtttaaatgttcatatttttttttcttgattttgtgtgtcaggtggtgatgtatgacaattttttttgagatgatgtatagtatttttgttttgagataatgtataacattttatttgtaataaataatagacagttctttaatttttaattatcaacaaaaatgttaagttactttttctttttaaaaacgattaatgaaaaaaaaaattaattattaattatttttaattttttaattttttaattattgtttttatataaaatacttaaaaaattagataaagtgacacgttgtgatggtagttgttgtcttaaaagtccgacaaggtgggactctaatgtgatgtttgctttgatataatgtaatgtaatgagaatgataattgtaatataaatgataatgtaatggaatacgaattataataggaatcgtattatgatgtttgatttaactttataatgaacattgtaatcaaataaaataagttatatattgacaaaaatacctttagttttattatttttaatatttaaaatttaaataaaagtaacgtaaaaggacaaaagagatattttataacaatgtaatcatcattacattagttttataatgtaatggggattactatacatagtgtaatgaccattacaatataaagtcattacaaagctttaaaatgaagcaaacaatgtaatggtaataatgattccattacaatctctattacactaaaccaaacatactctaaaagtttacagtgacactcaataaggaactctaaaaggtttttagtgacacgcattgaaaggtcactgaaaattatctttccagtcacccacattagtgagcacagtgaaaggtcactaaaaatctttagagtccctcgaagtgtgttaccgaaactcatctttgtagtagtgtttatatgatacatgtgttgttagccatctattttacaaccttaaatcaacaaatttaccacaatagagtttcttttatatgagtccctgtattgtcaattctgatcccatattttatacataataagattttagtaacacaactattggacaacacataaacaacgtaatcgcaactatgtataaacaatgtgcttgaatattatataaaaaaaaattaacaaagtattattggaccgatgaacaacgacttgtagtttgatagtattttttgaagaaacaattataagaacactgtaaatcaaagtagactcaaccattattaaaatatgaataaacttaccatattagaattatttttatgagatccctgtatttgattgtctatataaaatacttgcaaataagattaaaaaaaatgtagattgatcagtgtgtaattattgattcatcaattaatagagtgtcaataaaactgacggccaactataatgcaacaacagaaacaaaaatttcaaaaaaacgtggctagatccatgtcgcgagatgaatgcaaatttagtttatttttcgtgattggatttgactaaatccaagattgaaattttaaaaaataacgttaatgcaacacttaaaatattaactattgtagtgatacatattttttggattatacatgatttgattgatcgggaactctagatctattttttataagtctacatactatgaatctgcaagttgaatgatttttcaaggttgagtttatgtttcaaactatcaaactaggtttttttttttttttttcctgcaaaatcttttatcaatcggtagtggttgatctttgatttgatatttttcttttaatcaagtgatttccctgaaataaatggtgtttcttcgtttgcaagcgttgattcaccattgtcgagctccgtcgatttcaggttggaatcgtttctctggtgcaaggaatgtgcagctgcaagggtagagtacatgtatttttgttattttttttcttggactgtataaaaatttattaggccagcccataatatatttgtcatagggattatctcacaaatacacaaaaaacaataaaaaaattacaaaaatacagtttcacaaaattttaaatatttttacgattttttgattttattta

SEQ ID NO: 112241 - DNA, 5189 bp, Cannabis sativa
aaatattagtaaatatgttattaaaatgtatgtgtttttataattaagtttttttgcacattttttgtaatatatttatttttgttgtacattaatgaaaaaaccccaaataaaatttacaaaaagtcaactatacacgtaaaaaaaaaatagacacgtataagtgattatttgaatattgtttttagttatttaacattttataaaatttattgaatgtcacccataatcataaatatatacatcatagggatataaattaaattacaatttctataaatgtcgaataaaaattttcataccaataaattaaaaaattggcctaactaaaagtacatatattttatttcttctaattttacctattcatgttaatacccattcaaaaatacatccatatatatatggaataaattattaagacaaatttcattttcatctttcttgtctacatgggattcttttactcttcctctaggaaaattattataatttttatttttgtaaagtctaattaactatagggaagctgaccagtactttactttcatgcatccaacttggtgttaaacgatgattataataattaaatcacctcttatcaaaacaaaccattactgcccacttatatgtagtttgcttcacttgcactcttttaatattgtaaaagccaaaccaactttttttttccttaccaaaaaccatcctaattaatgattttaatagagaaatcaaactattccgtctttcaaatcaatcacggactagccatatgtgttatcaaacacgcattgaaaggcaggagcgttgtgtgtgtgcatatgagtatgacccatatttattccaaatccacatccaaatctaaacttttacttataagttacaagagagcaacttctttgtagtttcttgcttcaaaagggtatgtgtcaacttcacatattgatgtaccctagcaataataatatttcgttaagaaaataataataattctccatgagagaacaaagcataaatcatctcactagatatttggctagcttagctacacacctacccaataattagagaactagattagagtcccttattcaatgtttcataacatatatatacaaaatgagattcttccctttgtttggtctttgtcgttgtctatgaaaattttggcaattgagctcactatattttataattcccaatcatccactgccaagacaaaaaatacacccaaccaaccccatttgacacatactattatctatttacttacacgtacaacaagcattccaattattatcgcaatgttacataattatttaacattatctaaggatattatttaaaagtaattatattaaattaataacgatatgacaattaagaaggtattaggtactagtggtattttttaattttttttttaaatattattaatgagcaatagtgatacccaatactttttaaaaatgacattctataattagttagcgatacatatgtattacaacaagcaatatgcatataacctgagttccatttcatctaaaaatgagattaaaagcccctaaaaagtaaaaacagaaataagaagctccacctctagtagtagcagattccccaccctaaataaatagatacatcatacataggccataagtaatgttggatcattatttgaatctagtaacaacttaaagttaattagttcatgttccatgtattaataaaatgtaaaggatgcatagtgttaccacttgttggcatagctgtaaatactcatgtacggttctgatccatattttttggactttttaaaatagtcgtgttgtgttgggcataaaaaatataggatcgtgtcgtgccataaaataatatgggttgtggcatgacatgcaataattttataaggtaggcctgacattacccacatatcccgtgctttattcgggttgatctgtttatcttaaatagaccaaaccgttataagggttcaaattcatgtttcatatttttacatttttattacaattgatgagctaaatactaaaatatatgtgtattttataattttaattacttttatatcttttttcaataataattacatacagcgatataaaaataattataattattataatttgaatattcttatcattttaattgttaaataattatttatcattgtaattattatcaaattaatgggctttttaatgtataatgtttttgagttaatttattcatgcttatgtgtcgtgtttttgggcttgttgagtcatgtggtgcctaagtccatattttggtgtcatgtcgtacctaagttcatattttttgtgtcaagtcgtgttctgcctaaacacatactttttcgtgtcagaccgtgctcgtgcctctcgagcttgtatcaacctcgtgtcgtgtcaaaaaattcggcccatatttatagcactagctattggtgcgatatggatacgtattagaaaactacaaattgaaaaaaagagagaatagttttcattgatttattaatggtacaaagtgaagagtatatattgtacaaagctaacttgagttacacctaactaatgctataaccgaataactaacttaacatacttaacagtctccctcaagatggagtgtagagatttcttacacccatcttggacagaatatcattgaatggagcaagaaaaagaagtttcgttaggatgttagtaaggttggctttcgatgagacgtgactcaacttcagggtaccatttgtgattttctctctaacaatgtgacaatcgattttaacatgttttgctcgttcatggaaaattgggttttctgatatatggatcgcaacattgttgtcgcagaataggatcgaagggagactgatgttgatgctgagttctcggagaatggacgtgagccatgtgagttcacatgtaacatttggcaatggtgcaatactctacttcagctgaagatcgaaagacagttggttgcttctttgatttccatgaaatgagtgatttgcctaagaaaataaaatatcttgagattgattgtcttgtgtcgacgcaggctttccaatctacgtcaacaaaagcttgaatctgaagtttaggtggaggggaagcataaaaacagagtccttggcctggtgaatttttcaagtagtgaagtactcttgttgcagcaagcatgtgaggttgtcgaggattttgaaggtattggcttagtttgttcacgacaaagcttatgtcaggtcgtgttattgtaacttgggatgtttggggcatattcttatgtggtaaaccaacatcagatttacgagtggcaacaatatcatttagttttcgattaccataaccaggtggaaaacctattaagaaatagcatttgtctttgtaatggcctggtttttggcaattggtgcaatggggacaaggccttttatttcttaaagttgtattggtagtcgagacagattgtgatggaatggtggctgtattggttgcaacagcaacaagtggaatggttctattgcctaatgttctttgtctttcttgatgtatgaccatggaaaacactttgtttagtgaagggcatggatcaagaagaagaatttggtcacgaatggcatgagaggattcatttaggccatttgagaattgaagaacttgatcacggttaagatgatcttgtgtctgaattgttgcagcacaagtacgagggattctaggccttaattggttgattccatcccacatagcagtgaactttgtaaagtaggcattgacagaatcatccccttgatgaaggtatgtcaaggtttattcaattcaaaaattcttaaaccgtttccttgattaaattgatcattcaacacggtccacatttcaaatgtagtatcaagatacatgatactactttttagcttaggagagatagagtgtaaaatctaagacataactatttgattacatctaactcaagaactaaacagaggatcattagggagaggttgagggatagtacctttaagaaatggtgttttattctgtgctctaatataaaatttgaatacacgtttccaaggttaaaaattaagacctctgagaacaggggtgaccaatgacaagtcggggtgattagatgagctcaagtaatatggagatctgatatcttcatatgaagatttgtccaccggagttgatcgagaaattggtgcagagtgatctgttcttggaggaatgtcagcggagtttgttgatggtggtagagccatgggagcatcgatcactggaggatctttagtggtggtagcagagcttgtggctcgtgtgcgcaccatgattgtgaaaaaaatactgcaaagatcgatcgatatgcagaggacgatcgagattcgaagatcttgaagcttcaatttgatttcttggagcttcgtgttttatcttttgatatcatattagaaaactacatattgaaaaaagagagaataattttcattgactgattaatggtacaaagtgaagagtatatatagtaaagctaacttgagttacacctaactaatcctataacagagtaactaacttagcaaacttaacaatccgtgtgtaaccggtcttggtaaattgtaactataacaataaacaacattcaaaaaaattggagtaatagactctacaaaaataatagtattttaactatatatcttttgtttaagtaagatcgaatttactagatatattactacatgagtgaaaatagatttgaccccaggttaagataagttaagtccacactcaagattcctacaaatttaagtcccaaattattaatattatatgtccttttttttttcaaaaaaaaaaacaatgaaggttaaaataacaaagttaacaaacgttatgtaaaggtgaatgattttcttccatctataaaaatttattttctattctaaaagcatgctgatataccataagtaaactaaacaataaaacattaatatcataaaaaaaaaacctcaaatttaggagttataatttctatcccactaataaaacactacaaaataaataatttttttattaatattaaatatttaataaaatatggctattatatataatatctttatatattaaaagtgtctatctaacggcatttcttggtttaac

SEQ ID NO: 112242 - DNA, 5927 bp, Cannabis sativa
atcttgaattagctcatttaaaatttatatgtaaaaattatgcacatttattaagagatgtcgaagtaaaaaaatatctaacatcagtgaatctgcatgcacatgtattttacactcaagtgcagctggaagtaggttaggccttttaattacgatctttagaattaattagggttatttttaatgctttggggccaagtaatcataatagagacccaatcaacactaaaagctcaaggaaaacacagaggatgagctttagtgatcaagcttggaactaaattgacacccaaatttaggtagaaattcaaacataggcaaaatgtatttgaatatgaatataaattgttggattaaacttgcttaggataagaatagtaagaattgtgttgataacatataataaagcgtagataaaattaaatgtcctaaatttaatccatttatataattcttctttaacttcagtttatttgcatttttttattattcatttagtttatcaatcaaaaatttgcttcccaaacaaaattagaaaaattgttgattggtaattaaatagcaatctactttcattaaagcatacccaattttaatgaataatatacattgtataaaaaaattagaaaccaccaatgttagctcaatggtgagagagagatgtaaaaagggcataaattcaaacccaaaataaaaccttgaaaatattgtccctaccacataacattttacgatttactagccaagtttccaattgcttgtgttggaaagtctatctttaataattggaaaacttttttttttatgataaacttcatgaaaagaaccccaaaaacagggaagcggctacaacacccaaatctccacagaggagaaaccagtaaaaaaaccagtaaaccagtaaaaaacaaaggaaaatcagaaaaaaaaaccagcacaaacccatacaaccagtgcagaaaactaaaggattacaaagaaatcaaaaaggactccacaacattcttacaaaccaaaccaaaggctgaatatttgaaagcccaatcagcaagacgatgagccagttcgttagaatctctcttaatccaaaccacctgcgcacctggtatcacgttgaaggcttcgaagagatggatgaacaaagagctgtccctccaagaggggataatcttgctcgacaacgattcagccaagaccttgcaatcagtgaagaaaataggattcacccaccctcttgtagaacaccaattgcaagcatgtaaaagggtacgagcttccgcctcaatgatgctagagaatttcagcttgacagtaaaagcttccaagaccgatccatttgggcttttaacaacaataccccccagcaccaactagtccgcgacaagcagcatctgtgaagaacataattctatccaagtaaatatcatgtggcagcgtaccacttccactctccacaggctgtgggatttccacactgaaagcatggtttgtatctcgaattctgctccatatttcactgcgtataccagcaaaggtaggcaccgtttgctcatggtaagcagaattgcgggtctgccacaacacaaaacagaggcagctagcaaacaaagtgaactgcctttgatcttccactgggttttggctcaaaaaatcaggattcagaatccacttgagcaattccaaaggcgtatcaaacctgagattctcactacgaacagaccaaacgctatcaaaccataaggctttagcaaggggacacttacaaaagagatggatgaaggaatcgtcatcagctttgcaaatgtaacaagtttccgagttgccgaatatcatcttgagacggttaccaaacgggagaatatctctaccaagtctctataaaaagagtttgactcgttcctgttgcggggacttccagagatcagaccaagtcttgtctttaactcccaaccttctcctgataatagctttatatgcctctttggtgctaaagagaccagcagtggaatctttccaaatcaaacgatccacataaccaccaggaagcctagtgatcaagtttatagagctagcaagggttgggacaaaccaccgacgagcgaggtcaaggttccattcaccatcatctcgaatcaaactagatgcatagacagacttttgttggatcaatggattgaaggtagctcgggattgctgccaattaatccacggaacccagggggagttccaaacatcaactgagttaccgttaccaataaggtaacaagcttcattcctaaggatatcacgagcagccataatactcctagccccccaagatgcggacttaggtaactgaagagaccaaaaagactgattcccacgacaatatttggccaaaaagatccttccccagatggactcactaccagcagcaagttgccagcccaacttagtaaccaaagccagattaagctcctgaatttctttaaacccaagcccccccagtccttcggcaaacaaatagaatcccaatttgtgagagccaaaaaatgttgcttatcagatgaaccaagccaccaaaatttccttacagcccgatcaagaacttcacagagacccgtagggagcaagaaagtagacatagtataaattggcacactcgaagctaccgagcggatgagggtagttctccctgcttgagacaaaagtttgcttctccatccctccagacgaccattcaacttttcacaaataaagtgaaaatctttggatttgttgtttgacaagatgatcggattttcccagaaatttatcactggagttcaagaggcggaaacccaattgattctgaatagattgagccaccccagcgattatatttcttgagaaagtaacagccgatttgttcacattgatgctttggccagaccattgacagtatttgtttaagcattgttggacatgttcaatttccccagagtcagctcgacaaaagatgaaggtatcgttagcatacattagatgagaaactgaggggctgtttctggtcactttgaagccgtggataagacctctttcctcgcaacttgcaagaaggcggaatagaacttcaccacataaaataaataagtacggtgataaaggatcaccttggcgtattcatcttttcgggttgaattgcttcaaagggcccccgttgagcaaaactaaaaaggagactgtggatatacaacccgagattagcttgatgaacttttctccaaatccgaaggctctcagaattttctcaatgaagctccattccaggcggtcataagctttggacatatcgagtttgaggcccgcaaacccagttttacccttacaattcttgaaagaatgcatgatctcctgggcaataatactattctctgcaatccacctacccgggatgaaagcatattgaaatggagatatgatcttgctcaaaattggcctcaatcgattagcaatcaatttagaaataactttgtatacaaagttgcacaagctaattggtctgaaactatcaaagttacaagctccatctttcttagggataagcactagaaaggtctggttcagggtcctcacaaatttccccgtttcaaaaaactgggtcactgtgccaatcacatcaccgccaacagtatcccaatggtctcggtaaaattttccgggcataccatccggtccaggggctttaagagggtgtagagaccacaccacctctttaatctctgaagcagatggtattctaaccaggctgtcattggtttccgtatcaatctgaggttggataatgttttccagttccggatcccttgggtgagtagaatcaaacaaccgtttgaagttagaacagaagtaattcccaactgcctgtctaccctcaacccagtcaacaccattatcagacactgcattcacaaagttccttctccgtttgatgacagtggccgcatgaaagaacttggtattacgatcttcgtccctataccacaattccctggatttttgtttccaaatctcacattgtcgagcttcgatttcttctatttcaagaattatatcggcctcgagctgaagagactgctgggtgggctcacggccttgaacctcaaccaagagccgattaagcatgtttaacttatcagagcaataaccaaagtggagtttattccacttagaaagacatttcctggtatgagcaatcctgctcataagctgaaaacttttaacaccctggatttcaatacgccaggcttccttcactaattctttgcaactcgggtccctagaccaagcgtccagatagcggaacggagttttgaaccggtccctattaaaaaggagatccaacataagaggagcatgatcagaatccttcaccgccaaggcacgaacacccgcttttggaaaggatacaacccaattgggatcccccaccactctatcaagcctttcacgaaccaagtgttggaattgcctcccattggaccaagtgaaaaaattacccatactaccgatatccaccccccagtaacatcaagaaactctcttaacaaggcgccatccgcatactcgaaggtcgttcccccgaatttttcaatttgttccaaaatcagattaagatcccccataacggcccatggttcactaaccgcagcaacttcaagagcgaaggaattccaaaactcatttctctctgcccgaacaggggggccatagacaaaaaaacctgtccacctagggacattgaggatgccactaaaggacacagtaatcacatacgaggttgctagaatcacttgaacattaatccccgctttccaacataaacatagaccacccgcagcaccagttgatccaaccacagtagcaccggcaaagccaatccgacgccaaaccaaatccatcctatgataatcgagcttagtttccattaaaaatagaacattaggatcctcccttagcaccaaggccctgagagcctttctttgccagagggttgccaagtcctcggcaattccatgagaggagcttcatggggatttggggggcatgattcggcccgcctcctcggccatcagaaaatccgaattttttccattaccacgtgtcaagacatggaaattatgcaaaagttggctccaaagtaatcctcaccaatttgaatgtataaattattaatatgagtattaggtgggtttcaaatttcaactcttaaattttgcagatatgggatcgcaaattacaacttaaaatgtttatttgtaccataactactcacttcactttcttttccagctattagaactgctgaattatattatatatttatatgtaattgtttagatatatgaaaccccatattagaatgcacttattattatttctctttattcaaccttattatttgagattgtaatactaaattgttagcaatgataaatattttccttaaatcttttgaatatatgattgaccactattatattttacctctcaaaaaaaaaaaaaaaaatagcagcaagtaaaaagtctgaaagcaaaattatcataatttgaatggtataacgactccaattttattgttgatataataagtaaggcagctggtaagggaatatactaaataaagtacatattacatatattaatttattagctttacatgaactctcatacaagatatctatattctataacacactcttctccatctaccttatagatataaaaacttaaaaacatataattaaactgaaactgaaaataatccccagttgaaaatacaggatttccttccaaaaaaaaaaaaaaagataatgcaggattaattaaagtagggctgtacatcggtcggtttgggcggtttatcctacatattttctaacccaatctaaagttcgggttgctaaaat

SEQ ID NO: 112243 - DNA, 3064 bp, Cannabis sativa
gggggggggggggggaaggattttgtgaactaaaattttaaaaatattttttcctaattgcgtacaactgtcgagtatacgtaattttcccaaacgttatacaccgtcaggtatactttttgctttcaaaaaatttcatttagtattactcacggttctccaccattagaaataattatcccaacagtttcttttcttctgggctaagtcaaatctctgctttgcaattctggtggtttccataattgaacctctttttgagtgacaagaattaatatcccattctttagtagtgcagggctttcaattcatggactatggagccatgccccattcctctacaattccaagctaaggcaattatcaatcctgaaggggagccaatggagcaaccttctcaagagaaaattcattgaataaaaagttaccaggggctgccaagataagggaaaaataggttgcaatcatcctagaagaaactaacaagggaccgaagttcgagtgctacccaagaaagccagcctaagaagctctgaagaagaaggcaacatagacatgaaacacaaactcgagtctcaaacgcagagtgacctcaagcacaagaaaatgtacctccttaatcgcaaaaagtagcacataacctcaagttttcttcctagtgacctaaccttggaaacccttaagttagaagtgggaaactcaaatctagatgagggaagctcgaaaaccaagcaacaaatcaaaatttggaccctcacacaacgggttgaaaggaaagacgtttacttacagcatattgaaacatagacaacactgtgcctcaagaatcgaacccaaataatagagttgtaaagaaactagggcagagctgcaagaaaactcttagaataaaaaaaacaaacaagatctacaaactaatgtgcgtgtccattaatggagctccacaaaccgacgtagaagcaaacctaggcaaaggaacagtcagagacgcctcaatgaacgaacaataaccacacaaaggaacaaccgcaagaaagaaatggcgtagaggaattgcactgtcaatttcaaaatcacacgtggtacgaattttttttttttttttatcatcactaatatatatatatatatagaaaatgtttgtgtttgctctcttgatttattttttttttactaatatttgctattaaaattatatgtaaataaatttcaaatttttgaaagaattctaaatattggaacataataaaattttaataattttgatatttatgataatatttttataattaatataaatatatatatatatatatgaaaaattaatttagatatattttgtgttagatttttaatcaaataacaaaagttttgatattgattacgcatataatttttttactaatatatataaactaagtgaatattacgtatttaataatatttttagattttttttggatatgtatatttttagttgtataattaggttattttttttaatattattcaattaaacaaaattattttttgttaaaaatatttattttaagtgatatttatataataatatataaaatttgttgttaattataattttagtattgtcctaataattttaattttataattcttttcattttttagaagcatcacacatttttctaattttttaacaataatactaaaaagatatatttttggttattgcaaaagataacatcagtcattttttaagaatcatgacactttttttattttattcttttgaaaaaaataattatagaaatatatttgtttagatatgtggatgagtacaaattgataatagaaagatatttttttttttatatgggttaaatttatcatgcaatgttaaaaaagacacaattaatataagagatcaaatataagaaagatgtttgaactttaaatttgaattgtaatattttgaaaaagaattacactttcttgtatagccaaatttaatataatatttataaatattataatcgtagaattacataaagtactattttttgttctttgaaagaacacgaaaataataaaaaaaattacataaaagtgacacgaaaataacatccaaataatatcaaaatatataacaataaaaaataacatacagataacaaaaaattaacaagagatcatattttttgtaaataaaattataaaaattgtaaaaatatttaaaattttgtaaagccgtatttttgttattattgttatttgtgtatgtctgcagcatgttacactgtaatttaatttttaagtaccgctggccatagtgaatgagagttgaatatcaccacaatggggactatcatcgcaaatgcaaatgaagatgcacaatatttggttcttggtgctactaaaacaccaactcccacaacatctgaccgccaaactaagtgctcggtggtacctttgaatcaaaagaatgtgattagttcattattcttaattaaaagaatttgataagttcattattaatttgaataaaattgaaccaatctctgcgtgatgcatctaattactcgagtttatattgtaacaattatagtagaggggtgagtgagatgagaggggaaaaagataaatacccctgaccactttctttgtcatctttcaatatagttataaactttctgagcatgatttaatatagtgctcacgccactaaaatatgcaaaacaaacatagcatgaaaggttaaagcacatgcacacccagagctttgaagctctttctttgtgattatctcctattaatagcagggatggagggaaaaattaacttcagaagggccataagattttttattaaaaataaaaaaactagataatttttgaaaaaaaaaataaaataataaaggacatcgtcattagtttttgtcaaaattttgcagtgcctgacctttcgaagttttgtagtccctaacctagctcatctacaagttttgttatttataattgggtaaatatcattttggatcttttgcaaaagttacagattagaccatgtgttttgttaaatgataaaa

SEQ ID NO: 112244 - DNA, 4887 bp, Cannabis sativa
acaaacgtacaccaagggttctttgaagataaattattcgtgcaatttttttttactacaagcaactaaatgtttaatattatttaataaaataaaatcctccaacaaacaagacaaaatattcttactgagaacaaaaaacacctgatctatttctgtggtattttactaatgtttccttgttgtccgtaatctaggtctttccatacacctacgtgaaagtatgaaattgcacttatctaaattattcatttaagattatattatctaagaaataaagacatgtagggccacacacatggttgtaagagactaaaaggattatatttgttctaaaaagttgaggttaatgatataaatcagatattgagtacatgactaccttgtatcaacaggaagaccaccaatcggaacgacaatcctgtgaggccattggagcatatcggtgacaattgtattaacagtgtcctgagaaatatttgtggatgacaaattagtcttagaagcactgataaatgaatcagaatatatggaagtttataatatacttacatcaatcatatctgaaattccaggaagggccgttaaacttccaccaacagccttcagagtataatcaattctaggctttggctgatgaatgtataaatatagttagtcacttttaaaatgctcatctacacctgtattgtctaatcaaaagcagactatgaaaagtaagcaagtctttgatagctacttgcaggaaaaggtaagcaagtcttccataactacttggacgaaattcatactcgttcatcccttctatcattcagttaagtaaaatagtatagccaatgcacatcgattaaagtacatattttcagtctaatgttcacatgaagtctaaattgtaatattcttacaagcgtatcaaaaaaatgctgaattaactaattataccaaggaataaagaagcattgattgatcactcaaaaagtttgcgtactgtggctgcttcgcagatataacaaaaataaaacatcatccgcaaaatattaaataacatttaaaaactatttgtatgttcaaactcctttcaaaactttcatattaactttcaaaactgttcatcaatatgcatgtaattgagaccttaaataggaaaatctgagattttttttatttataagaaaaaataaagattgtatattaataaaaagagagccaaaaggtgataaggtagcatcataaaggaagaaaaaaatgttagaaaacattaaacgttaaaaagataaaaaaatattaaattatgagagccttggggaaagaaatttactccaacgtttatgccattctttgttgtaaatgatgttggacaatttaactaataagagccatatctacagaaaaaagcatctaagaaagattgaaaaataaatgatttgaaaacagaacacaaaccatgaccatgggaaagcatctaaaagggaatgaattaagctaggaaagagagacaggtttaatatactcagggatatgcaagcagggaataagctcaaaatttaaaagacatacgtcagagagcagggcaacaacaacagcagaaatgcaagggatttcttcagtaagttggaagatgacccgaataacagtaaaaacttgaagatccttcaactgcagcaaatgttattgcaaaatattccaatcacaattcgctatgtataaagattaattgacagttgaaacaaaattgatgcaatgacctgaattggaattgaagcaaccatcgcagcttcaacacctaatatgatgctcggatcaccaccccacttgaaatcaatgtccattatgatctggccttttttatgactctggacacgaatacctgcaatgattgtttgtccaagaacaaatgcttttttaaaacaaaagggagggaggggagcgcatagagtaacatgaaaaagtgaatacagcagataatctgagtagcagataatctcaaaattaggaggaaacagcaacagtaaattcatataaaagacatagtggtctcaaaggacacatcaattgtcattaattattcaatattacgttgaatatttgtttctggagtgtaattttattcgatgcttatggagacatgtgctagaggagtttgagttggcttgggttatgccaaggtccgtaccacaaatgatagcttctaagttaactggcagcaaacgcagaacaaagctttggaaaacagtgatattagcaacaatttgggccgtgtggctcgaaagaaataccagaatttttgaaggggttgtcaaatcagaagtggttgtgtgggagacagttaaattttggacagctacttgggtctttagaaccaaacattttgaggatctgtcctttctagacttatgtagagaatggaaaacatttttataagcttcctagatgctatctgtaaccaaggttttcctccgccatgagtgaggtttataaataaataatgggaaggaccctagataaatataatcaatcactaaaagtaggaatcttttattaaagccaaactcagatcaaacaaaaatccttaataagtttgagcaggaagttttagcataattgggacttgcagtcagaacaattaagttagagagatataatagtggaactagttatggatttacaccttcaattttgggtgctacacgacccagagacaatttgctaaactttaatgaagtaattccaggaggtcggtattcttccaataatggttcaacggattctttaatcaccatttctcctgcctgagaataaatagcatgttagtttgaaacactgaagtttactaagctacttagttttatttatttcatctcatccttatctttatgccacctaactccccactttttcagtctactttagtttacattattcaattgaaacaacaatatttgcattgcatgatctagtagctaatggttcatattatgtatgtacaagaaaattacgaaggtgaactagtaaatattctacacagaaaaaactaattaagatattctatccataagaatagcaaaaacttgcaatatgtaatactacaaccatatattctttgggaaatctttccgtgtcagaataggattttctttcactgtgtatatctcatcatcacctatacaaagtgtgcatgtgattatatgatttcttttaacaaaagttatttacataatatatctaactagtaacttgtccgaattcccttgaaatcctctaacttaggctacaatgtacccccataagtagtagcctttagctgcattgcatgtcctatatcgcaaaaaaccccccaaaaaatgcagtatgaactacttgtccaaaacatagcatcaattccatatacaaagaaaccaaaaaaactttacaagaagtatagataacacaaatctccttcaaagaaaactatataataaactatttgacataaaataggaaagactatataatattctttgagaaatctttccatgtcagaatagaattttctttcactgtgtatatctcatcaccacctatacaaattgtgcatgtaattatatgatttcttttaacaaaacttatttacttaatatatctaactagtaacttgcccgaattcccttgaaatcttctaactcaggctacaatgtacccccataagtagaagcctttagctgcattgcatgtcctatatcgcgaaaaccccccaaaaaaattacaatatgaactacttgtcaaaaacatagcatcaatgccatatacaaagaaaccaaacaaactttacaagaagtatagataacacaaatctccttcaaataagactatataataaactatttgacataaaaagggaaagacaggcaactttttccctaaagagatagaagagaaatttgcattcagcggtatataaccattgatagaggatgagaaaaagtcttacatctgcaatatatggccacaatttacttagttgcttgttcagccatttcacctgagacagccaaccaatttagaaccatcaaacaataaaaattatgttcaattaaaaagtttcataatcaaaagtgagaaataaagagaaaccaacttgttcaaagacagggaaagatatccattcaggaaaattatccccacaaattttcttcaaatcatctctgctgagggacccaaggagtttaatatcaactgcctgcaatgatacaaaatattcagaagggaaaatataggaaatacctaaaataattacggctgtccatggatcatcatcactaataacttcataatgcatgcatctcacgctataaccaaaactaccctcacgaacaatcttaaatgattcaatctagctcaagaaccaaactccagccaccaatttatggatttagtgcgccacttgggtctagctcaggatgggttggtgtgttgagtaagagatatcggttcaaactccagcacgggctaatttcactaataacaataacaaaaaaataactatttcttatcttcagctaagaagccccagataataaaatacacagtaatattattcttccagcatcccctcaaccatttcccactagctaaggtccacaccagcttctgcctaatacctatactctccagtatgaaccttttcctcctgaaggtaattatattcgtggtaccttttcaagtaaagaaacactgttcccgtaagcatccatatttattcagactatctactactagtagtaacgcatgttatcatattacatgaaaacgtagagcaataataattgcattggcatttcttctaatgaaattctcatttttcagaagaataatgaatgaaaaatcaagccacccccaaagcaacacagc

SEQ ID NO: 112245 - DNA, 17670 bp, Cannabis sativa
  modified_base (27)..(30): a, c, t, g, unknown or other
  modified_base (947)..(948): a, c, t, g, unknown or other
tggaatgccattccaatactttaaaannnnaccaaataaaagaatggaatgaaaattgtttcctttctattccattccatttcattacctccaaccaaacgccgagtgtaaaaatttaaatttgtcttgaaagttatccttagaagcttgagcttcatgaaaggtaaactaattaagtagtttatccttttcgttctccacttcaatttccgaatgcttctggaaatatcaacaattttaatgtgaaaaaacaactttattcaaaggcgcaccataataagaggaagcatgtaataacaaaatcgtaatgaatgaacgtgtacactattttaatattttagctagaaacactatttgtagttaaaataattccaattcaaattgcctagcttagctagaaacacttcatcatcaacaccaatatatatatacaaataatatacataatcatcccaaacttataaatatattaagaacaacacaaatagcatggaaatgggatcgattcacaaataaaaatcagaaaattatgaaagtttgggtagtgagtgaagtaagtatatatagtacctgaagtaattgtattaaccggccaatgattgaaacggaattcctactctcctccgatctccgatcagaacgaggttggtgatatttctagggtttacagagagaatagaagaaaagccagagagagattgagtaaaggagagagcaaagaacaatgtgactaactgtgcttgggcttgggcctgggcttcttaatatagagtttaatttgatttaatttggggttcttacaccatactgaattttcaatttattttttcttttttaccgtagggtacaattttttttatactgttgtgttttttttttttttttctaaaatactgtgtattgtgttaaattttcacagttattttactgttgtttttaattgttcnnttttgttattttacggttgttttacaaaaagataatatttttgtaaaacatttcatgtggcagtaaaattgtaaattttgacccaaaatccagtatttttgtaaaaattcgtttaattttgggaaaattaaaaaaaaaaaacgaaagtaaccaaaaacaaattacaaaaatacggtcggtacgaaattttcaatatgttagattttttgaaataaatattttatattttatttacataaactacaggctttttatattataggaatattggcggctaaaccacttgaactttacgttttgtaacacttaaccacaaaaactgaaattttggcggcataactacctaaaccctagttccgttttgctctgcgtacctccgtccaaaaatcacagttaagtgccacggtggactgtctacgtgtacacacttgtacacatggcaaatttttagtggtccacgtaatattaaagttaaaatattttaaaaataatttaaaaattaagaaaaaaaacaatttataaaaataaaaaatcttttttttttctctttctctttcttctcgtcagacaccatcatcaatctcctttcaccttcgtaaaacccaatcctgctggtggtgccgaacccaaggtgctggaagagcgtggtggcgataatgaaggactggtagtcccagaatcccagaatcttgttatggaagggatatatattttcataaaagagaacatctcgatcatgcaaaatataattggtttgaatgtcaagtaaactgtatcctttcatattttcaggatacccactgaatatgcatgctttagaacttggtgagaatttgtgttcatgtgttatgtgagatacatatgcaagacatccaaaatttcttaaatgttcataagctggttgttttttgtgcaatatttcataagatgtcatgtcatgcaataatacagaggagtcctattgaggagataagttgtcgttcttatcatgtaactctaatagaaaaggggtatgttagactgaaaagctaaagcaagtgccacattcaatatgtgttggtgtttgcgctgaacaactgaattttattgaggtcatccaacacatgactgatagttgacaatatcttagtataagctctttggcattgtcagtcctaatagatttgatatttgtttgatattgggtgttgacaatgtaaagaaattttgaataataaatggtgcatcagatttaactttaagaatgtaaacttaagtgtatcttgaatggtcatctactattgtgaaaaacatacttgtacccttcactggatgcaatagggtaggggccccaaatgtccatgtgaaagagatcaaaaacagcaggagcaatattgttatttgagataaaaggtagttttttttgtttagcaaagtgacatgttctgcaataaaatttagatacatgttcagtaggaaaacaaaattttttattaatcttattggtaactaatacagatggataattatagagagtatgccattgtgtttattaaaagaaacagtacaagcagtaggcattttatagtttgcaaaaggatttgtctcctgttttatgtattatagattgcctattttcctagctgtccaaatcctcaatatctgagaagatccctgaataagatattgattacttgtgaataatacactgttagagcaagttcgtaacaatgcacttactgagaggagattaaaacgaaactgaggtacatgaagcacattagttaaaataatttgtgagttgataattacagttccagttttaattatttgaactgaagtggcatcaggtaatgtcactttatgtgcattgtttgttttgttaaaaaatgcaaagcatctatcgtcataacatgcatggtgagttgcccactatccacaatccaatgtgttaggaagattaaagattttactagagaagttagtaacggctggaatgtcattggaagttgagggaattaatggtagttgttgtgccaacattgagtagttttgacactattttggtgtgagttgagatacagtgacatctgattgtggtccagttatttgcgaagcttgaggattgttcctagaattatgggaatagccttgttttcgacttgaattggcattactatcgctagatctgcgattgccatatccaggtggaaatctatgaaggaagtaacacttctccttgaggtgaccatgtttcttgcaatgggaacaagtgagacacattcttttattcgcggatgctaaattagcactaggattggaatctgtagttggagtggaagatgtaacagctacaattgagggatttatgcgagttcttagagttctttgatgttcttgttggacaatcattgaaaaaactttgttcaatggtcgccaagggttgattaatagaatctgagcgcagacagcgtgataaaattcgttcaaaccagtccaaaactaaagaacctgatcattgttcatatatgcttgattctgagttgaagcggcacagtgcaagggagtcgtggacgaaattaattgatcttatcccacataacagtcagtttggtgaagtactaacaaaatcctctccttgtcgaaggtatatggtcaattcattcaattcaaagatcctagggccattgccctggttgaattgaatgttgagaacaatccacatctcagcttcagtatcaaagtacatgatgttgctcttaatctcaggggatacagaatgcaagatccagaatattaccatttgattacaacaagtccaagaacatgaaagttgatcatgaggacgaggttgcggaaccttaccttcgaggaatggtgttttatttctggcaccaatggaaagcttgaaatctctttttcataattgaaaatttcgatttgtgaggattggaatggcaagaacaagccttggatgatctgcagtgctcaagaagtattggagcacatcttcacaggctggtcgatcatttgcaacaaggcaatttgaagttggaggaggagatgtaactcgagtcatcccaactaatgtttgtgatggtggcaaagcaacttgatttgtggcatcgacgattggatcttgaccagtggtggtagctaaagatgttgggcgagttctcatcattatgtattgaaggtttcttggaaaaatcacaagttaacttctaataccatataagttggacaaatattagcttgaagctttgttttattattgtttctatatattgtgaatggtacaagatatgacagcctttgacataggcagagggaggagaagagaaattagacagactaattaacattacaattaatctaagcgaagattataaaaccattaactaaatgtaggactacttatcctaataatgtagactatacaaataggttccagacaagagcaataacacaaccgatgattttactatcaaatttctgtaacaatacttgcataacaatgaatgaaagaaaaaaatttaatggtaacattaatgagaagatattatagtaagacaacttatatataatacagatcaatccacgtaaatgcaactaaaaagtctcaaataagtaaaacgtaatggacaaaaaagatgtggggaagttcagacaatcacatctatgacatagtgagcgaattggtcactactcatacatccaagaagctcatttgtaggttcccataccaacaccagtttctctacctgtataaggttggaagctttctctggcgctggagtagcatacatagtaaaattctgagattattgcagttaagaacacaaaagctgcaccagctgcgaaaactccttttctcacggtctcacaggatggagggttgtctatactgaagaagttcctgtacttggtatggtaggcattcctaactgaaccagccaataagcatgcctccgcaatgatgaaaaataccctgaaagaagtcatataataagcattcattagataacaaatatccatgattatactttttgcctttgtctaaatcaaatccgaaacacaggatggttataagatagatatctcaaaaaaaggaaagagttatcatggtgatagttacataccagcagataatgaaaagaaccactgcccaggcccttgatcctccaggacttaaaggcttcccgcaacagaagcatcggcttgccaccattataatgatctgacttaccataagaaacaagaatgcaccaacaccatacccagttgcaatgtctgaattataaacgcagtagttgtagttcttatcagcatcttgaacaacccacccctgtcatggaatgtgtaactggatcaatacgttttttttcaaacactactaaattataattatttcatggttaaacgtgataaacattactcaaccattccccaaattggttatgaactaatgataaatattgctaataagaccaagactgaagaactcaggtaaaattataaaaggtataagattctattcaaggtattggatggctactttatgggaacaacatggggctaaagtaaaatctaggcacacataaaacgaaagaggcaattaccaattgaatatctatatgttcatacatgaaagtataatagagatttaaccaacataataatgttatcacgacttaacattgcaaattatttcctcaaaaaatataagaagattgcaaaatatttacaaatgtactgaagaaagaaagtatatgcagtttttcattattcatgaaagatgtatctggaaaaccatatgttcctacagatctagcttttaatataccaatatctaaaaaaccagtacacatagtttccaaggaaaataaatttctaatttccagtccgggtttttctttctctcactctttaagaaaaattacacttgccctctccactcaaaaacagtcttgaaataaaatttcagtgtgaaagttaaattttacaataataataaaaaaaaagaaatatatatgtacattacatatgtcgtcaagattcagttgcataaataacaaaaggaaaatccaattaattttcttgcaactcttttagttttctcgggagccaaacaaaacccaccaactgaaaacacctcattagagaaacccagaaagcattcatacatacatacatacatacatacatacatacacaataaactaccatttaaacttaaggagagaataaaaaaaggattactcactttggttctcctctgctcagccccaacagccagaccaaaagcaataatgtctaagatgaataccgcaatcaaaagcagctttgacgccatttctagaaagcttcagagcttcctctcgcagatctactactgcttcttcttcttctgctcgctctgacttccttgttacccctgtctctttgtctgtctatataagcgaaagaaaaagaaaagtgtaatcaaatattaaaacagagagagaagagagagagtgagagagagagagctgtttttaccaatagataagtacctcccaaccgtggactacaactgggtacctcaccgcttacactaaaatgtctataatacccttttctctattgctaagcaaagcaaaccacacacacgaggagttggtgtgttatttaaaaaacatataaaaacatattttattgttttaatttgattaaactttggagaatccaatcataatagattattgtgtcatattttaaaataactcatttctcaataataatgttattctatcttaatttggctatttatttattgagatttgattcttaaaattaccaatttatttatttagggctcgtttggaacgttgttgtattaagtcgtattatattatattgaattgaattatatatatattatatttttatataatactatattaaactttaatttaagctaaaacattatatatttaggtgtccataaaaattaataccacatataattttacataaaaatattatataaaatataattcaatataatacaatacaatttaatacaatgttccaaatgactccttaataattatttatatctattattataatcatacaagtgaataactaaataaatataataaaatctggcctccaagtgatctacaaaaaccatccattttacattagctagagtctggtttactctagagagtatagatagagctttatttttatttatttaaaaagagaaattattcatttatcctatattttaaaagaaaaaaaaaacaaaaagaatcatgccaccaacactaaagaattgtcatcaaattaacatgttagcgacttatgctttgtatgcaattcataataaataaacaaataaaaacatggacacaaaagattaagtacattttttttttatctgaaaaaatttacatttagttggcatgtgtaatttgttttggttgagtagtagtgaaagggtaaaattggaatttgaaggagatgcatgagagttttaagggaatagtcagagtgcaaccgacgatagtgactcatacggtcatttaccaataaggaaccgttgaaaataattatatatgttgtcggtggcactggccaggtgtgtttaatgtttcttttctatattctttttctcaagagataaaagaaatacaaaatggaagtgaatcaatgcttcttcagcgtaaagttccattgttcttattttgcctttacctgatgtgtaacttataattattcggtcacttctacgttgtgcctcttgcatttagagtacttagtattactctcaatctactattataatcttttaattaattcttacgcccgaaaatatatattgaaatatattttttttcacagtaatgttcgttatatttacgacatcatctctgtaaatctttaaaaaattttaaatagtttacaatactaaaaatatgtttgaagttttttgaacacacataataaactagaatattaggttttcagtactctaaactattcagaatttttcaaaaatttacaatgatgatactgtaactataacgaataatcctatgaaattaaatttgaaaaaaaaatatttcaacatgtaattttaaacgtggaggttaactaagacgttgtaattagcactccttttatatttatagtatttgtattgaattatatagtataatattgtgttagattctcttcgatttaggtttgattttgattcgaatttagatatggagtcaggtttggagtttagaattcgaagttagggtcaagattaaagtcttggcctaatttccaactccgaattctttctaaatataataatacaagttaatatagattatttattatgtattaatactaagtttagtaggaaagaaagagatttaaatggatagagaacttagtggagatggagagtacgaaggttgcagaaaataattgttctcttttattttgtttaatattagatgcgaagttaaaatgatagaaaaaaaatattagcaagattataaaattattcgtgtgaatataaatataagtcactttttgaaaaaggatgattattgtattttttttttcttttttatctttttttacaattctcctaaaattagagggattgaatttttaaagttacgtctctcctctctcttttactctcccttgtagaggatttatctctctttccatcactctcccttcactctctctatcccttactagatatagtgtaaataatacaattggcattgtattaaaatctataatcatcataattaatataatacaaagttttatctaaacataatatttcttattatctaatataataagatatttaaaccaaacaagcacataataattaaatttaaaaaaaggacagcataagggcaaaggtagatctaaaaaataatgtggaataatgtggtttggaatggaatgcttgaaagaaacaaaaggtgggtgtgggtgggaatccgaacaataaaatttggccctcatgaatgaatgtgtcttctcttaggctagcattaaactctgctccaaaaatgaaatgtgtgatgttttcatttcaattaagagatttttttatattttaattattattttatttgcatatgaattttcttttcgagaccatattattaaaataaacaaaaacaaaaacaaaaacttagagataatgactgcaataactattttcaaatttagcatttcttaaacttttttctgtattttgacgattcattgtcaaacatgttttttatacaaagaaaatgttatttaagaaatatattttagatcaaacaaagtattataataatttttctttggactatagccagccctgaatgtaggtactaggtagactagagttatgttcaggactcatttaaaatggattctaaagtttgaattattaatttctctttatggccttcgatttagacaatcattattttacatattataactttaaaaaaaaatgccataaatattttgtaggaaaaaaattattttacatattataactaaaaaaaagtgccatatattttgtggaaaaaaaacgatcatgaagaactttgccttatatgttatcctaatattttcagcctattatcatactaattctagatatttgttaaaaacacattgtttcactgtgtttatcaaatttaatttcaataaaaccatattattctaaatctttccaaaaaaaaaataattaattaattaatcatatacaatatttttaacgattgtgctttcataatgaaaagcaacctataattattttcctgattagatggcataccactacaatctaaaaacacctttccataatgaaaagagtatttactggattagattttccctttacccctaacaaatattcatttcaacactgaacgtaaaagttagaaagacaaccttttctattttgtatgtaagttagaaagacaacttgaataaacatcaatggcaaagactcaaaaataggttgagagactagttcaatagtgagggagggataggaaaaaaaaagaagtcatgagttcaaaaccaaaatcgctaagatattagtaaattgtaataacactaagctacactaacaaaaaaaaaaacgtttgtaaactcatacataaacacctttattcacaacaagctctgaaaaaaaatacaaactataacttttttttccttccctttgtttctatgcttccaattaaataaagaatacaaaacatacagaaaaagattcacagtattgaaagaaggtaagtacacaatataccaaataaaagagattttaactgtttatccattctctacaatacaatacatacgccaaaatcgataaacttacatataaacttccccgcgtggcagcaacacccaaggccttattgtgtagggaagcatagctaatattcttttaggttcctccacatgaaaaaccacatcttatttcaccagctgcaatgttcaaagacaaacacaaaagtgttttcatgaaaatggaagattttgtcaattcacagcagtagtcttgcttttctttccaaagaagagaagcttcctaaaccctttggttgctttaggagagctctcatcactgttccatttcttcctgctagagtggagagcttcttccgtcgtttcactacttaatggaggtgtagagatttcaatctctgagatttcctgtgagagtggtgagatttcaactgctgccctgtgctcttcgttgttcacaaaagtgacgaccgaagattttttaggcgatgctacattgggatttagagtactttcagcagtctcttctgttttttgctcttcaataatgacaactggagattcctttggcatgacctcagcattgccgatcagctgatcattttgtaaaggctgactttgaattggctcagatgaaatctcgtcatatgttctgtcatccaagacttttacttcattattttcaactaaagatatgcttggcaactccttaacatcttccgaattgctaccggtatgactaggctgcactgcaattgcagctgcaggattcacagactgtgcttctgtgattacaacgcattctttttccttggcatccgattcagaagaaagtacacggtttaacttttttggctcattctctgaaggcttcaccttgtttgggcttggtttcttatttgtagcagctacactattacttttcatgggttgcttcttgggcaggccatttgattgaggtgtggacacttttggactcacagtccgtgctgttgcgaggcgttctatggtagaactacgaagaactggcttatttggctttgtagctccttgagccttctcactgtttggggaactgttgcccattttgctttctgatgaggcccgtttaggtgtagctctagtagtccccctggaagtacttctttcagcaattctcctctggcgttcgagtcgcaattcctctagtttcttcctgttctcttcatcctatttagcacaaaatggaggagattaagattatatcagagttacatcaaacattatgtgatgaattagcaattggcagattctggaaaaggttttaaaagaaaaatataagaaaaacttgaaacagttttagaaaaggtgacatctttcacattctttaaatcaatttgaaggcttaaaggtttgttaaataccctctccgctttgctctttacagatatgcttctgcctgctggagctggtttcttagtccttgatgctatatcagttctgtttcttcctaaagatccatttaagccttttgaccttgcttctttgcctgcaccttttcctccaggaactccattagttttgccagtcttttccttggaattaggtgagtcgttcacatcagcacaatcagtgttctcagatttaacaccctttttatttgctacagttgatgaaaagttgttataatccatctctggggtccatgatgtcatagttgcttcagcagctgaatctctatcaagcatcatgtaaaggtcatcgggctcatgggtactaaaagcttcaggcttatcatgtgaggcttctgggtttccatattcataatgagtagctcccatctcaggaacaaagctcatatcattccttaagagggaatcagattgatctacaactaatcgatcatgaaccataaatgaatcatcaacgagaacatctttcttgttcttctcagcatggaaggttgaagatgaggaataagcaccatcatatatattaagatctttgctttcatccacatttgctgcaatatgtgtctggttgccaaggaaccattccccgtctgttgaacatttgtttttggaggagccatcaacactatcggatagattaacatgagatttgttcccagattcttcaattctttgtgaaaacaacaaatcctcttcagggctatacttcttagtaattggaacaacattttcaccaccttcgaagtactcaacttgagttttgctctcattcgttgtcccccttcctgtaacaacaaaatcatcgctggaaattccacgttgctttgtgatcttctcttgttcaaaacctagtgtagattgttttccttcttcagagaaatattcatgcatagggcgtggttcctcatcaaaagtacttgtatctttgtcttgcaatagaagattttggaaagcatcccagttctcatttttcttttcgggattatcaacagcatttacgctcttactttcttgctcatcattcccatttgaatatttaacaccaccttgtttcttatgacgacgcgaggaaggtttgtgtctcctctccaatgatccaacagcttcctccacctgctgtttaatcgcatcaccatcgatgactccattctcatcagatgaactttcctcagatccgcttccttcttcatctctcttagagcttatatagttaatgttccgaataacaacctttcttgaggactttttaccatgtcttttcttccgtgactgctcttttgaagattgcttttttccatgatgtgtctgctcatccgattcactatcataacttgactcactttcctcagtggattcatcttgctctgcatcatcctgcattttcccctgagagtatttcttcttactcctgcgagacttatgattccgataatcaacagtttctctatctacatgaggaccagaatcttccatattaggaggccatttcatattccctggataataaggaggaacctgcataccaggaaacatgtagccctgatatggatggaaaacaggaccttgaaaattatgcatgtactgtggaagatggttgggccatgatgctggcatttgagtttttccatcaattgatgatgtctgagaaggtaatgggaggctgttatctgcaattttttagcatcaaagatgaggcattagtacaaagaagtaattgtacgaaattaattaaaatgagaaaacttattattatagagatgaaagatgagtattttctttataaataaatctatcttattttacaataaagaacgggagcttgaatgatcagtttcccataggggccataccattgtttgcatccaaacttccgtgactagtggtggagtcagaaactgatgtgtccaaggcaccatttgatttcccattttggttaacatttatcatcaaattaggaatttgagtaggatcaatgtcttccccagcaagaatgattccggatgtctcaagatagggcatgactggctgagggcatgcctgcattgctgctaactcatttatccaaagcctatcctcattcttctgtttgcatagctcaatgaaatttatgcatgcttccctgaagaaatcagtaatatattatagcctttaataaaaattatacacctcgaagctcccccaacatgtagaattcataaagaagagtggggaaggggcaaagaaaatggtttgcaaggtaagtgggaacatacaggtagtctgcttgtagttagatatgtatacatatatacacatgtaaacacacaactttttttatcattcaaataattgattagactgttcaagccccaaatttaaatggtctccaatccaaacaaagaagaagaagaagagacataagtgaaaggagaaaaaaacagagagagagaaaattggaactattgatcaaaacaagtgcttatcgttaacaacagattttgcttagctacatctttggtaccttaaacgcgaagccccaaacgcatcagcaaatgatataagatcatctaaatagtctggttcaaatctcgcaactaaagcacgagcataagccattgcctgctctttgcagagcacggctcttcgtgtttccaaaactcgctgaagacggatcctgttcacaaccagcagttgacaatcaatggatgagaaaaaatagatgtcttgtaaccagcaaaaaaatgtatgacaccatgtgaattatagataaaacagaggaacagatgatgaatttacttggaattctcctctggagaaccatcgagcgatccattggtatcagcttttggctaaaatataagacaaagttagcataaaatatcaaaaattggataatttaaccaatacatcaattcaccttcgcttgtcagatgatataaagctgcaagaaaaagacataccttggagacaactgatgccctgtttgaattcccatcagcagctgagacatttaatttcagaagttaggagctgaaaggtcaagacaatctgctaatcaaccataataatttttaacattcaacgactaacacatgcacagtccctttcactgcaatacaatttttatgaatttatatatatgtgtatacgtaccttcagcctgtgccaatgcattactgttggtcaattcattggattgaattgaattctcaatctgcacaatctctttctctatagtaacaaatctctcaagaacttcgggttggttaacaaatctcacaaacctgccgtaagtaacccatataaatgacaatattcagtgtattgtcaatgatgaacatatttgaacttcataaatcatacctcataacactaaatctacgttatttagtctaataaaggtatatttgtagcttcaacggccacagcccattccaaaaaggaataccacacgtttaaattcatcaaacggtgatcacaattccaaaccattaaaagcaaacccatttcccttaaactcatccttgaaagaaaacaaattccccttgactaaatctgagtccaaataccacaggaagaaccagcaatggccgaagtaagcttttcagtgaagtgattttacctttgaagagtggctttagtaaaccaaggggcattggaccccgagggacgaagagtaatggagtatccacctttagaaatctgatctttggcgcatttaaggtgcgtaagaaagggcgccagaagaccagacgcaagcttctcgttgccaccaccaacggcgaaaatcaccagatcacatcttcattacaaaatgaagcaaaaattaagatttaaaaaaataaaaagaaaatcgttttcagcagaaacccagatgaaaaaatgtgcttaactagccaaattacctggtcctagtcggagtgagttggaacagtgcatgatcaaggcgagttcttgagtccatttctttgctctgtttgagggaatgaacagactgagagagatgaagcaaagagaaaaagagagacacagaaaaagagagttagattcagagcatggtcatgatcttagccgaagcatagttttggaattttcctacacagaaattatactcttttcttaatttagattttttattttctcgggaaatttactgtggagtagaataagaatagaaagaaagagaaaatgccagcaagaggtgatgaagctgaagacttagacagttgggcacatggggaggaactggagccttgcgatgggcctctctgttttttgatcgttgatcaaaatgggtcccaccttttattttttttaatttttaattttctcaaaaagataaaatgccgacaaattaaaaaaaacacacactaaatggtctttgaggataacacccacacgctccttttcttttctttttttcttttataagattttctaattgtcattgtaattattatttttatttttattattctatccaaaagattggattgaattgaatctacggtgtttttcactgtattgctttttttgacggattggatttagatagggagaggagaagatgatgatgagttttgtggtggagattgaacaatatgggtgcagttgagaagtccatttcattttattttatttttttacttttttctaaagctttcattctattccaacttaaatgtgactctcaatatatataataatgtaatgtaatactataaattgtgcaaatattagatttgatttctaatctaacaatattttcttttacataataataaggaaatgaggaggggtcctacgtactcctcctactcgaatgtgtacatatgtatgtgtgcatatatatctatatgcatgtgttttggtttggagtgtgtaacaagatttgctttgctttgctgtgatgtgagtcacagtggaactgtgaaagagtgagtgagtgagcaaggaataataaaaagtggcttgtgccaaccgctaaaaagctttatctttttcattaaatacaataacacaactactactagtacatacatcatgatcatttcatcctcaaaatgtcaaatattcaaaaaagcattagtaatagcaacgttgttaccaaacaagtaagttcttataattattgtactactcaacttacttggattagattgtaaacaatagtcatggtgtacttgcttaacttctatcaaatcaactaatcctaatcctatactcatgtacgtacttatatatgaaatattggttagattattttgcacattatggcacccatatagctcttatatattacataataatttatatatcaacaatacatagtataatgcattaggtttctttatgaatctaaatagtgtccctcgatctacatcaagtgcagtactctagtttgttaacagcattaacaaggttgatttatataataatatttgcggtagatgaagatgaatgtgaacatagtcccaaatttgaatataagatttgttaaataaagtcaaaatgcaacatgggtgatttatttaagaagtatattttttttttttttttggaatataaagactagtactgattctttaataagcaaaatattttgttttgtgtttgctcttgtttcatgtattgggaaagtgaaaggaatatggaacagaaacagaggaagtgtttataaagtcttgtcagctatacataataagtactatatatattgggtactgaatcataaatacgtacatgttcctgcagctttaatggctgaatatgtgtttttatgcatttaaaataatgagaaattatatgttgtataatatatatttaaactaatctgataataaaaatatttaaactaaatgagtaaatatgtatttattgaaaggaaaatgagttgcattttataaagaatgtattgttagagatattattacaatggaaaaaaaaatcaagatattacaactctattgtaatacaatac

SEQ ID NO: 112246 - DNA, 4257 bp, Cannabis sativa
aatagttcagggagaatttttaactgccagaaaagttcagaggacataatttggtacatgttaaagcttaggggacaaaaatcctaattagcctaacatagtttgaattgagaaacaacaaaaactgaatagaaatccaactgttagtaattgtccaaagatgagtattttgacaataaccttactttgattgcacgtgcaggacatggcgcttacatggtgtaaaacaccattattagtactttgtagagacaacacagtgttgtgttgcctcagtcattgattgcacactaagccacaacacaaatatatgtgtgctgcagcaccaatattacataagctcagtgttgtaatgctaattcactggatttgcatttagagaaataaagattcagtgttgtggtgcaggcttattgagtgctccagcactagaacttttccaaagctatattacttttctcaaaaagtgatattaataatggtatattgtcaaaactcagtgaaaaggaaattccatcaattacgaacattaattattttctttcagaataaaattgtgctaacaagtttcttggtgtacactcatttttacttggcacaaatacacaaaggctagaattattgtggaagctatttattaatacaacctgaaaacaatcttagaccagagaagggaaataatgtgttttgaggaaactgtactcgatgcgtgatttatttcgccactcatagatttcaagcaccaactatagacttgaagattctatttcattaaattcatttagcatatcatgcttacatttgagaaattccaattgtatatgttgtgaagcaagaagcttcaaatgttaatcacattcttatgagaacagatgaaatgagacacgggaacaattttctgagacataaagaatcataatgtaatgcaaaggtatgaaaaactaataaagatgtcataacctatttacttgtcttagataaaaaaaaataggatgagcaagagtgcttttgaaatccatgcaagcaattaaagttaacttttaaaacatttatgacatatcatgtttcgaagctataaaatagagaataggagaagggaaacccaccacaaaattccttgctacataatgtcagtaccaacaggatcaaccgaataatagacagataatgttctttgagtgattggctcaaacttaatcctccatatctgtgtcatcataagttcatcttatatccaaaactagcaaaatccaaaagaaaattagaaggcattatctgttgaaatcaggtcactttgatcgtgccagctaaaggtttggagcacaataaaaagggtaaaaaaaatggcactaacatctttgtattctgaattgcttttaaataacagaatgctaaatgcataaataagttaaactgataaatctcctacttacatatttgtattctgaactgctttcaaatatctgaaaagcttcaactggatgattcaacaagtaaaaagaatgaacattacaaataataatatattagataatgaataaggaagaagaaaagcagctcacgtgatcgaaatcgaattacaactgcatgtgtgtacctcttattgctatggttaaaattttgacctgatgctcataaaggaggccttattaaaataaagtcaaaataagaatattctttcatattaatggagaaggagaagaagaacacaaaaccaaaaaatggaaagtaaaaaatgatcaaatggttaatagctcaaacaaaccttgggtatattggacaatcaaagatggaaatcccattattaagctttccaaagaagtcaatgcatcttcaactagtccaacggtgttatccttaaatgaaattagaagcataaattcaacaccatagttgaactcctgctcccgagaagagtggaaccactttagatttcacttttagatagaagaaataatttagcctcaagagccatatttaaactagttgaactcatgtacagttgaaagagaacaagatgatccataatctaatcatttcatttcatcaatgatggagaaaggatgttgttcccaacctctccttttcgaaatataggaaggatatcaccttctacttctgattcatagtccaagttgagtaacccctgatagcaaacgtagtgtatccggtgcaattatcagcacaagatttaaactactataacacaagtcaattgagatgagaacaactactataacacaagtcaattgagatgagaacaactactataacacaagtcaattgggatgagaactactaaaaacaaaagcttaaagaatagagtgttggtgtttacatgttagagcatacatggcagtaaggcaacacatgctctttgagaactcctaagtagaaagacttttcataaaacttgaccaaatcatcctttctttggaaacgcacatagacagcatgtgtataattttcgttactttgattagagatacgtcctacaggagtaatagggataaagtatgcatatcatatacaccagtatttgtaaaaatctaagatatgatctattgcaaaactatcacactagaacaacgattgtcaaactcagttttcataagttttatcaaaactgatgggccctatccatatgcatgtgtatttatttatagctgacctaatgatattgaaaggattccacccatttgatactgagttgtatagagataatccagcatattattttccttctcttctgataaattatcatttgctttaagtagacacaagtgttccacaacttttctgagtgaataaatataagagtcatattttttttttatatatatatataaaaaaaactacatagttaaagatgataaaaattaagaagccaagtcaaaatacatgcattggatataaaaacttataccaactagaacacttatttatttagtttttgcattagcataaatctggatcatatgtctaaactaacattgttgagttccgtttataataagataagaagttaaaaattaagtaataagcaatgccctcaaagtgcttgacaaaatgccacatagaaactctcaatctcaagataatcatcagatataaacacaaatcatacaaattaaaaaaaccacaaaccttttcttgatcacatttgagctcgagttctgctccaaagaagctgaaactctcgtacccaagcttctacttctgtcgaaccgcatttttggcactcctttaaacccagaaactaaaaaagacgccatgaaagaacaacacccaagtcaaagtttgttccgaagaaaaacatttaatgaaatcatgggaaattgaagaaatgttttcttagtaaagggcgaggtagcttgagttactttgtttaaatcgaacaggaggggagacgaggtatatgggtaaagagggtcagaagcaatgagcttgaatgagcattgtagacttgtagtagtggaggcagcgactgtgacggtgattgtggcggcggcaggtgacaaggctgtgacttttgttttagtggtagttcttaggtagtttcttggtcagtatttatttgtatttgataccacaaaaatcgttccaattgtgtagaatgggtggctaaggaaaaacaacattttaaaactggcgccttttattaaactaaaaacaaagataaggaaaaacaaggaaaatcgtagggtgcatagccataatttttttagtctaatgaaatgaaaagtatattttaaagtataaggtctagttatttaaaatatattgtaaaattttaaaaatttggaatgatatagaaagtaataaattttatcctgtcttttgtttttttaattttaaaatagaaatatttatatgaaaaatataaaaatgtaaaaatattactcctacacttttataagactacttttatatttttacattttatgttttaattatattaacacctcttatatatatgatattattataccaatttcacacattatttattttcgggtaaagttactgattggaccatgtgttttgcaactgttaccgattggaccatgtgttgtgttaattgacaaaacagaccatgtatttttcaaaatggtaaaaataggatcctgagcttaatatttgacaattttttttaatataaccaacttgaagcaattcctaataagaacagatatagaaaatgtaaacaattttgtcatatcacttttagattggattataattaaattttatttt

SEQ ID NO: 112247 - DNA, 7138 bp, Cannabis sativa
  modified_base (27)..(58): a, c, t, g, unknown or other
  modified_base (105)..(107): a, c, t, g, unknown or other
  modified_base (197)..(209): a, c, t, g, unknown or other
cattatatacctataatcatgaaatannnnnnnnnnnnnnnnnnnnnnnnnnnnnnnnttctgatctttattaataagtagatctgattatatgaaatgagtttnnnttagggcataaaatccaacaatacccacacaatccaggatcaaacgtgaggagggctattagagtttgtcccacattgctaatgtgtggnnnnnnnnnnnnntatataagatgaatgggctacttctcccattgccaattagttttgagatggaaccccattcatcttatcctcgaattctaacaaaatttgacacaatctatcaagagaacaaaatcggcacaaaaattggaaacaataaaaacatatgcgttggccttctcctctgcctcctggcgaatgaatctaacaatttactggatctgcttggacacatctgcgtcgtttatcatgatcggcaatggattcaaatcagagaagatcgaaaagagcaaaggggattctcgtgaattgaagccttcaatttggatgtgatcgcagagtgaggtgagattacaatccaaggcacgaagctcagtgttactctaatcgttgtcggagtgctacaagggcaaaatcgtcattttcatgtaatccatacgagcaattggtcttggaatattggccttccatgttcttcagaataaactcaaaaaatgcaccattttgatccaccacattgcttcaataattaattgcatagtactaaggaagaacgtgaagaacaaaaaggagaaagaatagagtgaaaacaagaatgtgaagaacagagctaaggaagacaatgacagaattttaatcatcgtggaaaagggaacagaatcacctacaaatattcaaggaatttctatgatttggcagtttaattccacaaacaaaataacaacattgcaagactcatcatcgcaacaatcctcgactactgagaaatcaaaagttcaaattgagtttcaagaagaaatttatggagaaagtaacaaaaggattatctaccgagagaagggaggagctgggtttcgaagggtagaaaaaaatcacattatatcaatcgatttggagaagaggaataaacaatgatattatattttttttggataaagaaaattaaaatattaattattcctactattaacccaaattttgtcaacctaacgtggcatgtccacgtaagccaaagacagagtacaggtggaacacaaccttgctagtagcaagatagggtccctatacaaggtacggtaaaatcgtcaagcaacaacagaatggagtgaagtgagctctcaaggggttgtatctacatccctggtcggacaagagaagcctataagctggctagggtgagcctataggccaaccaagatctatgcacaggctgaccagccaagacgtgacttctggaccaagggagcttcaatttgaccaaaggaacctgacctctacaaggaaactgtgtacaaagctgtcctcaacttgaaaaaggctggcctccacatccaaaggctagcctcctcttggtgaagctatagtgatttgtaggatcctggcaggagcatggccaactaggctcatcctgtaggccttggtcggccagacctcatcctgaaggccttgggcagccagacctcatcttgaaggccttgggcggccagacctcccttgtaggtctatggtcagccaagattgatcgacctggcaagactctatgtacaacccgaaacatggacaacaagctacctgcaaattgggcccttaacgacctaacaaactgatggaaaatatctacttttaaggggtagtttagtcttttttatttaatcaatttaatatgtaaatatattagggctttattataaattagggttttaggcttcctatataaaggccttaactctaacctaaaaaacctaagtcacactaagcctccaaatcactctaagtcaaaaaccctagtctatctgtctctctcttttctatacgcccaatagggtctcctctcttcatctctctcacacgcctctaaggcaatatcattctcttattagagatctaccaattgattcatgttttgtatccttatagagagctatatcaaatcccacctatagcgatctgaatagtattatctctaggtattaatacaactaaaaggggagtaggtcattacctgctatcacaagggggtcaaacctctataacaaatctgtgtgttttatactttttcattttatttgtgtaacacgtggcaagcatcagatctatacgaccccgctgtcagttaatcactttttgaattcaacacctacaatactaaataattttaaaagattcatttaaaaaaaatgataattataaaagtttataaaattatttacaaaatttaaaaattttaatttttatattaaaataattttatacgatactaaataataaaagattaattataaagtataaaattaaaaaatatatatattaaaattatttatgtaaaactatgacttttattagtgcagtttgcgagatacactagtaaaagtgacttctgtcaaggtattacacatttgtgctgggaatagtcatttttacgcacttttgcattggtaaaaatatcaaagggataatgtttacacgacttactatgctaacacaaatatgagttgtgctggtaaaaataggttttgctagcataattgtatattggtaaaactttaacttttttaccaatgcagttcacgagatacacttgtaaaagtgacttttgacagcagaataacgaattacgctggcaaaagtaacatttctggtagtaaataaaacatcacttttcatgcaaagggttaaaaaatcattagggcaaaaacactctgtacaaatactttgaagcttctctggtaatattgatttgtatactaaattttattcttttatttcttccccaatttatttctttcttaggcatttattttataatcgatttttaaaaaggttagaaaacatatataatttaggaatctatgggtatgggttgttagtaagatatctagttacatttccgaaaaaatattaagaattatctagttacattacatcacaattaggacttacgtggggctcttgttaacttcatttatgtgctgggtctagttcgttaaatattagagctatggccgaaaagacgggacatgtcatggtccttatttgaaacttatgagttggcaaaagagtctccacacacccattgtagcaattttcatctttccaactatacccccgaaaaatagatcttttttttatgactctttgttcgtacctgtgctgccattaatgatatctaagcattatattagagtcttgtaaaccatttgaagagttagttgagcaaaaatgtggcctttttgcagaaaagggccttctgggttttcatcttcctctacagcagaggaggttactcaaggcattgatgggactggtctcactgccattatcacaggttaaatatttatttatcaaggaatttatgttttttccagatagaaatgtatgggttatttatattatatcaatatcttttattagagtaatcatattttacttgaattagtcgtatggaattgtggttacttaataatagatagtgaaaataataattatgtcatgattactatattatgagttataaatgtgttgggtaaatgatttccttatattgaagttttcacttcctttggggaaatttttatccaagtgactttcaagaccttgttgttttctttttcttttccctagcttgataataatttatatgtggggtttggtttattttatttttttggaccaggagtacatagcaattgttctgtagggacttaccctgcgaatttgtgggagcaacatttgagctaccctcttaagtcacatataaatatgtatatatatgggtattctttacaagtattataataataatggagatttcatgtgtagttacattcttataattcatctattcttctgggtcattttttcttaaaaatatatatatgaataagtatatgtatggtcttttcaagattgaacataccttccataatccataccatagattgaattaattgcaatgtaacatattcagttgatttgattctgtcaagtggcatctccaaaaggaatttcagctagtttcacttactctaatatcagtgttctgtggttaatcagttagtaattctctaatattttatgagcaagagtaataaataaaagactaacaatcacacacacaaaatttgtagtagttcaccttcaaaatttgtagttgtttagtccaattaatttgcttctaaaatctaacaatttttggcatctgttttctaaaaatgcccaattattatgacattatctcatactctaatgatattatagatatactatgttgtgttgcttatactggttttatggcattgacaatttaggagcatctagtggtattggcactgaaactactcgagttcttgcattgcgcggggtacatgtgatcatggctgtgaggaacatggctgctggaagagatgtgaaagaagcaatagttaaagaaatccctactgctaaagttgatgccatggaattggatctcagctcattctcatccatcagaaaattcgcatcagatttcaaatcctcaaatcttcctctgaacatcttaatgtaacatattaatatacctttaaactttgcacaaagttttaattaagcatgcatttattcaaagatttatgtaatgttgttgactttttcttgtatggtcaagtaacaatgcaggagttatggcaacaccattcatgctttccaaagacaacattgaattacagtttgcaaccaaccacttaggtaactaaactaaatttagatacatatgttaatcaagaaataagcaaacattagagctcacaaaatttttgttatgtttcaggtcattttctgttgacaaatcttttgttggaaactatgaagaaaacatcaaagcagagtgaaaaagaaggaagaattgtaaatgtttcctcaatggctcaccgattcccatattctgaaggaattcgctttgataaaattaacgacaaattagggtacataggactattttctaattactttcaacttagtattacatgtctctttgatttaggtcaactgtttcttatgtgaatatgtacattttgtacaggtacagtagtattgctgcctatgggcaatccaagctagctaatgttttgcacgccaatgagctttcaagacgtttaaaagtacatgaaattttttataaattttattgtttactttgttcaaagtgttgttcacacttttttttttccttttgaaagggtgcttttaacatttctatttatttcgttttcaggaagaaaatgtgaacattacagcaaattcacttcacccgggtgcaattcttaccaatctttttcgatttagtggcatcatcgatggtatttattgtataattttccaaaaaaagaaaagaggaatacttagtttactttcatatcttttaaggcaggttttacttatggaatttatatttgagttgtgttattcacgacttcctattacaatctattagtctactttctaatgtgaaaatatattctgaaatattttattaatttttttttatggctgtatttattatagttacaacatcatttctgtaaattttttaaaaaatttaaataatttacgtgccaaaaatatatttgaagcttttctaaaactcatagtagactagaatattaaaaattatgtttttggtactgtaaattatttggaaattttcaaaaaattacatagatgatactgtaagtacaatgaatataattaaaaaaaaaattgaaaaaaaatattttgccatctagtttcgggcgtgaagattgactaaaaagttataatatgagattgtaattaacacatctctttatatttttaatacctaatattgcaattcattctttgattcgtgaaggtcttgctaaatcagtgggtagacttgttctgaaaaatgtccaacaggtaaaactatactttttatttttctaatgaacgtaaaagtatactttcttttatgagaagaaaacttcttcctttgtaatgttgtcctattactttagggggcagcaactacgtgttacgtggcattgaacccacaagtgaagggagtaacaggtgaatattttgaagacagtaatatttccaaggcaagcaccatgggcagagacaacgacttggcaaaaaaactctgggatttcagcctcaatttgacaaattgatcatttttatctctctataaacatcataaaaataataataaaaaaagttacaagacctacggtatctacatgactacgattgtaagcagtttcttctatctataaataaggaaaaaaatcatttatctcttctctatctctttatcaattactaggataaatatatttaaactaaagagcttgtaataatagagaaactgatttggaagtggtggttttgagaataagatgaatttaccaagtactgcaatcaacaatacaaccataaagttaatttaaaaatcttcaacttacctaacatcaaaacacaagaaaatttatgtagttcaaaaaacagggtccaatccaaaacacaatgtaacaccctattaatttaggagtgttattgtaattttataataattgtgcaatccattgctaatcaacgagtttgttgaaaaacataattaattaaaattttatttaattaaccttcaaatgaaaataaataatcgttgcataaattggaatcccgtatttaaaatatttacaatcatattacaaaatattagtaacaaaagttgtcacctagcgactattcaaaatacagtctgctattctaaagatcgtatgctccaggtctaaccgccccgacatgtacaaccttcatttgctcgcatttactgctgctcagccttacctttgtccttacctacacatataaacagtaactgttagggctggtcatccgatctaatccgcacttttttagtcaaacaacatccaatccgcactaagtgc

SEQ ID NO: 112248 - DNA, 4561 bp, Cannabis sativa
tacaaaatagagttgtttttcatcattattcttttggatttgtgttattttaaagtcttttagattcattttcttatgcttagtttcttttattcattttgtgtagttttagtattagtttgttatttttgtgtttttggtaggaaaacgttacaagaaaattaaaggtgaaactttaagcctaaatttgatcatattataatcaaattttagtaaaaattagaacataaaagttttagatttctttctcatctttcaagagcatcttgcattagcgcatttagaatttttttgtgaatgttatgtgcattttgttgagagaggtcgaagtagaaaaatacatagataaaccaatctgcgagcaccggtcttttacatgcaaatgcaagtttgtgtggactagaccttttatttacaaaattcactattcaagtccgtcaacacaactgttcatcacgttgaccgacctgaatagtgccagattaaatagattcgtcgtttttaaaatgacacaaataagtaatggtttgcgtcggttctctctccctcgctaattacaacaccgacgataaaaggcagaaattaaaagaaaaattatatagaatttgcgtcagttttatagccttgcaaacctattttgtgactttttaaaactgacatttttgaattttgcatcagttttaaagcctcacaaacccattctacaaaccttaaaacaaaaccctacacttaaatatatcttattctctttctctttcttctattacaactacatctctctttcttcttcttcttcattctttttttttttttgaaagaaataatctttctctttttccttctctctttctcagttctctttcccaccacagcccccaacaaccacccaatcgcgatggacgcccagccccgatgacccacccctgtgcgttctgaccgttagcctccttgcctccctttgccactgtcgaactcacgctgcaccaaaggtatagttctatctctctctagatagatctctcttttttagatctggaaattttttatttcatttgcaggtttcatcgctggtagttgagagccccagcgatgttcgagcattttttcaaatctgtttttttttttttgtaaaaactgtgttttggtttcgtaatcgatatttgggttggagcatattttggatctaattttggttaattaatcgatatttggttcaaacagtatctcaaatggttgtatttttttatttactatttttaagtttctgtcggtacaaaaccgatggaaaaaagtataaaatatgatttttatacttttctagtcagttataaagcaacacgatattttgatatcgattgtttaatactgacccagaaaaataccattttgcgtctgctgtatatacgtcggttatgggaaccgataggattagcataaatgtcagttaaaaaccgacgaaaattggccttttagtaattggagcaacacaactctagtctagtttttttttttctttctttcctcttttaatttctaattgaatatgtcttttagagatattataatgattatgttactttttatttttaactaaattctatttagcatttttaatttaatttctttaaactttattataaattaatacaaattttctatttcatcttcatataagatctattgagtttgtgatgattgtgtatgtgaatgactgcacaccttcttagattctctttatgaattcaaaaattgaatatacatagattttaatttagaatgagagtatcaaattagtcaatgtgatttagggctcagttcattgcttcttataatttaaatttctcatagaaatattgaaagaaaattattaggtcaagttttatatttcttaacccaaatgttaaacacttttcatgtttttcatctaactaagaaaattatcattataatttcattaatgaatactaaagtggatactagagaagattagaattcctaatttctctcatttatatatttgaaccaagtttattgttattctttttcttggtttaattttctatttattattttcaacaattctaatttcagttgccaaataaaaaataaaataaactattgatactttataatcagtcatcgtagaaataatatcggtcctactgtattaaactacaaaagcgattatgtatacttgcatagcttgtattgaaaaatatgaataaaaaaatctataataatataaataaaaaatattaattttttggggacaaaatctaaaatattgaaaaatatgtacataaaaatataattaacaaaaagttaaatgaccccgcatgccctcttaacttcacccttccatatatcttataagattttaatattgagttttaattattttattttaataataattataaaaagacccataccggtactatctattgatagcgctataggcactaataaattataatgtctttggacttcttcaatcactgattatttggtggttccaaagtcaacatgatgtgacagaagaaccttgtcaattagttaaatacagtcaatttaaaaggccatgcatgcaatgtaattcatgagatcattaattatttacttgaaaagttaaacttattagttaccgctacctgctctcaatttaactgattctctcattcaagaagctacggattgcttattagttttggaattagtaattcgctgaaagcattggtttgggataatttaaagtaattctgaaacagaacacgttaaaaggaattacatttatttggagtattagtaactatgtgcttcaatataaaattctagttataatttttcttatattttaagactgtaatattacaatgtagttaactgaacttttatcagtaatataactagtataattgatccctctttcatgccaaacaacttaacatatgtaatgatcaagagctctattacttttaaatttaatataattgcgcattttattaaaaaaaatataagggcgttgatgaaaaagttatataatattgcagtgaaatgtctccgcgggtagcttacctgctatagttatagttatccagatttaattgattgtatacgcccattaattctgacttaagtatagcccgcttgcttttctcaaacaaataataaaaaaaaaaaacgagcacttgatgactaaactattacaaattatacacatttgatcacgaattgacttaaagaaattaggaaacgaaaccgcgtgcgagtagaaaacttttaaattatatttatttaaaaaattatatatattcgacaattcttagtttaactttttattttgttttttgtaaaatttaacgacacttataaatctcccgttaactcaaaaaaaaaaataaataaataaataaagaaaaatatctataaaaaataaaacttgacgatcgtgatgaaactaattccctttaaattacgattccattcattagatctatatttccattcggagaccttggacatatctcgtacccatcatagcagagaatctagccatggcggcaatgaagctggttttccagtaccagaaactccgtagagtaagtagcttcgtttccaaacgtgacctaatttgtggtaatattgtttgatttttgtcttcaattctgcatctacaacgatggtttcaaaattagccggcgggtacgtgaaaggaattgatctccacagtttgttttctcgcgacagattcaggtgaagctttatcttcttcttcctatgtccaatttcatctgaaacttatagaatgtgcttgaaatactgatgaaatactcttttcttgtcgtttttcttgattttgagaacgttattccattagtgttagatttctgattggtctaacaaactctagccccgaggaaagtatcacaaatcgattgggtggcgtcgaggtaaaagaagatgtcgtttgatttggaacctgagaagaggttggtagagttagaatcttcaacagaaggaagagaatccaggtacattgatatcttcaggtattccttttaattatatcaatcttgtggcttgtaattaattattgagcaaacagtctgatccttccctcagttgtgtaaaattataatttttcaatactctcaacacttaatttttctattttgcctagttgatgtgatttttttatgcagtatctgaagaaaagggtagccaaaatgataaagatgaaaagaagaagaatgagcgagaagtcttaaatagtcggttatttggttgttgttagtttaatcttgtcagttagtttcattccataaaaattttctgttatgatgtgttatgttacaacaactcattccctcttgtatatatactattactttcattaataaaatcacttttacgtcttttactaatatggtatcagatgcttaagaatatatttttctcttttcatcttcttcatcttcttcatcgtctacaccatattctgcctgttgactgaggttttcggcaaccaataaaatattataagattcgagaactgtaagaa

SEQ ID NO: 112249 - DNA, 4114 bp, Cannabis sativa
  modified_base (2935)..(2941): a, c, t, g, unknown or other
  modified_base (3659)..(3659): a, c, t, g, unknown or other
  modified_base (4067)..(4085): a, c, t, g, unknown or other
aaatatcaatacaattctcgggatattacacgaccactttctccaataccaactacacagaggaggagaaatgtagtcccaccaatcttcgtctttaatgtatatcctattaatctatttggcccaaagatcatccttttttgttcggatggcccacacataattaccaatggctgctttattttaaatgcgaatattgtggaagccaagaccgcctaccttcttaggcaaaaaaaccttttcctaagctatcatccccagattagcaccatatgcattcccatgccatagaaaagctcaaaaaatggcattgatttccttcaaaattcttttcgaaatcaaaaatatttgactacaatatgtatggatagaggttagaaccgagttgattaatgtgattcttcttgcaaaaaataggtttcttgtactccatctttgaattcgcccaaccattttgtcaatgacaacatcacaatcttgagctgagattttttagcacatattagaattcccaaataccgaaacgataacaagctttgttaaaatcttgaagcgcccaataacatttcaatctcttgtttctccattccaccacaataaatggatgattttacttcacttgggaataaccccgaggttttggagaataatttcaaccttgtaacaggagataggttgatttgaagttaccattacagaataataatacatcttcagcaatgctaaggtgattcagcttaagctcattacacctttcacaaaattgaaatccatccatatctccaattcttctcattatgcaagacaaatactccattcttaagacgaacaataaaggtgacacgagatcactttgacacaagcctcgtttagcctcaaagaaactgtgcatctctccattaaacatgggggagaattttggagtctaaacacaattcataatgagctttgtaaactcattaggaaacccaaaagcatccagattctcttcgataaaatcccactcagtcgtgtcataagctttcttgagatcaagcttaatcatgcaactcagtttgcaaattttcctttcatagtatcacactagatctaggaaaatcatgatattatatgcactataaaatttccatgaacaaaacctccttgtttctctcatactaagtcagtcaatactttttttagtctggaccaaatcattttcgtagccaccttatatagaacattataacaagcaatcaatcaaaaatcgcctatatatttaggacacttactcataagaataattggtaaatttttgatgtgttttctctgaaaaataatttcttattacttatattttgttcgtttgttggtctcaatttttattttagcacttatttcaaatattgagagatatcttaattatttgctcgtttgtttctatttttgtttattttggtgtgtcttccttaaaataaaatcaacaaattaaaaaaggaaagtattttatattttgagttctttagccctttaagataaataaaaagagggagtagtaagttttaatttttgatttgtgtgtttagctctagacgtcttttccaggaagagttgagtttggcttatatgttaaatttagcattgtatttggtgctactgatgtacttttttgggagagtttatttctgtatttttgctaactttattttgtaggtatttgaaaattaaaaaaaaaattaattatcttatgtgccaaatgaagagattattaggtatgtttttggcaattagttgtcaaaatattatttaatttattgtgaatttaattgattttattgtgtttattttttgcctctagctgctcttttcttctaaggaaagttttattctcagctcgttttatttgtataggaatcttttcttacaagagaaggcattatcttatggaaagttgcctatttttaggaaacttgacttttcatttttgtaattgttgaatttgatttttccatgattatagcagatcaaataaactttatttgacaattatcgaagaccaattcatgatcttggtcaatttttgaaagttttctttttggtcctgatttgttgctgcataatctgaatttgatgctgcaaattagggattttttagaaaagttttagacatcattgagaacgtgtttatggctatctctagggtttctaggttctataaataggacctagagagtagccaaacatttatgatctcttctagtcttatattttcatatctatctttgtgagaagtgcgttttatttgtaaaaacttagagtgttcaactaggttttagttttcttgttttgatgtcgtattatcaataaaataggttgaagagaaactttgaacaagcatgggttttcgggagaagactttttttaatatcccgaaaaactaattatgaataattaggatttattatatataatgggttaattaagtagtaataagtaggattagatcctgctaacttaatttagcataaattataaattttactataagtggataaaaaagtgtaatttattaattacgaaaatttaattgaaatatgtagatataatgtcagttatttgtgaaataaatatattttcaagttcgacgaccctgaagatctaataagggataaataaccgtaatttgttaattacggggatttatttaaaatatgaggatataatatgagttatttgtgaaataaaaatattttcaggctcggcgaacctggaaacccgattggaggccaaaaatgtcacaatgattttagtaaaaaatattgttgggattattgagataagttgattttaaaaatatcggggtattttggggtacttggagttgaccaaataccttagaaataaagatttcttagtggctaaaaaataatgaaataactattaataataaagtttnnnnnnntattatattattattatatataaacgaatcttatcaatttatatatatgttatatgttttaaaaacataacagaagaatgaacaaatgaaaccctctgtcggtgtaacgaaactctcacttctattatctaattttcttcgaatttcaatccgaaacctagtaattcaagcaccggtagtagcgggatagtaaatcactaaagagggagagcttaaggtaaggattgattttgttttaagttaaaaatgattagttttatataatgactttgtgatttagagtagttatggagattttgacttcatagaattattctttgaaagttatgggactagttttgatgtttacttgttaaatttgaggtgattttgagttagatatcacgtttggagctttttaaagcttagtcaaaatgttaatggtagtttccgtttaagggctcaattttaatttctattacgtaaggattgtagtatttatgatatatatatatatgtctcctgtaaagttacaaataatttggataagtttcgggggtgtttcggtgagtgtgaaatttgggatttttgtgtttcaccatttttagaaattcctacgagattagaaattgtatttttaccataacttttcactcaagtgttcgttttggacgttctatctgtttcgaagcttgcaacgagctctacaatatagtgtatattttagagccaaaatatnagttttattttagtgtatttatattgtggggtttggtagaaaaccctagattgtcttacacgagtgttaagcagtattttgggataaacacttattggtaaattgttgttgtgacataggaccgagatcatcagggatatttttccacttggattggccgacatgtatgaatcttgatcaaagataagaaaagtatactgcactgcatagcatgttatatcgcaatacaataaatattgttgtgaaatgattgatattgaaaaaacatggctatattgttatataatgaaaagattgattgattaagaaataataatgcaatgataccatgaatgtgatatacgggctcacctaattaggtgatgcaatatacatgacggcgtaccttattgttgggttttatgcccnnnnnnnnnnnnnnnnnnntataatcaaatttacttattaatatagat

SEQ ID NO: 112250 - DNA, 3375 bp, Cannabis sativa
aaatacggtctttttatattgtactcttgttgatttgttgttatttgtatgttaatttttgttgttattttaatattgtttgaatattattttcttattacttctatgtaattttcttgttattttcgtattgtttctatagaaaaccgtaaaattgtaaaaaaaaatatttaaacatgaaactgtaaattttttacaaaaaaaatagtagtttatgcaattattgctagtaaaatctactgcataagaaaaaaaattcaacacatgaacaaaaagtgttttataatttctcaagaaaaaaaaatattagggcaggggcactaatgtctcccgaatgttgataaattttgacttatttgtactacatgttcctaaattatatatattttgtcaagttggtccctaaattttttttttttttttcacaaattggtctccaaactatatacattttggtaagtttatccctaaactttatttttttggtaatttagttcccaaacttttattttattagcaatattaagtctctactctttgatattgatatttttattatttttttatttatttaacttctttcaatttattctttgttaaatccaaatagtttaattttttaattttaatactttgacaaaatgattatattaatatattttatttttttaagtattcatataatatttaattcatataaagctcgcgagtacgaaaaccccaacccaaaaaaccataaccccaacctgtttcttttttttctctcttttttcttcgtcttcttcaacgaagcccctgtataaagccactcaacgatagaccatgatctctccaattcaaacccacatttccaaaagccacaacataattgttcgacttctcctgctgaagcatcttccacatcgcctcaacgtaatctccagtaaaacttcaatccctcaaagcctgaagattccccaagaacaacttgttctgtaaatggatcttgatcttctgtaattaatgattgctgaataaacgaatccaaaaaaaaaaagagaaaagaaagagggcagatcgttaactcaggggtgtgctttcgtccccacagttccctctgtaactctgcctatgcttcactgatctcttccacagtgcaacctcttagccgatggaaagcctcctccatagcagcttaagaaattgcaacttaaggaaaacctcatccatctccattgagtgcctgcaaactaaatctctgttgatagaatctcactgttccaaatctcgacacctcccatctgctacttcttcggccacggttactgcaagttgatgagatctgaccccacagtgggattcaacctctccaaaactcttgaaaccttcaatgatatcatccagttgagaagttaatgaaaccctggagaaaggtcgatgaacatatcatgggtggagggtggtggtggtggtagatttttggtaactagttgaacagttagggatgggcattatgcgagaagaaaaataagaagaagaagaagaaagaaaacaagaaaataaaagaaagaatttttatttttatttttaaataatatttatgatgtggaccaataaacttttaacacatgtcaaatttaaaaagaacaaatggaactgttaattgagtacctacgtacttacaaaaatagtgactttggggactattattgccaatttttgaagttggggattaatctgcaacaactctaagtttttaaggatttttgccgcaattatctctttatttttattgcaagcattacataattaaatacgagaatttaaagagaatgctaaatatatgtatatgtaatttttcactcgatagttacgaactcataagccaaaccacaacaattatttggtgaaaccttttacactattcaaagattcaaatataacttgtaatttttttttttttttgaatgagaagagagaacttcattaaaatagaatagccaaatcgaccattatatctttgttaatagcagtatggacattgctatcaacaaaagtacaatttgaccaatagcaagcatcgcaagcaagataataggcggtcttgttagcagatcatttaacctaacaaacttgaacatgaaccatagatttaattaaattaagataatgagaaataatagagccaaaaacagattgcatttcaacattgctttcaaatgcttgaaccaccacaagtgaatttgtttcaacaattgtaatgatcgctaaattttaatacgatggattattaaataattaggatttaattatgaaattaagttattaaccatgatttatgcatttatggagatttatttgaattcaaaatgtgctaattatgttatgtgtgaaatttcttattttccatatttgtgatcggtagtagtgaaacgcaacgttgggcaattaaagagtcacgtttttttatagtttagaattgtttgagtagcaggcaatatggttagacattggaagtgtcgggaaatagtcggagtttagaaatgaccaaattactcgtgggtgtcattaaacttttggtttgtgttcaggggcaaaatggtcattttgctagggaagtctttttgtcttttataggctttaagaatctgattttctgaggttatatttaataaataagaaattagtatttactttaaaaaaaaaaaaagttagaaaaacctagaatgcaactctctctctctacaactctctttttctctcttgaatcttcaagaaaccagctggggattgtgaattttcagctcattttaaagagttctagctgaattctaaggtttcaatccaaggtataatcttctagcctcttcctttttgttttccttaagcttaagttaggttttaaggtaagaatttgtgagttaggattctgcagtgataattggtgtttgattttgtgttctagagttatgttgagaatatttgtgttgtttagagctaagtttgttgattgttatggtatttaagcaaaatttgagtttaaggactcaaactttgtcccttaatggtgtctttaatttttgagctttttattgaggtttattgtttgaattgtgttatttgagatataggcaggtattctgaaagtttttggagagtttggggttgaattgaagtgttgtgagtgtttttggtggttcttgcactgaaccgatcgaccagttcagggggacctgtaggaaccgaaatttcggttggtccccaggaaaccccaccgaaccggtcttctggttggggaaccggtttgccgattgggacaattttgtgaaccctagtattttctgtttttgcgatatttagggtattgccgtgctatgttgaaattattttaccagg

SEQ ID NO: 112251 - DNA, 2653 bp, Cannabis sativa
ttaaaaagaaaagaagaaaaacagaaaagctttcaaaattaataaatcactaccgcagatcttgatgggggcttcgagctcaagaagattgggttgtcggaggaagatttccttggaagccgtacatagttggcggatctcgctctccatgagctggacctgcttgaccggcctggcgtgccgagactccaataacctgttgataatgtcatctagtatggcaggggccattgtacccggtcctggttgtgccattcagattattttttgcagctatagatctctaaattcttccaacaaagttccaaaaatttctacaaacacaacccaaaagagaaaactttaattttaaaatatattcaatatatatatttatataaagagagaaaagcccaaaattttgaaaatcctaaagaacccaactttgctgagttgggtgctcttctatttcctcttgttttgggtttgatttcggctcagtgtttctctattagcttttgctcccccgtcttgtcttctgtttccttttaatgaaaaaaattttttattttttttttcttcataatttcggttcttttgtttgtttctttatttatttttgtgggtgggtgagtggctgcttaaggtagggatgaatgtggctgattatttaaaattttacattacaaatgaaaaacacaatttttttcttttagaaaaaacaaatacaaatattaaattaaaagttaatacttagtaggtgtctttttttttttcctaaaaacagaaataattactagttttttttaatgctaaataattactagttggaatagattattcaatgtaaatgggacttgggagaaatcgaatcgtgaggactcacgagggggatgagaatttggactgcaatttctatgcgactctgctatactatcattggccatatcatattggtccttttttttttctttcagttttggattttaaaaaagcaaaaattttaggagagaaatttgtagaaaacaaataagaaaaatattttttattagagaattttaacgaatatcataactgaaaaaaaaaaaatttaaagaatatctgatcaaaataataaaaagaaaattataaaggaaaactcgaaaagagtcatagccattagctaccatcttgagggccactcattactaacacttaccatacaattcattatattttactttctaaaccacaattacattctaacatttaatcaaataaaatttaataattattaatatgtattatatgtacataaaacaaagactatatgaagaaatgcatgtcagcatgtcttttacaaattataattattgaaactcaatttgatcttctattctattgagtatatgttttaatggttgtcttttttctgccaaataattttgtaaaagcatgtgttgtagacacctatgtctatgtctatcattggtttacaagagagtgagattcatcaaatgatcttgtgtagatcacaactctccatcacttttttttacacttgatcatttgttggagtttctaattttgcaagttgggtgtgtcattttaaatttttataccaactaataatataataatagctagataggggtataatatgttcttttgactaggtctcatgactcactcaactaagaaaaaataacatccaaaatgtataaacaaagatacaaatttgaatcctagtgttatcctccagtaggtaaagacaaatccttagagtattatctaattgtcttggcttataagcaaaaaaacataccaaggacgatgggatcaatctacagaaagagaaagagacatgtaataaataacactaaactagtctctatgtagtatgatcatcagattgtgtataatactataaatatctagaacttcattgataaagagaataatataatttagagtcacactatcaaataaattgcgatttaaattagaaggcatgttgttgattaaagtatgtgaaatgaaacctatttgctcactatatatagagaaaagagttagttgaaatctgtgtggcttttaaatttgccaagtcattagatgacaatgacatcaaatattttgacttggtctttccgacaaacctgagaagtatgtggctatgttcttaccaatataataaaactttgttgcaatatatgaagttatatctcaatttataacagcaattatgaacaaaatgaaatgcatataaataacatcaatgtatcttacctgtttggatttgttatattattttaaataatttaatatatatagattaaaaatgtgtactatcattttataatatttgagaagtttgttgttatgagtaacctccacaaatttttttttttttgaaaaagcttcaacaagaaaagaaacaaaacacacactgcatccagaagagaaaggagaacaaatcaaggtctccaagaagagtcctcctcgcacttgagagcttccttcgcacacttatgggcttcagcattttcatttctgggggtgtgcttgagggaaactgtaaggagattgttgatgagtaaaaaaatgagaaatagaaaagattgtgtaaataaataaaataatgacagtagaaggggcaaattagtaaatagatgtatagatgaataaaaatata

SEQ ID NO: 112252 - DNA, 2327 bp, Cannabis sativa
  modified_base (26)..(26): a, c, t, g, unknown or other
tgtcctttgtattatttgtcattganttgtaatcttgttggtttgatatttctattggagcacaacaattttccaacagaaactcctccattttggaaggtttatcaattttgggtatcaaggcaataatagtatcattaagattttccatgggggcattgttgttaaggatgttcaagctcacatttataatgtctatcttcgtcgtaggccaatacttttggaaaaacaccgcgggaagcccgtctctaccctaggccttaagggggttcaaagaaaacacgattttttcaatatcagattctgtaaactcggtaagtagccctctgttagttttcttagagattttacctttaattttccccactacttcggtgatcatcaaatccatcaagttgctagattgaaaaatattttggaaattcgctaatctctgcttgtttccttttctagattcattgtccattcttgatctctattttttttttccttctagcaatagctttgtggtggaagtattttgaattcttatccccgcatttcatccagatggcacaacttctttggcgctagtactgtttgtgtttctccataacaacattcaactgtttttctgcttctttaaggattcccacaattatgggcagtcatattctttgacaaatcatccactcttttcttgctttccctattctgagaatagagctcttttctcttgttgttattccaattcttaagtctatttccacacttttgggttttatttttgaaatcccaatcaatgttgcatgggtaattagaattccaaccttattcaataatcgtgctacaatcctcctcatcgcaccaagcatcttcaaagtgaaaacgagatctccacatcttcctaattttattagagttactcatatcttcagtgtctagtatcatagccttgtggtccgaacaccaccactacaaaaaatagaaggcatttaggttaggaaagaggttaacccaatcaggattggcacagtacctgtctagtttttccatcataaagttgttcttcttcccattacactagccaagtgtatgtatcaatgtcagcagtaagatccccaagatcacagtcttccaaggctttcttgaactcatccataactttaaaactcttttcttgacctccttgtttctctttggccattaaaatttcattgaattctccctcaattagctaaggccctaacacctcttcacttagacgattcaataatttccaataatggtgtctttgactactcacatggtcactttaaattccaaagaaactccaaattaaaggattgtcatcatagattaaagtatgaaaatgaaacttagagtgggataaaatagttaccttcaagctcttgtcccaaagaaggagcagacccccacttaagccaattctatcaaccttgaaatacttctcaaaagtaagatttctcgccaccgaatctgcttgggaattagagagcttagacttagagataaagttaagtgttggtttcagctctgccactctggagtggagcgctttgaacgtcttagagttgccaagaccctagactttccaccacatgattaacatggcgttcgacgaccttgaaaattaaagctcgtcgctttttcctcgttttcaaagatagctaaatcctcatttttagaaatatctatctcaacaccccattcttcaccgaggcaggaacagtaagattaccttgggaggacgattccatatattgctttgaaataagtcttaacgattcttttaatgaaactttcttccttccatttctattcctttattttccttttgtcttttcgttccaacacagctggaaaacttccccttcgtccatcgtgaaacaactcaaaaatcccttttccatttccacatttgctcttttttttttccaaaggaaccgcatcaagatccatctcacccacaccattgtcctctgtagcttgtcttttttttgttgggatgcctcctcctcctcctccttcttcgttcctactttactccctctctgagagagaattttaatcttcccaatcttttccccccaaattaggtcatgacacaacactatttttcttaaaagaaatgacactttgtgttgtcgttttttcattttcctctccaaaagtgacatgtcggtcccactttgccacctcacccttatttaagtgccaagtgctacaaacttcttgctatgggtgagcatcagtcggtttggtcggtttttttctatataaaaatccaaaattcagttttcggtttggattggtgcaatccgaaa

SEQ ID NO: 112253 - DNA, 5270 bp, Cannabis sativa
  modified_base (33)..(35): a, c, t, g, unknown or other
  modified_base (97)..(114): a, c, t, g, unknown or other
  modified_base (4757)..(4759): a, c, t, g, unknown or other
  modified_base (4813)..(4815): a, c, t, g, unknown or other
  modified_base (5235)..(5242): a, c, t, g, unknown or other
atacattatatgcatataatcatgaaataaatnnngtgaaccatgcaacataaaaattttatttctgatctttattaataagcaaatctgattatannnnnnnnnnnnnnnnnnagggcacaaaacccaacagctcatactactgacccaaaactatgaaatttgagctaattttgttaggtttgctgggtgtaggattcaataaaaacttggagttcattttctacagaaaaatagcagaatgtttttgaaaaaccggtcaacaatttttttgggcaagaacattcataaaacggtctaccgttttgggtattgttcgggacccacacttttcaagtttctcgatatttagagtattttcatgctatctatttatagggaaacttttggttatgaaaagatctaaaatggtataggtcatgtggttagggctaggatcgtcaagcttttctccatctgggttgactggcatgcattaaaatgaaattaaaagtaacataagtacttcagtaatacatagaattttttgtttggatacgattaatatcatttgtgaatctatcgttatccaaactaagatcggtgattaccgttatatgatgaaaaatattgttttaatagaaaatgatgaaaaaattatcttattatgcaatgattaaaaaaaggttgtcttattaggcaatgattaaaaatcgtgattataaaccgaaactgttgttagttttctcatatcaaggatactggtggccaggtattagggttgtcttatttgataatgatgataatatttggatacaggaaataagtattaggattgtcttattggaaaatgatgatgtatggatatcaatgataggtattagggttgtcttattacacaatgaggatgatgttttgataccgatgttaggtatcagggttgtcttattagacaacaacagagatatttggatagtggtgataggtatcaaagctgtcttattagacaacaatagagatattggatgcccgataaggcatcaaggtcgccttgttagataataatgaaaattggtttctttaagaagtattgggtatggattgtactatttaacatgtaattgtatatttctaaatatggttctattgatgtttatttatgactagccatttacattaatttttatttaattatatgggcaatgtgtgagcattttaatcttcttttgagttttattgttgatacttgagtgatgacttgtaagttgtattactacttttctcactgagtctttgtgacgcatgtgtgctatgtggtgtaggtattaagtagaaacatttggacaattaggagttagtgatcatctcaagctaatgttcatataatcttaaccgacaagtggtgttgtgttgtatatttttaattgttctaaacttaattatatattttgtaacattactataatgacatgtcatgtaatattttaataaggggatttcccaatagtaaaatttattatgccatgattttatatttcggattagtttgcaagaatttaattactcatttttatctaaacttttattttcataaaatagtttataaaacacgcatgttgcgtccctaggggttagagtattacatgtctacactcacagataagagaatggaaaacattcgtgtcagtggcctttttcaaaatgcaaccatcttctgtgtaggtactagacagttggccaatgatcatgttctcgacttttatgcttagtcacaaccacatgccgagcagggggccatactttcctttcatccttacattaggagggttgcttattattacaacaaatcacttacatagattggtctgaaggtgtttaagtaattatctgtgttgtacatcttgtatgcgcaacaaggctggttggagccttcaagtcacgagatcaattttttctatgatctgaagtccaaacattgtagtgtacttgaaggactattttatcactagggatgtattagccaaacagatctccttctgtcatgttggaccattcatccgtcctacctagacactgaggcttagaaagagggttcgccaaatactccaaatcctagcaaaggagaagaacatatcaagcgtagctactgaggacaactttcgtaagtactttttggggtgatttgtgttggacacatcccgaaataagcagtgatgtctctaaagtaagggtggagcggcaacactgccccctgctgtatatgacgctctaaccatgccatccaaccaagggcaagtcgatgcaccctctgatctctagtgggtatctcacaatgaatgccctcaccagactactggctagtatctcatcaaaagtatcaatagagaggacagatatgggagagacccacctgtctccctgtgatctagcatccaaaatctaaggctctaaagattggatcaagacatggtctagacccatcactgaaggctaaccaagcctattcaacggctccccgttagcatcttatccaccaagagggctattagggaggacagaacaagttttgtaagaacttctcgtaacagatgtagcctcctccacttcagatttagagtcagaactctcgaccccctggtcgacctcaggtgtctctgcctagccaacttcaataccaagcataggccagccaatccatagggtactacccttggccaatcagaccccatggtgaccactcttggctagccaggtcttgaatacatgatccaagcatgtgctttttcaagaactcaaacacattcttcatgttcttcctgacttaaagagccaagaatcacaaagaaggtcagaattagatctttttcatctagaaactacacatcacaaatcctaagacttccatgcagatcaaaataccaaaaggattataatctaacgtgggaatctaaagacattcaaagaaaagaacaaggctcatgcattcatgacaaaatcaactaaatcaagtgaatagcgagaatacagagcttacccacaacaagaaactgttgataaagaagatgggaagcttagattgtcaaacaacacaaaaatccaaggagaataaagctttgtgggtttcgcttctacagagaaggaggagcttcttcaagtttctatttctagtgagagaatgaaaagtgtaaagtgacgagagtttccccccaaaagacataaatactttctgtgggactactccttcacttgccacacagtactcaaccaaaaaaacatgtagaagtgcaaagcagtcaagttactgcaacaaatgagatcagacagtcaagaacaggtatttggaagactaaattgtagcaacatctatttagtaaagtctacatcagttctaacttagctagtaagtctttatccgcgtagggacttagggggtaaatgttatcccaattttttcccacctgatgtggcatgcttacgtggaaaatattagtgtcatgtggcagtacagctcaccaacaaggagatcaagtcagcatcccgaccaataggggtcctgcactcaaacgggatgatgagtgacaaaccaaccacctcaagggggctggcaagccagcttctggatagcatcaggacgactagcctgcttctacaggtgcctagccagccaggattagacctggtaggattttggtgcactgccttacacgtggactgtaagctaaactgcgaattaggccttaacaacctaataaagtagatggaaaatacttatatttaagggatattttagtctttttgtattttaccaatttaacatgtaaatatctacttattttatttgttaattaggatttaaactctcctatataaagagccttaactcaaccctgaaaaccttaagtaattaagtctcatttaagttgtcaagctcaaagtctgataacaatctctctctctatcacacgcctactataacttctctcaacccttaaaattttcctttttttaattcctactttgtaaccttaagagagctatatcagatcccacctatagtgatgtgaatagtgttatctctctgtatcaatacaactaaaagaggagtaggtcattacctgataactaagggggcaaaacctctataaaaatcattgcgttctttactttctagttctaattgtgtaacacgtgacaaacatcagattaatacgacctcgctgtcggttggaaaatttccgaggtcaacatatataattttgttaatatggatatacaattttgttaataatattatatgactttatttgattttattattgtaggcatatatgttttattgtatgatatatagtttttattgtgtacagtatagcatttatttaagattgtatttagtttctatttgactgtatataatgattatatataaacatttttgtatgtatgcatattttaataatggtagatataattctgttagtatgatgtatatattttgagcatgaatttaatattgttataatttctttgtgcggtatataattttattacattggtatattaatttttagtaatacgatatatcaaatactgttgtatatatttaatgatctaatatatttatttgtttttattacaatatatttatatgcaatatatttttacattggtatatttgtttttatgtatttttacggaattctacataaaaactcctattgcaactagctctgtaatctaaattgctaccaaaaattgtatagaaacccctattgcannnagcgttgcaaccactttagaaactcaaacagtaaatttgaaaaaaaaaattaannnaaaataatatatggggtaattccctaaaattatatgacttaatttaattattatgttttttaaaagaaaataatatatagtaaatgtatttttataatttttattagttaattattaaatttaactattttgctaattttttaaaaacaaattaacacttactaaattagtttctagatttgggatattttatatctcagtcaataaaaaattgaaaattataccataaagagattagagaaattaaagttaaataattaattaattatataacacttatatgaatttacaattaattatttaatattttattcctacaaaccatgattaccaaatcaagaatttccaataccaaataaagagatttggtgaacctcacattccgtatcaataataataaaaagaatatatatatatatnnnnnnnnatatatgggtgcactcttaataggtatt

SEQ ID NO: 112254 - DNA, 2559 bp, Cannabis sativa
ccccaaccacgtaaaaaatcttcatctcactttcttacagctcttcattacaatcatattttaatagttgccgaaaatctcggtcaacagctgtcatagagtccgtttcaatctgcacctttgtcatttccttgtcgcgcgccatctgcagagccaaagtaattcccaacaactccccctccagaacccctgaagctataccattgtccaccgctatccacgattctccaaggttctcatgattcaagttaaccatcgcaaccccggcttcccccttaaccatagaagcatcaactcgacaataccagaaaccaggcctatttggagctttaaaccttgttaaatctggtggagtagccatttcaaaatgtccattgtccatttcacacctgctaaaagccgctattcttgccagtatattcctccaaacctgaataacatcccagggagtacctttaaaaatgtatgcatttctcgcataccagatggcttcacacatgcacgctataaacatcgtcaactcttcatcttcaacccttgtccaccacaatccaaaatccgataagctctgccaatcgagattatccaccctgattccccaacgattcataaaccaaagagcacgggtaaatggacactggcaaaacagatggaaggccgtttccttgtcctcattacaaaaaacacacttcccatcctgtatgaaacctagccgggctttggtagggaggatatctgataaaactttccagcagaagaacctaagacgagggtgcattctaaatttccagaatcgaacccacatgtcattcgaaggagaaaaacattgctgattgagaatccaataggcacttttgacaaaaaattcacccgattttgcaacattccagaacacaatatcctagccttcctgtattggtttaattctgagtatatcccttgcaacctcatccgcgaaacactttttaatcaactcttcaatccagctacgagtgccttcaataaacaagtcgttgattttccaaagggcctgattgttgacaaactgaaatttatccttaatctctgaaggctttctatgtggaatccactgtctatcccacatctcacactccccatcaacaattccaatgccaaccccttggagccagatgtctcttgccgccagcaaacttttccacccacgcgaatcttcacctttcttatccactgtccacgctgaagtagtacgaaagtacttatccaagaacatcttaacccaatatttctccttctgctgcaggatcatccagaaaagcttggctaggagagccatattcatgtctgcaaatcgcctaaaacccagcccaccacagcgttttggttggcaaatatctccccaactcttcaaagcacaataatgtgttttgtcaacatttccaatccaccaaaatttagcaatcactctgtccaactccgtgcaaagagacttaggaatttgaacagtagacataaaatagtttggtatactctgaagtacagactgaaccagaactgttctacccgcctgggacaaatgacgggctttccatccctccaatcttcccaacattttctccttgaggacaaaataatcctctcttttcctagcagtgtaaaagaaaggattgcccaaatatttttcattatttctcaagcaatccattcccaacatagctttaatctcattgcggcagcaggaagatgtattaggagagaaaattaacccactttttgctttgttaacacgctgtctagaccatgtctcatatttctggatacaactcaaaatgttactggtgtctttcctcgtagcatgacagaagaacattgcatcatcagcataaaaaagatgagaaatggggtttgcattcctagccactctaatgcctgcaatatttccaactcgttcctctttgagaattagtttagagagtacctcactgcagaaaataaagaggaagggcgagaggggatcgccttgacggagacctcttttaggatttaagggagccaacggagcaccattaagaagaatagagtacgaaaccgtagacacacattgcatcagcagctggcacacttgagggttgaaaccattcgcctgtaatactctgagaagaaatccccactctagacgatcgtaggccttgttcatatccgttttaatggctagggtccccttctttccctttttgtttctcatagtatgaagaacctcttgtgccatacaagagcattcggcaatccaacgcccaggtatgaacgccgattgatacggaaaaaccaatctgtctaccacccttttaagtctatttgtgagaatcccggaaataatcttatacccaaagttacacaaacttattggtcgaaatttgttgaagtgaaccgcgttacttcctttgggaatccggcatatgaaagaatgattcaattgtctataaagagtcccagtcaagaagtcggtcccttccgatgcattctccatgcatccaacctgagctttactttaaccaattctctggaaagaacatagcactt

SEQ ID NO: 112255 - DNA, 4329 bp, Cannabis sativa
tctctctctctctctcctctcttcggctcaagaaaaaagcccataagaaatcaagcttcttatcccaaatcccagtccaattgttgctagaaatcaacactaggtgctaaccaaaatcttgaggtaattttccccactacttcttaatggtttttagggttttaggttatttttttaggattatgtttgattttggatttgtagattatattcagttcagagcatgttcttaggtttagttcaaatttatttgagtgttaatttcatgattcttgagatgttaggccttgagttgggtgagttgagttcaagaactcaaaaactcactcaacaatggtgagtttataattttagtttatttctaagttttgaatgatgaaatatgttttatttatggtattaaactattctagaaagtttcattaggttttgagaagttttgaagggctttgaagtgaaaaactcgagtttgggatgttctataggaaaaacagcctaccatttttatagtccagagaaacggtagactgtttctggaaaatggtggaccattttgggatgtttccagcagctaggttttgtgtttaattgataggagttcgtcgagttttgagtttaggtcttggttcaagattgattagattatttaccaaattattattttcgtgacataggccctcatatcgtcgagcatcattccattcaggtcggtccgcacacctgactttggacttgaggtaagaaaagtcaattgcactgcttagcatgtcgaaataagatacattaaatactgttgttaagaatgagttattactcttttttgaaactgctgttatgtttcttacttattgattgctttattaagcaatgatagtacattagagactcgttagaaatgagggttaaggatgatttataaagtaattggtttgtcttataagataaatagttgtttttgaacatttgattacgctttgaatatttgcttaagctatatgttgcaatgtatgttctgtgatactaaaaatattgtgctatatgtgatgttgtgtgttacctgcttttcttgttgaatctttatgactcacaggtactctgtggtgcaggtaaggaaaggggaaactggaccagttgtgagtcagaggtctcccagaaatgtacatatcaacctgccatgttttggtttcagttaacaggatcttccttttattgtgttttgaatatgtaacaatattttgtaataagcttattttgtagtatttagtaaagtttgtaactaaggggatccccaaatctagtggtattttgaaagaaaagtttaagttatgatttaaataattttattaaaagctttaattaaaccacatttttcttaaactgtcagtttattattctaaattattaaaggcacacacgtggcacccttgctgattaggacattacaattatacactacttgtggagcttcgtcttctttgtgctccagaatctccacctcgttattttgagcatcattggccatgatcacaactggaaaatagtaagaaaaaaaccgagcagttaatacccatattaacaaatataacaaggatacaagagattcctcccctgacactacttagagaggtccccccggaccctacatttggaagcaagatcctcaaggaacattgcttcaggatgatcagatcgggaatacagaagattaattgaaaattcacaggatatttcattcgaatccataaggatctcagacagaggatttaaattcagctatgcttcaatgcattttgccaaagtttggctacccaacaagaaattcattaaagaagatagagtttcacaaaagctaatattgacaacagatagtacacaaaaataaatcaacatcttagtttcaaaaggtgtctagaaccgatctgaaagcataaattctactcactaccattcacaacagagatgaaagcatcaaaaagaaaaatcaaaatcaactagatacactatcctgcaagatgtttgtcctaccaaaaatctaaatacatttaagaattccagaagtgtaagagattacttatgtattgaaggtgaggaacttggggaaggaattcggacgtcatgtgttggtggcagtaaaagtcctgcagttgaaggatgatcgagatgcacaacccttgactgaagagcacaagtttgatttataagtgcttcagtttttcttgaatatccattggatctaatggatttgaggaatcaatcgttagaactgggggtggtgctactaattttaatcttgaacgaatctgaagaagaagatgaaggcactcgtcaaaataattggacattcaccataaataatttttgtatttttgtgagattcaagctcagaaagtaaaatgtgcaaaagtggcaaatagatgtttttcactttacttatggattatatatggcgatttgggtgctcctgcatcaatggtttagattacattcaagaaaatacaaatcacatctaacgatttggaaagtagaagggttagcattaaatgactcatatagatttgggataattcgaatgatgatattagcctgatacacccgctgacatgatcagctgtcattttataaattcagacttcacacgttttctcaatgtgagtaaccttcacgagccaagagaacaatgccacgtgtaaattatatttcgaaaggggcaagttgtcatccattatttgttggcttggaatttgaaagcgtccaatattctttctaaaacatccacgtgtcttcatactatctggaaggaagattacaagcctccacaactcaaatgttctggaagcttgggggtaaatgttatctgtattttcgaaagagggacacatgtacttctaagatccaaattcaattaataaaaggcccagtttatagacccgatcaagataatagaccgaatttacttattcgagccatcaaggttctggaaagacatctcgtctagatgataagaagggtccaacgaagaagagcatctggatacctaccagcgatgcttctagaaaggtaattaattcgcctccagatgtcaaggttgattcgatataagaaatcacatcacatcaaaactttatttccaaagtgaactccagaaatcaagcattccatataagaaaatatggtgattgtcaatcattcattaaattacatttattacacgcaaaaaatgacatatgttttctacccatcatcaagcaaattcttcgtaagcatataacaatagcctcacgggctaagccttatcaaaccggcctaacatcaatatattatttttatttatcccattagtgggccacgtttatatggaaaactctagcatataaatagaacaaggattcttcatacaaagggttcgaatttttttttttacaagttaatgctaaaaatagggttcataaaccatggacaaaaacacttgcgaaatattgaaaaagattttttagctatataatattgactcgtagactaaagtttgttaatatcgaatcacgcaaaaattttcgtctaaatttctatattctacttattttctttagctttattatatttttatattttgtttcaaaaaaattggtaaacatgaatatttttattagatctttttttaattttttaaaattaatagaaaattataatttttaaatttgactttttttttaataaagttactttgacatctatttctctgtccacgtggattttgaggtgatttctatcgtattaaatattattgttctttatttatataataaaaaacaaaatcatacttacacagttgtttaaaaatttttatcttgaagaaactttgtttataatagatattgtgattattttcaacttacaaatgacaatgttaatcaataaaataatgctagttttaagtttaatacatatattaaaaattattatctttgttttatattatattatacaaatactttcatatctatatatatatataaaaatatatatatatatttctgcattacatattgaggagtgataattataactttatacttaacttctacatttgaagtcacatgctaaaatattttttttctaatttttttatagcagtatttattattatgttttttaataaggaataagttctataaaaatatatcacaaataaaagaacccacaattatacatttcatcaaaagtaaactgactataattttaaatgctaatatatagggatatttattggatcacatccaatgtttttaggcctatccagatccgatccaattatatattggatgttagatt

SEQ ID NO: 112256 - DNA, 6388 bp, Cannabis sativa
  modified_base (5520)..(5530): a, c, t, g, unknown or other
  modified_base (5614)..(5620): a, c, t, g, unknown or other
  modified_base (6337)..(6339): a, c, t, g, unknown or other
tactatgactgcttgtccttcacggcgcatacacttagaattcctgaaatagatagagcaatcttgcaagaacagattagaaattagcaagaaaaaaaaaaaaaaaaaaaaaaaaaaaaaacgagtatcaccaaaacttttaataaaaactcacctactaaaggctgacacaaaatgaaaatgacaattacattagatactatttttataaaaaaaaattacatttaacgtttactagtgttttttttttttatatatatatatatatttttacagtttttcataaaaacaacatgtaaataacatcaacacaacaacaaaaaataacatgcagagaataacaaattaacaagaggacaacataaaaagaccgtatttttctataaataaaatcaaaaaaatagtaaaaatatttgaaattctataaaaccgtatttttgttatttttgtgtgtgaaataatcctaaaataaaatgtaagttgaccaccatggaatggtaccattctgttacctttaaaaaaaagacattagccgaggtcataaactaaatatcaccattcattttagtttaatactctataaagatattatctttataaatttaatgcaactaaaagtttaaaattagtaaaataacactattaagtaataaaatagaacaaaacattctaaaacaaatactcaaagcaaccaataatattacaaattttacaaaaaaaaatataaacagctattatacatataattaaaataaatatttttatttttcaaaatattttttattatatataaataaatataaatcatttttaatatatatatatatatatattttgaataaaagttgtaactttattaaagcatttcttgcacaattacatcaaagatgctactcggtatagaggtaaacgagtaactacgatcagagtgtaaccatgaggctcgagcaaaaacatgagtaacacaattggcagattgttttacaaagcaaaaattaacattgttcaagtcagaatgaagacatttacagtcctcaatacaactgctaaacagagaggccataattactgaactctgaagagcttggacggtaacaaggctatccgtctccacagtaacaatgaaaacattcgaattttttatccaactaagagcctccttcactcctaaagcctctgcaaagcctggatccacacacccttgccaagaacccgtcctaacttgaatgacaaatcctctagcatctcgaagcacccaaccaaaaccaaatttgtgcttgtccctaaatgttgcagcatccacattaatcttgtcataatcaacacaaggagcacaccattgctcatccccttctcctacatcaaccgagaaagaaatgggtgaaaagtttttttttttgagaaaatagccactgttcaagatcagttcttgctaatgccacaacattcttggccgatccagatttaccattccaaaccttattgtttatgtcttgccaaattgcccagcagagcatggcacccagctgttttttatggctgctccaaagttgaaaatggttctgaaaccagtcaccaaaggaaagattatcaatgctttcattgcataaaccagcaaaagtgcagccaacaatgcagtgagcagtcgattccgcctctcggttacacctgggacaagagggggcgatctaaacaggtctttggatgagctgcacccgagtggcgagacaataagacaaagttctccacaacatttccttcactttctgggggatcattaaattctaaatttctctccaaaaacgcgaactgttagaggagacatgagaagacttcaagtcttggatcaaactataagctgactttaccgagtacttgcccgaagtttccttactccagtaccatgtatccaccgaattggaagaagaaataggtatagagagaatggggtccttgtctctatcattaaacaagttagagataatctctatatcccaattcttaccatccatagtcgttaaacacttcacttctttatcacaaaggctggggtggaaagatgtgatgaaaggattttcaatatccgggagccacaggtctctagtaatagagatatcctctcccgaaccaacaagtaatcttccaccttttattattaaatccttagcttcaagtatactcctccgaacatagctaggattattagccaattccgcactcataaaagaaccgcgaggaaagtgtgtagctttaaaaagctttccaacaagagagtttgtgagtgtatgaagcctctaagcttgtttgccaagaagagctatattaaattcatgtaaatgacaaaaacccatgcctcccttgtccttaacaacgcacattcggtcccaattcatccagtggatgccagttttatgcttagatgatgctttccaccaaaactttcacatcatccgctcaaagtcctcgcaaatacctttagggattaagaacacgctcatagcgtagtttggtaaagattgggccagaaatttaataagcacttctttttctgctcgacaaaaacttactattccaactctctactctctttctcattttgtctttgagaaaacccaacaccgtgtttttattgtgtttcatgattttgggcagacccaaataaaaaccatcgtcgccagcctcagtcatccccataatagaacaaatgctcccccgagtagccaaagaagtatttttactaaaaaaaaatagatgacttctgacgattcactttctgacctgatgcttcttcaaatttctcaagaagtgacatgatcctttctgctttagcctcaagagcccgataatataggtagctgtcgtcagcaaaaaaacatataagtaatatgtagagtcctccagctacttgacaacctttgatccaccctctactttcatatttttgaataataaatgacagaccctcggcacagattacgaatagataagggaataagggatcaccttgacgaatgccacgagaatgggtaatgggccccaaaaaattcccacccgatgtgatccagtaacggaccgatacaactaaggccataatcaactgcacccatctagaatgaaaccccatcttcagaaacaacgtctctaaaaaaggccattctactcaatcgtacgcctccctcatattaagcttgcacaccatttgccccactttacccttactttttctttagaggtagtgcattatctcaaaagacaccaaaatattatctgtgattagtctacaagggacaaaagcgctttgagtctcagaaacaatgtcttccaaaaacaccttgagcctattagccataaccttagaaatgattttatagacagcattacaaagagcaataggacgaaggtcacccatattttcaagattctttttctttgggatgagcaccagatttgtgttatttaaatcttcaggaatagaggctgaatcgaagaaatctcgaacaagttttaccacatctgaacccacaacaccctaacattttttaaaaaaaactcggtatcataccgtcaggtcctggagacttgtcaggatgcatctgaaatagagttgttctcacttcttcagttgaaactggtgccaacaaatcaacattcatctcttgagtaatggaaggagtaatatcatcaagaacatcactaccatggccacctgaggtagtaaaaagctccgtataaaatctgaccatatgttccgctaaccccgacccccaatcaagccaaccccattctcatcttgaagtttatgtatcatgttctggcgtttacgagcacttgctgaagcatagaagtacttactatttctatcccattccttgagccaaagttgcttggatcgttgtctccaaaaaacttcttttttagttagcagttcaaagagttctttttctgcatttcgatgagcatcaacagacacatgatcattcttccctttcagatgcctaattgaatttttacaggctgcaatttgctgtttaaaattacctgttatctccttaattacccaagccacaagaatgtcaccacacttagatatttttgactgaataggaagcgtgctatactcatgccaacagtctcggacaacttggagacaatagggttctctcaaccaagtattttcaaaacgaaaatgtttcacaccattaaaaatgtttcgaattatagggtccaaaaaaattagacaatggtccggcgaggaagcatgaagattaaacaacttggcaatcaaaaaattatcaagccatgaaagtgaagccaaagctccatcaagtcttacctcagtccaacttgtggtaccgcttcctctttcccatgtgtaaggatgcccatgacgctccatgtcaatgaggttgcagtccgaaagaacctaggaaaacccatggatcagccgctcaggatacgatcgtcccccatgttattcacggtggctggtgacattgttgagatccccgatgaacacacaaggccaatgagcatcttccgaaagttgaagaataagaacctaagtgttctctctctgacttctattaacttcaccataaattccaataagtctccaagtaggcatattcggaacgtgtatgagaatattgatatgtttttgagaaaaatcaataatctctcattctttactatttttccataacatggcaagcccaccactatgtctatgggcctcaatcacaaacagactctcatagtccaatgacaaacgtaatttgattagcttgatttttaattagattttaagattgacatctaataactaatccaatcaaatcagaattcaattttaatatttaatctaatctaattgtaattggatacctaatattttataattaaattaaattaaattaattcagttcaattaaattgaatcgaatcatgtttaccctatatttacaattgtttataaatgatgagaacatttaagtagatagttggatatgtaatgaatggctattagagtgactttacaataattcattgcaaccgtattataaaataaatgaccaccaacacacgtcagccatttaagataacatggacaaattctacctactataacacaacctatggactcaaattattcattttggttacaacatgtctctttatatttttattataatatcaaaatatatatatatatagtgcaagactatgttaggacctagcaaaagttccctattattttttacagttttaatagttaagttatatttttgaacttttgttggaacctgaccattaaatgttaagtcattattcccatatcatttattattggtataatgactttgactaatcaaggactgtcacgtgactattaactaattgacatttaacggtcaggtgcctactataaaaaattgttatttttagtaacaatctcttagtcacaacataattttgttgtgactaaatgtgactttaagtcacaacaaaaagttacttgtnnnnnnnnnnnagtatttagttacaagttgttactaattgagctttagtcacaataaatattgtgactaaaaagacatttagtcacaacaaattnnnnnnnttgtgactaatatttttagtcacggacctttaagtcacaacacaataatgataatttataattagccacaatttttttttatctttagtgacaaattttgttgggactaaaagtaagattttttgtagtgacctacagaagtttcagaaatataacttaagtattattaccgtcaaaaattaaatttaagtatttatttaaatcgagagctaaatttaaatatttataccgtaaattactgattttgacaatgataaaaatataataataaaataataaaataacattattacttatcaaggccaaagtccaaatatcaagtccacttgtatgagctcctgtgctaatgtcctaggcgtgaactatcagctgaacactcaattaatgcgacaatataataaagtttcaaataatcctctacaattttttaataaaagttatgagcacctttttttttctaagtttagattagttaaaataactaccatatagtataggtgtaatatactaagccctacaaataccctatatatataggaggtatttactgtacctcctttagttttgaccctatagtatagggtagtaaaataaaccaatcacaaattaaatagatgaaagtcttctttatttatagtggactgttgtacattataatttaatttatttattattttatataactaaaattactttatttaggtggcgtttggtaannnttttttaatcagttttctgtttttcaaagtagaaaagtgaaaatatttt

SEQ ID NO: 112257 - DNA, 5038 bp, Cannabis sativa
aaaaatggtataacatgtaaatttcccaaataaattatgacgtacgttgaataagttccaaggaatagattacaaaaccagaataatattacatcaagaactaagaactagtgcaaagaagttccagtagtcagcacacccacaatagaagtgtgcacctgagaattaatgcttagaggccctccccaagtaatctggaatggtaagttgaaatgatgtcttatacttcaaaccgaggagaaaccaaaatcttcagattaaaatggaagactcaaagcatatatcttagattcctaattagaagtacagtgcagtaaaaaagagattggctgtaattgggtgcaactcctcaaacattctctcacactggctggactatcactataacctacaaagctgtaatttgataatggaacagagtcacccaggtctatactcaaacatgtagtttacatctccaaaccttaaatctaaatataccacgaaacatatgataagaaaaaccgaacttttctacgacaatgaaactaatacaaatgccagcactaaaatatggaaaactaattatcatttataataacaacataagaaacatccgtttaaaatgtacatcaaagcaagagtacaagtttagattcagtaacccttgcctaaagtttcttttcatgttttttcaatctgtcactttgtgttttgtattatttataactaaaacttaaccagtttacataaaaataagaaaaatagaaaaagtaataataatttatgcagaactatcggaatttacagagagaacaacaagaatacacatacaataatcattcagatcaagcagaccaaagttagagtctgcaatgactcagaaaagcttagttcaccaattacctgcttaatgtaaaactgcttttggttccttctcttctcaacagaatactttgcagacagtcatctcctcagtctttatatgccttaggagaaattaaggtggcattaagagtatccgaacagaatgcaaggaaaaattgcctgccaagaactagtaactattggttaatccgataaaagtgaatctaaaattaggccagtaaagcagagtaataatcctgctgggaaaaatgacagcaaaaaacaaaaacaaactgacaaggtacaacaagacaggacaaaacaaaacaaaggacacatgatatttagaatgccacgattacaaaatattctcctaattttagaatgctgctataactcatgagaaacgagaagatacaaaggacacaattatcagaaccaactggaggcagtgagctaattgtatctaatatgaaagaaaaaaagcaaaacaaaatttgattgtagttcgtccatggaatgcttcattttaaattaacataaataaacaagatttgataattgaaaggagagcacctaagcttatatgtacttacttaatcctacctcttgcatctgtaatccgtcatctcaccttgtcaccgcgaacaactaaatgtcccaactatatcaaagaaattcccatgtctttaaatatatcttcaaaagctcaggcaagttattttgcacttgctgtccacattcgtgagtcaatgatcattgattcagttgaaactgaacattaagtgaaaaggagcaattcacttctgtaatttccatttcttaacttaatcccatctgtcatgtgttatttctcttgtacagttcattcaacagcttcacagcattagcttttttacctcgtctagcaaaagtagcactaatacagaattgtgtactttcacaaggagcataccctttctcactcatttccttcaacaatcttttggcctcacctagatatgaatttttcagtggcctgtccaagtccggatgctttgatagcttacaccaaccacagataagtatgtcataagttgaagagttgggaagtattcccctagacagcatttcattcataagctcccttgcttggctcatctttcccacctttgcaaaatcaccgatgagcacattataggtgccagttctggggacaaaacctttgcttatcatttcaatataaagtttcatatattcccttttatttccaattttaccatggccagaaagtaaaatattgtaagtagaagcctcaggaacacaacctctctcctccatttcatttaataactttccagcctgtttcatcaaaccaccaccagaaaggccctccaaaagaaagttgtaagtatcaatgttaggagaaactctttcagacaacatctgaaagtatgtgtcaaaggcttttgataaatggctgcttatgcaatatcctcgtataagtgcattgaaagtagaaatatctgctagaaatcctgctcctatcatttctttcaacactgctgtagcctttttagtcattcctaacctgcacaagacagtgattaaattactgtaaacagcccggtcaagtttcagcccaaaacgcacaagtttctcatgcatttgtaaaattgcatcagcccgtctactctttgaagacacatcaagaagcaccctgtgaataattgaggttagggaagatccataaaccaacattttatttaaaacatccatagctttctcaacttcaccagctttacaaagcccttttattaggctttttgaagtgtttgaatttggaataaaaccttggtttatcatctcattccagagtataaaagcacgttgtgaattatcctgtctacagtatgcattaatcatgatgttgtgggtagccttgtctggagcgaaacccatctctttcattccgttgtagatggattctacttcatatttcccaacccttgacaaaccgtttatcaagacattatatgcaacaacatcgaatccgatatttctatctgtcatttcttgggccaagttaagagcagtagactctttccccagtttaaagaaactatccattaaagatgtgtaattgacaaggtcgagtgagacactcctagacatcatatcttcaactaattcttgaacttcatttgtcattctggtttctttcatagttttcacaaaagcatcaagtacaaaattgttgtcctccaatcctgcaaatttcatttcattatacagttcaagagcaagttcttgctcacctgccttgaaatacccatcaattagtgttgcataaatatgtacatttggcaagatattttgttgcttcatcttcctcactaaatcaatagcttcatcaagcatgcctttcttcacatagccatttataattgaggaatacataatgacatctgggtaaatatgcttgtgctccatttcatgaaagatgcacaatgcactactcacatctcctaattggcaatacccatttattaaaatagaatatgtgacatggctaggtagtagattaagctttaaaagaatttgatacatgtcctctgcctccttggtttttccagctttaaaaagcccatctatcatggcagaacacacaaccacatcaaaaataactccgcgcaccaccatttggctttgaaacatgaaagcttccactacaaattttgacttaaacaaggaatcaattaaaatagtatgagagaaatgatttggatgcacacccatcttctccatctccctcataagcacttttgcctctattattctcccatgcttacataggccatacaaaatggagctatatgttaccacatcaggaaatatttcattcataaccatttcttcatacaaagaaagagcttcatcaagcctatgctgcttacaaagtgctccaataatggtcgagtatgtaacaaggtttggtttcatatacattacgccctcactccgaacatcatcagcatccaaatcagcacaagcctcttccttttgtaatcttagaatctcatcaaaaaggcatttggccttttcaaaatcacccatcttgcaaaagccattaatcagagaattgtaactaacagtatcaggaaattcaccctctcttacatcctccatcaacttgagagcatgacttatatgtccaactttgcagtacccatctatcaaggtgttcaaacctaccacatccccatgaatccctcccttcattaagtcctcgaaaacccggctcccatgatctacaaacccaatttggcaaaacccctttactagtgtattgcacgtataagaatcaataggaatacccctcttcaccatttcggacagaagtccaagaccttgaaaagccaaacctttcttacaaaatccccaaatgacagtattataagtaacagtatcaatttcaacctgtctaagaaaatccaaagcaggcaccaactctcccactttgcagagtgaatggaccattatgttatgcgtaaaaacattaggcacaatcccacaagagagcatatcatagtaaagaagcctaacctgtgaaaccaaaccacatgcattgaattggtatagaagtcgattccacaacggtaaaacgggaacgaaaccgtgatttcgcatagcgtagaaggcgtccgatgcattcaaaaatctcccagcagccaagtagaggtgaatgagtgtgcaaaagaaagaagtatacaagtgagccttcatcaatggcggaaacgggaaaggagaaaatgtagtttggaaatgacgggaaggagcagaagggggtttaatttgatgggttttggatattgaaggagagggaagagaaggggtggtacataaatggtgtttggttggtaggaaagtgaagaagtgagtgtggggagagaaacgacggaggagaaggagggcctttgcctgagcgttcaaaggcactcctaatactgcttccattctcatttcaaattttaaatgaacgttctgaagtgttacactcaaccaaaatcttgacggggaatagatcttaaatttaattactccaacgctaacaactaataatagggaaattctatagtgcactttcttcataagaatatatcgatacatttttatctgttttagctttcgaaataattttttagctaaaatt

SEQ ID NO: 112258 - DNA, 3324 bp, Cannabis sativa
ttccattaataaaatattctaataatcttcacagccatctttccttttttttttttttttatcagaatatataccaattttgatttatatatcagttatatatatgttgtcgaaagggatgggttatgcatgtcattgggcttttatttctttcattgatgttagcttatatctcattttttttcataaaaaaaaaaaagctgtttctcgttttggtgtgtctctctttctcttatacaaagtctattatctaaaccctctcaatttggctgcttagggaaccaaaatcttattcattgactttcaacagccataataattaatgaggagtagaactctgaaagagacaaatactagtgttcagaatttgttcttggactattaaaatttacgatattataaagttgtatttaaaataaattggtatattatatatataataaatatatatatatatattttatctttcacaaattttggaatggggaaattcgatagaattcttaattggagctactaacaaacagttagtatttttttattcttatatttgttcattatatgttaatttgttttaatttttaaataaatgtaatttgtataatttattaatgttttgtataaaaatttaatttttagtgtaatttgaaaaaaatagattttatgcaatttatgatgcatttaaaattgttggactgtttaagacagatttaaatttttttggataggttaaaatgtaattattatgccgctaaaatgttagtaaaaatttgagataaccaaaataatttatgttaattttataatatattataatttggtaaatttataagaaattattgaaaaataaaatttaaaatggattattatttaaaaaattacctgaaatgaactttaaatataaataattaactaataaaatatttttaatttttttttgaaaaaataataataaataagtaggtgattaataaataaacacaatataaattacaaatagataattattaattgattaggcaaataaacattttaaaatttggtatatttaattttaaaactaaataatttaattaaaaaaagtttaattttatttttttaagaaattattaaataattagttttttaatttaatatagtttttaaatttaatatgtgttattacaaatatattaaaaattagtacatttatttttaaaaccaagtaacttaattaaaaaaagtttaattttattttatttttttaaaaaaattattaactccctaaacaaatgactcatcaatttcaataattttaaatgttttaaacattcatgcagatgatgtcaaagtcgccgtggtcaaatagcccataagtaataatgcaaatgatgacgcagtcgcctcatacgaatgaagtgtgacagtctcggatgtcgcaaatgataccgatacaaaaaatgtcacagatgctgcagacatttcagatgatgccgacaccacaagggtaacaatatgggtagcagacatcacatatgccgacaccacatgggcaacagactgctcagatgatgacaagttcgcaaatacctccatactacccaaagatgctgaatgttcctcaaccgcagattccgaggaatgctaatgatgatgatgacgacgcaagaacaaatttcttttagtatttttatcttagttatatgaattaactattactttaatgtttatttctggtttatgaatattcaatttagcaagtattatctttattgaaggatattgttatatttgacatttgatatgtgaaataaaaatatttagtttggtgttatgttttacttttaatttaattattttatatattgtttaattaaaaaaatatttaataaaaattgattactttaattcaaatttttactatctacttaagtgggtgcgttatatacttactagtccatgtatggatatggttgcccctcaagtgactaagtaggttgagtacttcttggttacttgttaagtaacccgagtattcacttacgaacttccttgtcatgggtatgccactatgaccccatacacttttgatcttagtttggcttgcaaattaattcaataacaatcatacaagctgcgtcgttatataaaaaataacttgcaatttttattgatgactggaatgtgcaaacatgccttattacatcgataatgggtaatgtgtgccttacactaagaaaaagtagaagaaaagaaataaagcaaaagaaaattctaaaaagtaagcaaaacaatagaaaatcctaagttcactgatgggtacaaccattgcttaaatcgttgctgaaaagcaactgttattggtagtatttataaaggtacgtatgatccattccaatattagggtactgatacaagattcatgttggtgtcaaagcgtaccaacttgtatgttcctaggggtacaacctccatgatttcatatggtccttcctagtttggacctaatacacccgttgcagagtcttttgtattagggagcacccttcgtaagactaggtcccctactttgaagcttctttctttaacttttgaattgtagttcctgactaccttttgttgataagtagccaagcaaatctaggatggttctcttctgccctccaataggtccaaggactggtttatcggttggtgattactcactggatcgtaggtcatccttcagtgggagggtagatcgatctcgactagtactattgcgtcatatccgtaggtaagagcgaagggggtatcaccggtcgctgtcctttcagttgtcttataggagcatagggcctcaagtagttgttcctaccattttcccttggcatcttctagtcttttcttctaggtatccttcaaagttttattgactgcctccacctgcccattagactgggggtgcgcaacggatgggaagcttttcacgataccatgtcttgagtagaagttgtgaataagacaatatcgaactgtgtaccattgtatgacaccaacttgtggggtaagccgaaccgacatatgatgttcttgaccacgaagtcaagaactttcttggaggttatggtggctagtggcttccgtttatttggtgaaatagtctatggataccacaacatattgtattcccccctccctttgggtaactgaccaatcaagtctattcccatatggcaaaaggcgagggactttgtaattatattagtagggtgcaaccgttggtatttttgcaaacttctagcattttcacaccttttgttaggttataattaacctatatttcgggtctttaaagttagcatt

SEQ ID NO: 112259 - DNA, 1738 bp, Cannabis sativa
cttttttataattaaatatcaaatataatctcacataatttatcaaaattaaaatcagcattggaatattatattaaagagtaattaaataaaaaatgaatatagggtataatttcctttaattttagcttaagagaaagcaggaccaaaataaattctcagccctattgggtataggtatatgtattgggtatatgaaaatgtcgtttgtatttttgaagggaaaatctactttgttgatagaaatcgatactatgcagactcatgacaatgagaatatacgagtcatatttgctgtattagctctagaaaaatgacaaccgaaatcagtgttttgattccaactactatacataattggggcataatttattgattaaatttgataaatccatcgtattataatgtgaaagagcacaattttggtctcaagtctcaggtgaaagactttttcgaatggcacaataattagatgtgttgagaaacaatactgcaaatccaataacgttagcccaagtttgtgttgtgacccataatttgtgatttattccttcgagccttgaccaccactacaaagagtagttcgcacgacttatatgagtgtgtacacatgtatttaattagtgacaataattatagttgaaattacacacatttgaaaattttcaatgtttataaatttataatatatttttttaatccatttgggctataaacttttaacaatatttatatctttgtgattttatttctgctacattcttataatatatttttgtattctcataatttaagtttttttttatacctttttacatttttttttaatctttttgacttattattttgaaccttgaacaaagtctccaattttagagatgagctacttagtgttagtcctgtcctacctccgtttcctgatgggtttttttcttctacttcaacaacttagaatgattatgtgtgcattggtattagaataaatcctattgttagaaataagtattagtgatataattttttaattatggagatttattaacttctaagtgtgacgtacatgttatatatatatataacagtagaaattttgatatttttaagttttaacctctataacagtagaaatttgacgttttggccaatagtcactttcatattttttagtatctaaaattaagtggggcaagatttatagacagttaaaatatttaaattatacagaatatttaattatggtcattttacacctaagttgaaaagaatacttagtagtgaagtagtattttagactttttccacccaagtttattctagctaatccttagtggatttatgagataattatgaaatttatatagtgattattaattagttatagtaaaaatactaatttgaacacgtgacagaaaggtaatcagagattcaacttgctctgtttgctgtcaaacttgagaaacaattgaccatactctctttagctgtaaatatgctcgagctgtttggcatcactcgagcatgacttttgatttgcaattgtcatctactatgcgtaaagataatcacttgttccatctatcctctacttactccaattttgtaaactttggtcaatttgcacagaacacaataaagtcgtatatgggcataatgcaaagtaggggtgtacatcaaaccgctcaaaccgcccacaccgcaccgcaccgcaaaaaaaatgcggtttgaaattcttcgcggt

SEQ ID NO: 112260 - DNA, 1109 bp, Cannabis sativa
  modified_base (569)..(589): a, c, t, g, unknown or other
tgtaaataaaaaatatatttttagccaaaataacctttttatataaatgaatttcgagctctaacttctaagatgagagttatgtttgaaatactaaaactaattattagtctctttgcataaattgttgaaactaaaataaatttaaacttactacttgatgtgctaattaaaattttaattattagttttttttgtcaaatttgaatatcgtctcaaaaacctttctgcattattataattaatgtttccatgcttttttcccaatatacatgacagttttatgattggccacgtgaaaattaaggcttaagatccgaaagtgtttaggaatatcttaagtaaaattatgggctgagcggatatattcgaggggtccctcctagagttatgattggaacggagggaccaatgtttttgctcttccccgggagttaggcaaagtcttctcgactggctcagagttccggagatgagctattcaaagacattaaatgtgacatggaggaaacgtctacggacgaatatgaaaaagacatgtcagacgcattaaacccattctttggcgnnnnnnnnnnnnnnnnnnnnnttagtgatgactacataatgaactatcacgtcaatcaagtaaggataagggtttatctcacctaagccctatgtaacctactatatgcagacatgcataccctattatctgaattttggaacttgtataaacccaaggtgaacacttgagacaatagaagcctttttcttctttgaagaagactataaataccccaaaccacatttgaaatggggatcagaaaaaatagagtagaatattctctataaagaaattcctccatattaaatatcagtgtctcatggactaaggctcattagttccccaaccacgtaaaaatattggcattaactctcttctaattattttcacagcttttattaattaattgccaaaaatctcggtcaaaattttagtactttcattgagagttgtagaaggctttacgtataaataacaatataagaagattcactgaaatgttatgcactagatctgacatatgctatgcagtaggaattgtgagcaggtatcaaacaaa

SEQ ID NO: 112261 - DNA, 3755 bp, Cannabis sativa
aataattcgggccacagtcggcccttcgggccgagggcccggcccggcccgcgaaaatagcccagattgacattcccaatttaaactcaaagctctaggcaacctcaaatacttcttgggattcgaaatagcttgagctaaagatggcttgtttctttctcagaggaagtacactctctaattattggaagatataggctacataggaaacaaaccttctaaaactcaaatggaccccaagatcaaattggatgatcaacaaggcacccttctcaaaaatccttcagcataccgccaactcattggtcatttattatatctctaattatccagacctaacattacctttattgtcctcaacctcagtcaattcatgttagatcctttgacacctcatatgcaagccatcaactatttactttgatatctcaaagaaaaactaggccagggcatcctctactccaccacctcttccttacatctcagaggtttttcaaactcggttttggcctcctgtccaaccaccagacaatataccaccagattttatattttcttaggtgactttctcatatcttggctcactaaaaagtaaccaactattttaaaaagctctgccaaagcataatacagagcactagcagccataagtagtgggattaccaagctccaatatctcctcaaatatttttaaatagcacaagacacaccaactttcattgattgcgataatcaatccgcaatacatattgccaacaaccccacattctatgaaagaaccaatcacattgaactcgattgccactttatccgagaaaagatcaagcaatctactattcgtctcatttctattagctccaatctttaactcgtagatctcttcactaagccactgccctctacaacacttcattctcacatacacaagatgtttgtttatgatatatacagttcaccttcaaggggggtaaccgttttagtgtgcacagttggtgcttagttaagatattactgtctgtactatcaatattgttagttggtttattattggcctttagcttttgttgattcagctagtttagttagagctagtttgtctaactctagtcgtgctatttcttggttcttgattagctagctaactctagttagctcaggtctgttagtatatatatgtattgatcttgtatcatttttgttcaatgagttaactttattttctgtaatgaaactttgttcttctcttgattcattccgcaataatcatgtggcctgaagtagctgttagaaaaaaaaatgtgttcaatatttggttttcggtgctagcttttctgtaacccataaaccgctttatttaatccatttgacacctaattaagagtttataacaaccatgcgtgcatgatattttaatttttaagtgtgatcatcctaaccactatatatagaagtctaaaatgttcattttggataacctagttttctatcaaaaagaacacttttctagaaggtctaaggcttaataattcccaatgttattttcatgagagttttcttagtgcttagagataggggaaataagattttggacaaaagtgtaatacattgttcaagtcatggtgatccccactaatttacactcaaagttgtgagtgagtatatttttattctactattttgaataatagtaatatatattaacacatgtatatagtatatcatattaaatatatagtgatatataatatgatatttaaatttatagcatgttattgtatgtatatatataagtgatatatatatatatgatatatagtatgtatatatgcgtaatatatattatatatatgtagagcataggactgaggatgaaatccagaaaaactattcaaactgacccatcgaacaccgttggaactgaaattggcggaactgaaaatcgaaaaacatggttatgatgttgtagttcaggatcacaaaggtcatgtggtagtaggttttcacttttctgctgtctcaggaacacatccaatttttgcagaagctgaagctctttcaagagctttaacatggtacacggtggtgcattttcccctcggtttgattgtctccgactgtcaactgctcatcaccaaagttatctagaagcaatagaactgttcagctctttcagacaaagtttggaaaatcatctcctctttatctcactttcctaacgctaccatccgtttcatacctcgacgccataacactctggctcataacattgctcagcaggctctaggaaccaatgaagaggtgctttggaacaattgtgttccaagttcttagtttttgtaacctttcttgttgtttctttgattgcagagctagttctttcaaaaaaaaaaattatacaactcaagaagcttttcttttgttacaaacaatctcactagtggtgataatgattaaaaatgcatcacaccatcacaaccctcaagaactcactcctctctttctttactctctgaatagctccctctgaatctctctatcatgatctggttctctctcttaatgtgttacccaactaacttggaatgatagccttatataggctttggtgtagacccgagtatcaactttcataacagacaattagttaagttagatgcaacaagaatattttaggaagagagtgatatttggccaaacacaacaatcttatatatatttgtttgtaaacaaaatgaaaatttagcaaatgaatattatataacttgtttactactatatataaatattaatttttatatattgttcctatattaataattaataatgaacatttttttgtttacccattttcattataagtaaattaatactagtgtccagatatagaatactttccaaaatttggcttcaccatctcaacttcattatcatggtcgaccttgaagttgggtggatcttaggacaaaaaaattatttggtcttttattttaaaaaatatgtaatatttttaaaaactactaaaaaatacgtatatttttaaaagaaaaatatttttttgagacccctgaattgaatgggccctaaacgcagagttagctcgccttagcccaatcttgttcattataatatagtttaagacagttatttataaatattatttgtatttgagtaaaattgtttagatatacttattaggattaaggataaagaaaagacgtaatctattttatttagttctgggtatcgtttttaagctacggttttggtcttgcagttttctccaatggatggatgcattaacttgtaccattttctttgtatttgtgttagaattttggaataagacatgaatgaagtttcatcctaaaactaattggtaataagaggagtaattcatttattttatatattttattatctttctacacattaacaatgtgggacagaaactctctaaatatttgtaatatacaaaatgagttaattataaatacaataattagttcaattaattagtactactctaacgttttccaccagtgtttaaagctgttgtatagtatctacttgtcaatatttcttcttttaaataataagtaatttctgttagggaaatttgaattattatgcattttttaatacaaaattggtttaaagaacacttagtgtaggtaatttttaaaataggacaaattttcaaaaaaaccccaaaatagccttgtcaaaaatctcaatccctttctctctcttccact

SEQ ID NO: 112262 - DNA, 2491 bp, Cannabis sativa
atctaatatatagactgttagacttaactattaattaattatcttttaagggtctcttcaaaatacaaagtaattaactttttaaatcataataatcaaaagcatatctatatctatatatatagctggttaacattttcttgattaaatcacataatgcatatgtgtcatgtacatctcatataatattaattttcttaattattgaattaaataacaaaatatgattcacgtgatgcacacaatacaaattgaaaattaattagcaagtaatgtgaatgtgaatatgtgatggtggttgtgtagtctaaaataataaacaactgatcatgaacgtagtatttattaaagaattgttaattaatataaactagtccgaggttataagtaattagaatggacgagttttaaatgttttatgggttgagaatgagatgggaattaaaatagtcggcagtgtgacttaattaattatgagaattacccaaatctcaatgatgattttaaaaggaagtgtactgtatatgttcactactttttgttctcattttctaatatcgataatcacaaccggtggtattcaatcatcaatagtcatatatatcatttttcgtcgtacaaataaaaaagcagtgtgttgagtgatcatcagtagtgttaattatgattgtagagaatgaaacattgtgatttacagctgttatttataatagtaattagtgcaagcgccaccttccccatttaggcaacgacagaaaagcccccactttccttgcctccaatataaaaccctaatttggccaaaccacccttcacaaaacaatatatgtataataagagtttttagtagctaaatttcatttatatttaacttttttaagtttaaattttaacggtaaaactttctaaattactaaactatatattcacaaatttaaggtatcgatcatccagttaaatacttatgtattaatgtacatgtatgccacgtgtacaaaagtgtacacataaatattttaagttagcagttaactataataaaaagatgttattttaaatttactaacagttcattagtttggaaggtttcacaaccaaaatttgaatttaaatggttaaatacatgtaaaataatatataattgaaagaatttaaccgaaaaaaaactcatacaataaatacaagtatatatgtatgacttataagctagctaagctaggtttcgattgatcatgttttaacaaaaagattgttggtcataatataactttaataaattagctttaccttttttattttcatctttaatatttattagatggttcttattaattggcatgtatagtaagcttgacttgatcaggaaaaggtaattgagggttgaaaaataaagtatttggtcagaggaaaacgtctgaagtaagtaatcagattcagatctgagaaaaatagcagtgtctcaggtcagattgtttttactactccatctctatccctcccactaccactacgtacctacgtactttaattcaaaatatactttacgtaattatttaccaatcttatacagttatatatactattactacgtacgtacgtacgtacctcatttgacattgtgaatggtttcgaatctctgccaatatttactactttttttcttttgtaggacgttatcgtttcgttgtctacgttaacattagtgtatatgtctacatgatatatctagttaatgttgtgctttgtgaaaaaatacataaaagcattgaaatattattaatatatatatatgagaaattttaaaaagtattaagagtggtgcttaatattctctcttacatgttaatattattattggagtaattaaatatatatcgggtctgattatataatttaatgtaataacttttagaccgtatcaatcgttaaccaattacgaggtaacacaaatgtactaggtaccattgtccaatatcaatactttattaatatttatctaaagaggaagaatagtattaatagtatctaacaccttggaaatatgttattttgtaattacttagtgatatttaattgcaccaataacgatattaataacacataaaaatgtgctagacagtacacacagtgttaaatatcactatcggtgtaggtctcgtcccatatataactttaagataataacttttaagaaatatcattaacaaatactataaaaaaactatttttaatgacaactgtttagtcacatcatagtttttttgtgactaaaacatagtatttagatacaagtatttgtcactaatttagtttaaatcatgtagatttcgactaaaaatgcatttagtactcacaacaaattttaatttttgtgattattacatttagctacggactttttagtcacggtatagaaatgatggcttataattaatgatatcttttttacttataatcacaaattttgttgtgactgaaaataagaattttt

SEQ ID NO: 112263 - DNA, 4157 bp, Cannabis sativa
acttttcctactgagctcgcgcagctcaagaaccttcagattctggacctttataacaataatatgaccggagatttgcctctcgacgtcgttcagcttccgaatcttcgccatttgcatttgggaggtaactatttcagtggtagcattccgcgggagtatggtcagtgggagtttctcgagtacttggcggtttcgggcaatgagctcagtggcgcgataccgccggagatcggaaacttgaccagtcttagggaactctacattggctattacaatagctacgaaggtggtttgcccgccgagatcgggaacttatcttccttggttcgtttcgatggggcaaactgtggattatccggcgagatcccaccagaagtgggaaggcttcaaaatctcgatactctatttcttcaggtgaatggcctatctgggtcgttgacgacagagctgggaaccttgaagagcttgaaatccatggacttgtcgaacaacatgctttctggcgagattccaccgtcatttgcggacctgaagaacttgacgctgttgaatctcttccgaaacaagctccacggagccattcctgagtttattggagagttgccagaccttgaagttttgcagttgtgggagaacaacttcacaggaagtattccccaaggtctggggaagaacgggaagcttcagcttctcgacctttcgtccaacaagttgactggaactcttcctccttatatgtgctctgggaacaagcttcagactctgattaccttgggaaatttcctctttggtccgatccctgagtcccttggtaggtgtgaatcgttgagtcggataagaatgggcgagaactttctcaatgggtctattccgaaggggcttttaggcttgcccaagctcacccaggtggagttgcaggacaaccttctctccggggactttcctgagacccataccgtcgctggtagcctgggccaaatcagtctctctaacaaccagctttctgggtctttacctcccaccatcggaaacttctctggcgttcagaaacttcttctcgatggcaacaagttttcaggtcgaatcccacctgaaatcgggagactgcagcaagtttctaagatagatttcagtcataacaagttctcaggtacaattgctccacagattagccattgtaaactgttgacatttgttgatcttagtagaaatgagctttctggtgagattcctaacgagattactggtatgaggattctaaattatctcaacctttcgagaaatcatctagttgggagtatcccatcatcaatagccagtatgcaaagcttaacatcggttgatttttcgtataacaatctctctggtttggttccgggaactggtcaatttagttacttcaactacacttcatttgttggcaaccctgatctttgtggcccatatttgggggcttgtaaagatgggattgctgatggaacccatcaacctcatgtcaaaggctcactctcttcctcattgaagctccttttagtcattggattgcttgtttgttcaattgctttcgcagttgctgctatcatcaaggcccggtcattgaagaaggcgagtgagtctcgggcttggaaactcactgcgtttcagcgcctagatttcaccgttgatgacgttttggattgcttaaaagaagacaacatcataggcaaaggaggagctgggatagtttacaaaggagctatgcctaacggagataatgtggccgtgaaaagacttccagcaatgagcagagggtcttcccacgaccatggtttcaatgctgagattcaaactcttggtagaattcgacaccgccacattgttagattattgggattttgctcaaatcatgaaaccaatcttttggtttacgagtacatgccaaatggaagcttaggtgaagttcttcatggcaagaagggaggtcacttgcattgggatacaaggtataagatcgccatagaagctgctaaaggtctttgctatcttcatcatgattgctcgccgctgattgtccaccgagatgtcaaatcaaacaacatccttttggatacaagttttgaagctcatgtcgctgattttggccttgccaagtttctccaggactcgggaacatctgagtgcatgtctgccatcgctggttcctacggatatattgcccctggtatgattgcctttctgattttttcttttagttctgttttctgtaacatgtacttaataatcagtgccttccaatttttaattatgttaaggatccttaaagccaaagactgacttttgagttttgacccactcacacattgatttaatgtagatactagatagcattaatgttgtttctgaattttcttagtcctgtgctgaaatttgactctggggttttcggaaatgaggcttttctattcactcaattaatgatttgaaactgttgttttgacatgaaagtaaaatggtgtagtaggcatggtacttttgaaagcagaatttcttgaccaattacctaccaaatcatagcataatcaagcactgttaatgtttttggctgaagtgaaaattttaattattatggttttgtttgactgcagaatatgcatacacattgaaggttgacgaaaagagtgatgtgtacagctttggtgtagtccttttagaacttgttagtggtaggaaacctgtgggagaattcggagatggagtggacatagttcaatgggttagaaaaatgacagattcaaacaaggaaggtgtactcaaaatccttgacccgaggctcccttcagttcccatccatgaagtaatgcatgttttctatgtagccatgctctgtgttgaagaacaagctgttgagcgcccaacaatgagagaagttgttcaaattctaacagagcttccaaaggcacctagctcgaaacagggagactcaacaacaacaacaacaacaacaatggcaacagagtcttcttcccctcctccacctccacctccttttcctcctcatcgctctgctgttggcggttacgaatcttcatctcctaccaacacaacaagagacaatcaacagccgccccaatcaccaccgcctgatcttctcagtatttgatgaaaagggaatagagtgtttgttctatatattccatggatgtccttagttttttcttttttttttttcttagtatctgctttcttttagtttattatattatggggttggggggatatgtttgctctaactgttaaggtgttaaatcttttcaagctttatttttttggggtgggtgtacagtagaattggttggggtactttttttttttttactttgtttaatttttcctcgtgtagtaatagtactctggctgctggttgctgcttctccttctggtttctgtttatggctcaggccttacttgtaatgcaaagacgagtctcagtgaaaagcatcaaagggaaagaagtctgtttttaaggagtggtttttttttttatgactattgagaggcaaagtttgaaagagacaaatggctttgggagggtatagtatagaaaactgtgtttgtgggtgtttattatcaagatacagatagagtagttgctttcaattaccgagactattgggttttctctgaattttctcattgattctgattaactccttcgctgtgtgcactatcattattcagattcagtggtcagaacactgttttagtgcacagtaaataaatataactacagcatatgagtcaaacaaacaatgcctggtgttttcctccaaaaataagttcaaattcacatattcaactttaaaaaaccatagtcatagtgtgatttgtcttgttaagtctggacccacacaaaaggttttttgcttgcataaggatacccattaggttcacatgcattacaaattggtataaagtgatttggtcaaatttctaattttctcttatggggacaataggtgagattgcctttctggttgttcaacttgtgaatctcaactaatatattatatgagctaagattcaaaatccactatgcccaaaaaaaaaaaaaaagctcttttcaaaaagtgacaaaactttgtagcgcttttgcaagcaatctttgataatatggc

SEQ ID NO: 112264 - DNA, 6763 bp, Cannabis sativa
attccaatactttaaaatgtaaccaaacaaaggaatggaatgaaaattgtttcttttccattccattctattttattacctccaaccaaacgccacctaaagtgcttaataacaatattctataagtgtagttagcaatttctcataatataatcaaaatgtgtggggtacccatattgcaataataataataatatgtcatatatatcccttggaaccttaatttgcccttcaagcaaaatactatataactcgtattgctgcttctgacatgtgtgtgtggttgcagccagatatagcagccccaggagtgaacatattatcagcagtgtctccatctgacccaaagaagaagaatgggtttgctttcatgtctggaacatcaatggctactccacatgtttctgcaattgttgcactccttaagtctctccaccctgattggtctcctgctgctatcaagtctgccattgtcactacaggtcctataccttcatctctctctatatatatataaccaataccaatttcttaaaactccatgcaaatatgcagaagatatatggtatcctcactccaagcaaggttaactttaacttgttaagataatagttaaggtgaaacaaaagagaaaaaatagggaatgttgaaaagtcttacattcataatgtgttgaaactaaatatggtataattttaatatgttgaaaagtcttactgttctcactgtcaattagttttgagataaaatctcatgcatcgtataattttaatatggtatctgagtcaaattaaattctaagaagtattcgaactaaatttaaaaaccggtccaaaaaaacgagctaaaagagtcgtttgtgattcaggatagtgagccaaaaaaaaggagtcgttgtaaggtaaacgagccacttgtgatcaagctgtgcaagtgagaaaaaaaataatgttgtggggatgttagagattcccacattgatagcgtgttaaaagttgaaactaaatatcatacataacatgcattaactattcatttcattactaattgattttgaagtgtaactctataagaaaacaaagtcagaaacaataaatctctaaatatcatatataaatgcatgaactatttatttttatttccaattaagaattaataattctctttagaaatccaatgaaatctatctctgtataatataatagtgtttataatagggtttattgttccagctttgataaatataataaggtttaaaatagtgtcatgttacactgcatgtataatttatgaattcactcaaatatatttgttttgttatgcatatatagtattagttgtagtatactatatgattatatatattaattatttttctgttatgttgcagcatggaataatgatccttctggtgagccaatatttgcagaaggagagacaatgaaacttgcagacccatttgactatggaggtggcataatcaatttcaacagtgctgtaaatccaggccttgtttatgacatgaacacttctgattatatctattatctctgttcaatgggttataaatcctctgccataaccaagcttggtcaacaaatagttataaccccaaatagtaacaataactattataattcattatgtccaactaataataataataataaaaacaataaaaataaaaatagtattctcaacttgaacctaccaaccattacaatcccatcacttagaagaagaacaagtttgagaagaagagtcacaaatgtgggaccaataaactctgtttataaggctattgtgaatcaaccacaaggtattaaagtatcaatacgacctcgttttatggtgttcaactcaacaacaaagaatttgtcttttaaagtaactgtttcttcatctcataaggttactactggttactattttggaagcttgacttggagtgatggtgttcatcttgttacaactccaatttctgtcagaactgagtttagagttttctcttttaataattaattaattattagtttctaattataccataatttatatatggtttttaattgagaccattttcatttttcttgggaagagaggaacaaaaaacagcaacaaaaaatgttgctgatttatcaagactaatattaataaagtttaaaactatatatatatgacattttttttgttagtttgagaccattttcttatgtttattaatactattatgagaccaattttcttgagaaagaaccaaaagagcaacacttttttgtagaatgttcaagattgccttcaataaagttcaaaatgaagcattatgacactttaaaaattacatatataggaaatggacttgtcactcattatgggaaaaaaagaatggaatgtattttattatatactataaattttgtgatttaaggtagaatttactctaaatggtaataaatactatgcaattcataacacttttatagtacctaaaaaacatactaacactatggtatgagaatcaagatgataattcttaatatatgagttttctcatgcatataatttgaatttcaccatttatataacatagaaattacagactaaaacatgttacatgtgatgtctttgtgttcagacacaaaattagatcatggggtatctcattttacaagaacatctggattaaaaaactttgttcatgcaatgcatattggaactttggctagaaatggtatcaaattctctggggagaaatccacatggtattatgcagcacttgccttcaaattagttgatgcgaatttcgagtctatacagaaggaaactccaattttttattctgccaatgagtgttccttagctggttccaccaccaccttagtttctaaccgcgaagctccatctttcggtacaataagtccatacccgcctgctttccttttgtacactatgttaatttcacctgcagagcaatcaaccaatggacatattaaactaataatgatgtaaacttaataagcaaaggacattgttttgttttttcttttaccagtttcttcatttcggaagccatagaagtcatgatctaagttttcaagttgctgaattgcttcggtgacagtcaacggtggcatatcgaagtattttgttcgaacaatctgaaatgtattgagaatattatcagggtgaaaatgatgattaaagctaaaggaaactgaagatatataattagacttaaatcaagatgcaatctaattctattccataagttttactatgattttaatgaaaaagttaggtgacaacctcctcaataatgtttccttcctcttcctcttccttttcctcgggagctggttcttcgaattgctctaaaggaggagtcaaaggatctctaactttcgacctgttatatcccttcatgtgtcggccgtggtctgattccttctccttgattttcctcaacttcctctgtataatagaggaagtaatgtctatgcttgcatacattgtctctgcctcctcctcggcccgaactaccccatgtctcttcaagaacaaagtcacctgagagaacacaaaccctcaaacaccgaactattcgctgcaatcccataaaaaagtagtatcaaaaaccaaaataagtaaggttgttttgtacctcacatctcctaatccttggtccttttcccaactcaccgccccgaattgacaaccgaacatcaacttccctcactaggtggctatgctttacaactgcttttccaaccttttcttccacatgagttttaactgtgtctgtcaactgcattatgcaaaagggaagcactcttcgagttagtgccaaactccaataggaatactcctaattctcattcatttcattgattatccatttgtgaaaatgacattacatatctataagcatttcatacaactataaaattgttaatgagtccctgaactattttcatagtgtaagaacaagtctccaatttcgatttagttcaatgtgtaacactgtgtagtattagtgacaattgtaatccaaaacattaattgactcaatttcatcttagaatttagtatggaaaaacaatctagtcaaaacttaaacactaaaggggttttgaaatttcactacatatgtaactccaatataatcattgagctaatgccttgattgtgattaaaattcttcaaatgcttatttataatcaaataacacaattaaaaccacaaaactgagaaattttcattacatatttcatgaattgaaagaaaacccaagtaagatcaagtaaactacctctaaattcttgccctgtatgatgagcttgaccgaagaaagcggaccatcccaagacatactactacacttctttctgggcaaaatctcagaaatggttttcacaaacttacatgggttcaagaaagttgaagttaaaggggctatttggggctttacagatgatccagataaaagggttgttgccattgaagatgacgatgaagaggaataaagggagtgaagaggggttgtctgcaaagaagttagtaaagtagccatttttgatcagaaaatttgagcttgtgggtagttgcaaaaagtgtttggattgagttaaaatgagaaagaaaatgcaagaaagtgagggttttggggggaaagatagtggctttagtgtttatagagtgtgaatatggatgaaggagacataaaaatcagatttttggatatatactcgtctacagacgtgtcatacatgcattatctacaaaaaaaaatgatttttttaagaaattttattagagtttgtttgatcatacacatgtccttaatccacaccgtacattccaaatgaacggtttagattaagtgaggtttctttgttccgcatgggggcctgttcttttccgtagataagttttatcttctattacactacaacaaataatttgggtaacaatttatatattttttcttcctaaaaaaaaaataattttagtgcataaatgctataaatgtgcattttttctaataaaatttaactaacattaacatgaaaaatcagctatatttacaatatagtacatcagtttttttaaaatacaatcttaaaaaacaagagctagacgttaaataaatcttagataagtcttcttttaaagaatttttctcttgttcaacgaagctcttcaccttattttaagaacaataaaagaacattaaaacaaaaactaaaacttagtagaatattgtaaattttctcacaataaacactcttcacacaaatctcaaaatataaaataataagacttgaagagatgagaacgattgacagctctctagatcctatttatagcatataaaaatcctaaagacagtcacaatatattttttacaattgtatgaaacttcattaaaataaaccctgatttgcagcgattgaaacacactctgtagtgacaactcagacggaatcaacaaatttttcatgtagagccaagatcacgaatttaattttatttcttgctataaaatgattacacaatttactatatacatagcaaaattaaaaatatcaaatctcaatcatttaggatcagttacactatatatataaactatttattcaaacattccataaagagaattatttttctcttatcaaaacaattcctaaacaatatagtacagccataaaacgtcatttaccacaagaaaaatatatttaagtgaattaaatattcataataaattaaataatattttgacaactaatttattagaaaatgactttaccatagtaacacttagataagatagtttgttaaggttcttgatcttttctactactctctcgattaacaaagttttattcatttcgtccttatctcttatctctgtcttcatcttcgtttgcatcttctaaccctaataagcatgaacaccatattcatggccttgaaatttattataacaaattaaaattagacttgggagacacgtccatgtcactgcccaacattcctaattattccaaacccaatatataaagtgatccacttcatatcaatggggattagcttattggtcacatattttactttgttcaatcttactctcctttttattatgtaggcgccaactccaaatatcgaaagaaacctaattaagataagattgaaagggctgaagatacaacttcaagagatgttggatctagggttcactcgacctggtgtgtcgcccttgggagctccaattttatttgtaaagaagaaggaggagactcttcgaatgtgtattgactatcgagagctgaacaagttaactattaaaaataaataccctttgcctagaattgatgatctgtttgatcaacttcagggtaagacagtattcttcaaaattgatttaaggtttggctatcatcaacatgtgcgtttttatcttttcaatccctcaatggctatataaagagtgaaattcagttgatttcaggcaatttagaaggaaataaacagcagtctatagatacgaatttcagagatcaactgcaatactagaggtattcttcagaggtttttcagcattcttttcttctctattttcttctcttttcttaagttaatatgtgtgattttgctctcataaatataagtagttaaacacttaattagggtttagatggatattgttgacattattttatggttttaatatgattttatcttccctcaatttctatgtattcta

SEQ ID NO: 112265 - DNA, 1664 bp, Cannabis sativa
ggcataaaacccaacaaatagttccctaaataaatcccaacagcaaaaattttaaaggaggctttcataatagaataaaaaatgaattgtggtggtacaaagtgattaatcgacttcgaggatagagctcgaaactcctgtctcaagctggtagagctacgttaattaaaagtgtgatgcatttgataaagccattaaaaaatactggtgggtaggtaaggaagagagaaacatgtatcttgctttgacttgttaggactctttatgcaaccctaaatattgtggaggtttaggttttcggagaagcatgctagtaacatggctttaatcttaaagcttggttggactattgcgtccaactctatatctctttagtgcaaagtgttcagggagaaatacttgcataataagagttattagagtgtgtttcctcctcttcatgatttttacgtagctaacggaatctttgcagttcgtgatttcatctttcaggagagcacttatctcattgggtctagtcaatctgttgatgtttggcattctccgtggttactttcaaaaaactaggattcttcccgagaggccttcaatcctatggttacacttttcatgtttatgtggctagtctgattgaccctcaaggtaattggcaaagagaaaatgtatctatgtggtttagcccgttcatggcagatagaatcttacgatttcaaagacttcatcccttttgtaaatgatactctggtttggaaaggattttttgaacggtagattaccacaaaagctgcttattggtctttgaacaagaatagatttcttaaggatactcctctttggtctaccatttggaaataagctcatcttcttgaaagacaccagcttcaattgtggacaatatccacggattgccttctcactggagagagacttaagaattttacaagaaacttttttccttactgcctttgtaagatggatcagtattcgaccattcatctattctgaaatcgctaattggctaaaattatatggctctctagcaagtggagtattcgagcagttaatattcacttaaattcaagttttgagttggctaattgcttttctaatgctgattttcttcataccttgaagctcacgtgaggcatgaatgtcttgtctttgatgtgactgtttgtgagtctttgtggtaggctcagaacaaactcttccataagggaaaggaattgaatcctacccacttgatttataagattgacagacgggtccttgaatttgtgtcgaagaatcctgttgtttctagtgatgctcttattctagtggcaccctcttctacttatttccctccttgtcttgcgcaacagatcaggatttttgtggatggccttaccaccattttgaaggcactgctgttatggtgacctattttgcagatggtgtaattttagagattaaaacccttgtattcactgctgattcacctcttgagcttgaaattaaagcggttgttctagttactaaattgattagagaaaagagatggaatgatgttgtatttttcagtgattgtacaaccttctgtgatgctcataggtcctgttcttggcctttttggagagagtaagctgaaaaataccacttttattaatcaaatttacctctaa

SEQ ID NO: 112266 - DNA, 2070 bp, Cannabis sativa
aaaaaaaaaaaaaggttaaaaatacagtatatgaagtaatttcccattaatttattacaaataaaatatttaaacaaaaaaccttaaatccccaacaataaattagaatacattattattattattattattaacttttgttaacataaataagacttttgacaattaatggatgtataataaatattgtaaaggaagtaattatatatctataaatatttcttatatgtgattttgtggttacaatttacatattttacaagtcactcttatttatatgttttctcattacaagatacaacttaatatattttttctcaattaagaaaaaattggtcatcctcattatctaaatgacggttcatgaaacatgagcattctccacatatatgttattctaacatgtgaaaataataataataaacttctaaatttgaatgcaacaccaaataactctcacttttgatcttatttttgaactgttattaatcgaaccgtttttctgttcgacatttgtcctctttccaattaacttggatgaattggtaaacatcatatggatgctcctcacaaataaattggctcgttgaacacttttctcgtaaggttttatttcaaatgaggttttggataatttttgtataatccttataagtaaactcttttaaattgtatctcttttgcttcttgtgatgaaagcatttgaacttgcaaccaacttacttttcttcttctcgctgaactcattttattaacacaagtctctgaaagccatattttaaatgttcaatgtttgctgaggaggttatagcatagttctttggtcccgtttgcttactactttatgattagtaaatttaacttaccccaatggtacaaggcaagacttaacttatgagtcaaataagtattatctgagacacaatttatcaacacattaatttttttttttttttgagttttttgcagctaaaccatcccaactatcatttatttgcatttaaccatccaatctcaaaatttggaggtaaaaccctccaaactactgatttgttaacaaatttaaagtgtcagccatttagtacagttaagtgccaacatggattgcttatgtgtaaacttttatacatgtgtcacgtttatattggtccagataatattattatttaaaaattattccaaaattcattttaaattaaaaaaaaaccattcaaaaattaaattaaattaaaccaaaaatcataaaactcataacctaaaacaccctctcatcttccttgaactcaccaccaccgaaaccaccatcactacaaaccaccaccacccaccaccaccaccaccaccacaacctatttttcgtattcaaatcacatcagaagaaaataaaagcaaaaatcacaacaataccatatctaaaacaagaacttagatctaaaatcttccaaacattttagataaaaaaaaatacccaaaataacaacaaaatccacaatcaatctcaatcttaaattcaaacacaaaaataaataaatgggtagatcgagagagatagacttagccatgaatgagctctccattcttcctcccttgtatgttcttccctctgcttcggtttcaaacagtgcaacaccgacaaagatcaggattgagagagagctgggcagattaggaagagagagagagagagagagagagagagcaaagcagatatggagagaaagagatttgggtagatcgggacatggaacttcaacgagaagaagaagaagaggcggttgatgtgttactcaattactgttaatggtggcgagaagaagggaatacaaaggagagaaagaaggggagattgtgaggaaggataagatgaaatgaaagggggatcaggattctagggatgtggttttcaattgtgtcgtctcttgagctctccggcgacgggatgcaggtccactggagctagtagggacgccgcaccatgaggaaaccaagaactatggtgttgactaggggtgttcaaaaagtatctgatccaatccaatccgcacgatccactccaatccaatccgcaaa

SEQ ID NO: 112267 - DNA, 1745 bp, Cannabis sativa
acggtggtgaggatatgaagagtggtgggtttatattgtggcgggagaggacgtggcaccaatactcaccgcttacggaagcttgccacccaagttctgcctgtcctgcccaatgcctataagcctacgtttgaatgtgccctgtgcaaaacggtgtcgctttgaccttcaaacgctaaagaaaaagaatgggaatattaatcaataatgaaatttgtacacataaatatttcaatgaggctactaaaatgcaaggagcctcaataaaaaatttcgtttccacatttgtatgtaaattatatgtgcatattttattactaattatgtgtgcacatttacgtgtgaattatagactttattccggatgtaaatgtattacgtggtgtacggtgggtttgtttataagaggtgatgaagattcttacttggaattgtcgtggcctgggaaagtgaggtcgtttgacaactcaaagagttaattcactgcaatcaacttgaaatcattattcttttggaaatgagattgtcgaaagaacattttaatactactatttgcaagcttcactttaatgatttgcttatgttctttctcttgggttattaggaggtttcactctctggtagaaaattgatgttagatgttcgatagatcaaaaagataagaacttagttgttggtactagtgtatcagaccctccacaccaacagtggcaactttgtgcgatctatggccctcctttgggcaaagacaaagaggagttttggacaagaatcgggggttggattttcaatgcttccactcctttcctcctcctaagggatctcaatggtacactccaagatgaaaaaagtatcaattatgtgaagcttggtaacacttcttgttattcttttgaccttagaaggatggtaaatagggcaggtgttattgattttgggtgtgttgggtacaagtttacttaaactaaaaataaaattcttttaactcagggttagctatttagaaagctatactagatagaggcttcggttccattgattggaggctccttttcccgaatggtattgttactcatcttatggctgcgacttttgatcataagcccattcttcaccatactaatggaggggttggtcgacatcgaggccaatttaaatatgagaatatgtaggatagaattttcgatattggttgtctgagcaacttggtttgagcggaggcatcaacacttgatgattaactttaacaggaaattaaagatcactaaaaaagagctttcgaagtggaataaagctcagtttctccacattagaaatcaagtcgaagacgctaaatcttacttggaaaaaattgagactgaggaacctaatgatgtggccaagtaggaagatgttatgaatattcggagataaatgaagccttgttaagagaggttattcattggagacagaaatctaaggttagctggatggaagaaggagataaatgctccaaggttttcatggcttctactattgtctggagaagaaggaattttattcaggccattaaaaactcagatggaatttgggtggatgaccccagcaaaatcagtaacctttttctttccaaatttaaagaaatttttaggaaaaactcttcataatagacttgatctttcatgatgtagaaaatagtgaatcgaattatctatatatttcatagaatagtatatatttatatacaaagctagagactaaaaagg

SEQ ID NO: 112268 - DNA, 4727 bp, Cannabis sativa
aacccgcgaacacgaattgccacccttaatctggagccatggaaaaaactcatatattatttcagcggagtcgacatctctccctaaaattagatttccactgatagttagaattgccccacgacagaacaccattatgaccaacttcatagtggtcgacacaaagtaccacacatgggtacttgtaaccgtaaatatattgccatccctaatgagaacgaagacaaggtgggtggcagcagtttgtcttctttttcatttttactcctcacattcacagttatacaaaattgtaccatgtgaatctccttcctcgcagtatgtatataattgtcactacacatacttcatgggggattgacatcctctgctattgctgagcaaactagagactccttcgtgccagtgcctctccatcgcagatatgtggtgatgtttcttttttagtatttttgtaattttttgagctcgtgatacgcacaccgtctttttcgtctccatgattgtcactaatacgatgtttcttcaaaggaagttgaatgtgagatacttcgatactcaagcgctccaaaatttgagcgtcctcaagatttgagcagttttaagggcgaaattctaaaattcgagatgctctaaggcccaagtggttctatgatcgagcgtcctcaaagtttagacagcttcaaagcttgagcaattggtaaaatcttttctttcttttcttttttgaaaataattgtatagatttatttttacctttctctgttcattaacgaattattattcccaggtgggggctattgaattcttcacatgactttgtggatgatctcgaacagagatttgtatttgatttagatgatctctaaatacatcgggggctaataaattgctcgcatatttttttttggtttgcctcttgaacaaaggctaattttgtgtatatgtttggtttaccaccatgattctcctccaaaaattacaggaacaatgttggaatccccttattctagcgtcaaatattgtcagaggaatttaaaaaatactaaaatgtacaagtgctcacttagaatagtgagtagtcaaatgaaatagtaaaattatatggaagaatgtaaatacataatagaaagacacaaaaaattttagtggtttagcaagagctcgattgagctcgatctgtctagtccacttttgaaagagatttcttgctctgtattttattattcagatcagtctagtccagtctcctttgaatggaggtgggttcacctacttgtagggtatagtaggtgatggttacagatgaccgttacaaataataataggcctatcaagtgtaataattagaacaattataatacaaatgtaacatctgctctaatggctcttgaatgcttgatcgtttcattcccgttgattagtgtgttcgcacattttcttatgcaggtttgccttaatattgtgaggtcccacttttaatattacgagatctcctttagcgaagtccttctcgcaagggagaggaaaattttctcattaacaagatgcgttcaatattaggggagcgcgccaaaccaagcggtgcaaacattagggagctggtggacactaagttgcgggagcatcaaggggtgtgaacaccaattgttgtgaagcatcctactttgagaggtgtgtagcaaaaatgaagggtgtgaacttgggaggtgaacaccaaggggtgggatcattagggacggtgcggacacaatagtggtgcgaaccattagagaggcggacactaagttgtgcaaacacctaggatgcaaactgtgaattgtgaacacacccttgaggtacaaaacacttgaggtggtattattcatactttcgttttttttttggaaggaaattcaactttatttaaccttcaaattcagcaaccacacatggaagcaaatcagttgggacattccccatactgaaaatacgatcaggatgtaatatagatgctctagcaaattcatgaacaactacatttgctgaccgtttaacaaaaataaatgaaacatttctaacttgagcaagtaaattcttacattcattaataatttcctcaaacaaagaacttgtatgaatgttacttctcaaagcttgcaccaccaataagcaatcggtttcaataatggccatttgtctttgatgcattttgagccaactaagagcctctcggaagcttaacgcttcagccaccataggatgaatagcaccacgaaacagtttcgtaagagcagtcaaaagaaagccattaggatttctaattacacatcccaaaccgaaatagtttcgttcttcaaagatagtcgcatcaacatttatcttgatactattttcatcaggtttgaatattttgggtattgaggaaatttgcataggaaagatttccatattaatatttctttggatgccaaaatagtaaataaataatgatatttttagtctattgtgcctgtgtgttgcgtatagagtattatattatccattaattcactgattaaaaaattaaaaaatacaagttccttaatttactatatacacggataaataataataatttccatatatacatccattaaatatgttgaagggtctagcgaatgcaataaataaaataaaagcaatattagagcatctaaaattttagaagatgcttgatgaagtggacatactatgtggcaaaatattaaaatattataccattagagaaaaaaaatatcattttagaaatttacatagatgcaatattgtagtattgatgctattcattttttttaataaaaaaaattaaagttaaaaaattattgtaactaaaaattaagatatatattaaataataatatatgagatcaaaattataatatttttaaaaaatactatacgttgaagtatttttaaaaataagagtactaaaaataatatataaaaaaaataaattaaaatattatacttttaaataatgtctaaatttttatcatctttaaaagttatttgcattagaaatactcttagtagatgctaataatattatagcgctacaccattatttaacaattctcatacaataaatagcgtaatttattaggttggcccctattgtttacgcacgccgtttatattttggttatggtcggtgaagagacggcgataaataatattatacacgtgaggtcgtgattgcgttttgaagcaaaacgacaatattaggtttttttattatttcaagaaacaaaaaagaaaaattgtaaatattaattattaattaagtaagcggcgccacataatattttcaaccatttacgctccttgttgtattgtatgtacaatgcttacgtgtcaactattggcacgtgaaaacgaatgggttggccatgctaagctaccatagatagatatgcgtgttttgttcacctgccataacacacgtgtaccataatctgactgccacgtgtcatcctatttttaaactagagttgaggaataatcatgaaaaaaaaattattaatataaatataactagtctagtcagagaaaattgacgactcatggggatgattagccaatggtccaaatccattaatactccaaatataaggaacaacaacacaccaaaataaataaataaatatttaatcgaaagcaaaacaagtatgacttgattgagtttttttttgtttaacaatgaaccgcattttattgaaaaatataatgagagtaatacattaggaagaaataggttaatgttagacacacaatttacaaaatattactattaggtaattataattataagataatattacttgttaatatatataattactaactcgtttatcatgaagatgaaaaattatatataattgatatttgatattctattttttattttattttttcataagaaatatattttatattttaaaatcaagtgtaattaatatatttcaagcaaacaaaacatatgtaattattatattttgtaattctaatagttatacaatggccctaaatttgattgtttttaaatattataatgcgtcttaattgaatttgtcacatatattattattaagatagtcatatataattttaactgatattatatcactttcaattgtatttgagtcagattgtttaattttgatttatgctaagtgatcctcattttgttatgactagttagatttttactggaggactagattaatattatatatttagttatgttcttaaattttattttaatcatatacataactaagtaatatagccgctgactaatttaatttttttttaatattataataaatagttacttaatatatagtaaaattatgaatatgttatcttatttcatattattattaataattttatttattaaaaattaaatgcacaatatattaattatcatttgaaattatttattaagaagtttgaaatttattattttataaaattaattaaatagggtgttgtagaaaaaaattatagtgttccttataatacattatttttatgtctcgatcatttaaaactattgttgtaacacccgtatttaaatatttttttaacacccaaacgataacttgattaattatgttataactttatacttatatgggtcgggatcccgagtatcaaaatacaatttaaaagtattttactaatatgtacatataatatat

SEQ ID NO: 112269 - DNA, 4197 bp, Cannabis sativa
  modified_base (1014)..(1014): a, c, t, g, unknown or other
  modified_base (2652)..(2657): a, c, t, g, unknown or other
  modified_base (3300)..(3301): a, c, t, g, unknown or other
ataactaatcagattgtaaagaattttatttaaggcataaaacccaacagttccacccctgcacaaataaattagcgcaaaagacacgatacaacaagcacaaaaaagcatgacacattaaaaaaaaaaatcttacaataataatagtaataataataataaatgtattttcaattataaataaattaaaataattataaaatttaaatataacactaaatattataattctaccattaaaactattgaaaaaatataaaactaaagctatattttgtagaatgtaacttaaaaatttgggtatttataaataaatattcaaattatgataattttaataattattttatatgtttttttgtaaaatattattgaaaaaatatataaaataaatgaagttgtaaaaaagtacatatatatatataaataaatatatagtgtagtaagcagctcattgattgaaaaaaagattgtagagaaataaagtacgaattcgagtctagatatgaaaacaggctaattttgttttaaaaaaaaaaaaatcagtacgaattcgagcatgataagaaaaatatctgatttaccttttaaaaatattggtactgtacgatatgacctatattttttatatagtacgactcatattttggaaaatacaaaaaaatatgagtcgagtcagcacgacacacacaaatttacagtacttgattttcttaaggatgtttgttatccttatgacacaaagatatgatcactttgcaacattttcttttgtcatgctttgaaatgggtagtgttgtaattcaaatataagccaaaagatgcaaaaatatatctacaaataatatcttagaataatgattatgactcattaaaacggtgtttattatctttataacacaacaaacaaatgatatttattttgcagcgctctgatcatgctacaaaaagaatattgttaattatctattcatatatatgtggaagaaatttcaatggttacatttttattgnaaccatcatggttacatttttatttaatttctaaattaatcacaaccatttaatagtaatctaatggcttaaaaaatgtaaccataatagtcacaataaaaatgtaattattgaaacctgttccatatatatataaacactagggaatgcttgaaggtataccatatttgttgatatagacttttcaattttataaaataagtaaatatatatttatgcagatatatattttagaaagtgatatccaggctaaacaaaaacaaagttacattatattgtaggaggttttgtatatgcagaagcaagaaattgatgcacaatattatgaaaattggaaaaaaaacatttacactgtatgttagaacctcatgtagaattaagcccatattattttaggtacatagtctcaagtagagtagctgaatttgtacagggaagaggaacacagcataaagaaatatgaaagagttcgactcttttaaatgggcattgggcaaatggtgattttggctattaatcaagtcattaatggcagttgcatttgtccatacttatcacataagttttttttttttaatgaatttgaagacaatacaaaataaatgaatttgagtgagacgcttaactcattatctttatctttaaggcaatgaaacatttggtgaaataaatattaagataatttgcccatcttttgttggtgcaatctagacgcattggagttacttaatataaatacttcagccgtattctcttaaccctactcttttatttgccattttctcttaattttttattcaagttgtactgaaattatacacctcccattaacaataacccggtcaaaacaactgtaattggttctaaaatattggttcaataaattgaatctagaagaaacattaccctctatttccattaaatattgagcatttcattttcgttgacatactttttattaggtagctgttcattatcataatttctatgaaattaatttatagcaaagaaaagtgtcctttttcttggatgatatgtatagccctccttcctcctcactctgtctcactctttcggataagattgctacaaacacgtgtcactgtccgttcaattatagcaattagcacactaataagacgttttttctcatatccgaacaagtttccaaataaggaaccaatttacttttgtcttgagaaagggaaagaaacaacaaaagagtagagacgtggtaagagatggttggtgatgttagccgagtgaggtagagacagtgtgtagtgttaagggtacgtacgtaggcgcatcagcgcgggtcactggccatagccccaaatataggtcactatagccactctctgcctgcctctcttaatccaacgcgctccacctatactctctctctctcctttttcactctccaatcttcatttcatgctcttcaattcatcaactcatgtaatgatattttactaccttttcacctaaacaaccttaatataatttgagtagaaaagtatttaatataatggccaaaaaaatttttagggtaagtttatagcactcccataaaaaagttattttggtagattttttatctatttcgatacgagagttttttagtttttttttttnnnnnntatttatttatttttttttataatcgtgtatgttataattatttaagattattcgttaatttttagaaaaatctaagtagtttacaatattgaaaataaagtttaaatattttgttgtacgtacgatttttttttattattatatgtgtgataagtaactgtttaaactttattttcggtactgtaaattgttcaaaatttttaataatttaaaaatgatcttaaatagctaccacataagcaattatgaaaaaaatagactatttttttttttctagttgctaaaacaaataaaaaatctactaaaacactcctttaagaagatgtactgcaaagatttccaatatatttagatataaactctaaattaggggtattcattagaccacattcaatgtttttaggtttatccaaatctgatctaattaatttcagtcatccaatcgatccaacatacattggatgttggattggatcggttctatctattgggatgtatttcatatatatttattggtttaatttaggtttattcaatattttagacttagtatttgtttggatcagatcaaatccatctaatattttagatccagtatgtattggagtagattggatccatccaatccaagaaaaaaagagnnaaattttaatattaattttcatatatacttatatattttaagtataacaatacaaaatctatttacttatcaaaactaaattaaatgataatactaattagtttgattggatgttggatgtattaaatttttgaacaacacattcaatattcgatccgatctaattggatacaaaaaattaacatctaatccaatccgatcacaattaaatatacaatatttagtgatcgatcataattaaatcgatcgttatcattaaattggatgatgtatggacatcccctacggtcaaatagcttaagattgactctaatctcaagtaaaatgatttcactaggttagcttcacccatgaacataagggaatcacgagtagcttgccatgttgcttgtgtcagaccaaataatagtgaagtagataggagaaagagtcaacattttgtgagataatcatagcattaaggcaacagtgctaaccctttgtagggtacctgttgccaccactaaagatagccttatacattagaatcatttttttaggttttttttttcattgcttaactatatttttttaggtaagaccataattttattaaaataagtatttacagtagaaatacttattattttttagatgtatttatttatatttttattatttttataatacaataatcaattttaatattgaaagttaaataatacattagttattaaacaacaaagaatttcttccaaccaataaacctcgtttttaatttgtagtgcatgctttattcaccatgtgttgtagtattatcatttcgcattacatgttgaagacaatttataagaaaccaatggctcttatacacgagtatgccactctggctgcttcctggattgatgactgaccct

SEQ ID NO: 112270 - DNA, 3591 bp, Cannabis sativa
aagattcctcaaagagtattctctgatgaatactctcattcttggagttggtattctacccatcaagcctctttgcacatttattcaggattggttcccaaaaactctactttctaggcgagccccctaaaggcattcctaaatacttcattgggctacttcttacttcacaaccgatcaaaggcacaatttgacacagccctctcattcatgtatgaccccaacaaatggcttttactcaaattaactttcaatccggaactagcgcaaaaagcttccaccatctgaaccaacttctgtaatgaattatcattatttacaaagagtatcatttgcgaattgaagatgactaacatggaccttttcttttcctaccataaatccagagcaaaattgcctgggcttacgactttttccatcattctcccaagaacatctgccaccaaagtgaagaggaaaggtgagagtggatcactttgtctaaggcctcaggattgtttaaactttcccctaggtcttccattaatgattgtcgagaatgatgtatatgagatacatcctctaatccatttcttccaactttctccaaaacttttgttacacaaaaccaaatcctagaaatcccactcaacctgattgtatgctttctcaaagtcaattttaaagaccattccactcttacctttgctactataatcttctacagtctcattagcaattagcaccgaatcgaatatttgttgtccttctacaaaggccgattgagtttccggaatggtcttccgtagcacaccctttagcttgatagctaggacctgagcaattatattgtactgacttgttataagacctatcggtctataggtgtaaagagagttgaaaagagatcagacatagatgtaaagatatgaatgtacattaggtgtaaagagagtttgaaagagactagacatagcttacattgattacatctctcatcttaatcatgtaaattatttcgacctgttctagtaaacacgatctttgtatttacgcttgtgtattgcataagcaaggatttttccaagggaaaaacttaatgaacatatgatgtttttgtatttacatctctcatcttataaaaagttttgtctttctttattatgtagatttaacacatgttactaacaaagtctgtttatccagatcacgggatagtagcaactttcaaccttttaaagccagtttctttgcttgaagataacatcttgcagcttgaggacgatgtttttgatgaattaggcagtgttgcctcaaccaaggtatctacagtaacttttttatttactttttactgccaggatttatttttgaaataataaatttagttcatgatttgaatcaggtggttgtcttgtctctagaacccttcaaaggatcaaatgaaacaacagttatattcgctgtcgaccctgaagcaaaatattcaaaattgtctgaagctgctgaaagtttgatcagggggtcttttgagattttttttacacgcctgccattattccacctaaccccttctctgtttggggaacccaagtctttcgacgtcctaaaatttccaggtggaattacaattattccccaacagaatgcttttcttctgcagaaagtgcaattctattttaattttactttaaacttctctatccatcaaatacaagcaaattttaaggatttgacaagccaactgaagttggggctacatcttgcaccttatgaggttaggcaatcttccctgtctttccctgctacagttgatacatatatgtctgtgcacctttgtggccgtttgattctgattcagactttgctaagtctaagtatctagttgtcctgaatgaaagtggcagatcctgagtgatttttttatctgttgtgcagaacttgtatgttaacttatcaaactcaaaaggttcaaccatatctgcacctactgttgtccagtcgtctgttttactgactgttggcaatacaaatcagaggatgaagcaactggctcaaaccatcacaggttctcactcaaaaaaccttggtctaaacaatactgtatttggaaaggtgaagcaagttcgtctttcttctatcatgcaacaatatcttcatggtggtgatagcagtgcctctgcttcttcaccgtctcccgctcctttttctcatgcccaccaccaccaccaccaccgccaccaccaccatcatcatcaccatcacagtgcacatcttgctcctgctatttcacctgtacctgccagccagaaaggttcacctgcaacccagaaaggtgtgcctgcacctgaagatggtgcacctaccccggcagaaagttctcatgagaaaaactatgaagcaaagccacctggttgcagatttagatacagatctaaaggggaagagagaaagcgccttcacttggctcctgcagttgcaccggcaaaaccaaatgtatctctacatcatccatcggcctcaccacataagcaagtagcccctccaaaacacacacccaattccgtacctgtttccagtcctttgccaagtgtagtttttgctcatactcagcctccatcaaagagcaaaccagataatgagcattttgactcaaggccggtgattgcaccaattcctcctacatgtaagtatctaatgatctaatggtctaatgtggtctaaattatgatttgacgtacaattgatggtatttgtttaatttatgcaattgtctgtctataagacccgttccacttctctgtgtctctgcaatctgctgtttttatccataaataatagatgtaattaacttttttgagccttagaaacatggtattttcaggcctttatagaggttatttgccaatttcaccctacttgatcctatacactaattcattgttgttgcagctgatgcaggttcaggctctcctcccactgttcagttggtattgtccctgttacttactcttgtattacatctataacaaaaaaaggattaaaaacatcaagaaagaaaaaatagagagaaaaatgaatgctaagttttctagataaactcactagtccggtttccaggaagactcaactataccattccgatcggaactagggaaagtttctgtaattgtgagctactcaaaagggctagcgtcacatctgagtggatatatgctgttcctatgcgtgtaaatattgattaaaatcccagccagcaaatgtatattctggtcaaagtcacagaggtggcaggccactagttaaaatgcattgttgctgatttgtgtattctctactgcagaaaatgtaaggggaagagaaagagaaagacaaacaaaaacaaagtttatctttcattaccattttgttaagtcccagtcaattccatttagtgatatgcatcattaaaatgtctccatttctcacaaagttgtttaaatgtgtgtttggagtcctttcctacgaaggatgccaattataaggttacggggatggtagtactaatttattatagttgtttttgcatatatatatatatgtatatacactagcaaaaacttacgtgcgagg

SEQ ID NO: 112271 - DNA, 4510 bp, Cannabis sativa
aaaatacgtgatattaaagatgaaagaaattattttaagaagcaaaaatcataagcatatattgtattaagaatcaaaataagaatatatacttaattaaatacactaggttttatcatccaccttaataataagggaacttagaaacccataagaaaattaactaagaaaagcggtaaactaacactgacctcttcgagcgttttctttggatttttctgtttgtaactctgaaactgtaactgaattctaaaaacttaagtttctatttatagaagggtaaaaggactaatgtgcaattaaacttattacaaattgcatgtgggtaaaaaatgtaaatacataaaagtgaaaccggagtgccacgtggcagtctcggattggtggatgtggtaaacctctgccacgtgtcaagcttttgttggctgaagaaaatagcaaattgtgtcatggatccatgacacttggcgcatgcagaaaagaggagaaagcttcctttttgaagcttggtgaccaaggtgggacgaggcccactcgcgcgcctggaaagtggcacgcacgcacggccaacagaagctggtgagccgcacgcgcgcgtggaaaggctggggagacaagctcctggcgtgtctctgcgtgcgaatgatagctcgccacgtggtgaggctgtcttttggtgaagagaaatgggccggctcctcgactgggctgggcttgtttgctgaatttcattgaaaaaatgccattttttctatactttgacctcatttttatcatcgtgttatttcttttccacttttcataaatactatttttttttcttcaaacacaaacacaattaaatccaaataaaatatttccaacataatatatatcacattaattttaaatgaaaatatttatttaagatctaattaatttgtatttctttaaataaaaacaatgcattttcttaatttctttttatttctttctttcttttatttgtgtcataaaatattattttcttacaaaattaactcaacactataatattttcactataatattttcaaataaaaatatattacattaatttcatgaaaatattacatagaattaattttattttgtatttttacactaataaatatacatttttgactacttaacacgaattagtttctacaaagtcaagtagcaaatcaagttgtctagcccaacaaagaccataaaacatggcctttgcttccatttcttggggcctgaaattgccaataacgggcttggaaagagcaactactacatgtccatgagaatcccgaataacagcacccaggccaatttgttctttggaggaggtagccatggttgatgtgtagccgagccattctgacagagtgcagtaggtgtttctgcacttgtataatgctaaaagttgcgaagataggtcgtaccttttgaagaaatatgtactggactttgtagttgcttaccatgaacaaaacagtttctatccgaccatatataccatatgatgcaaataatcttttccatatcagatttggaatagattgttgaaaggtgaataagaagatccccatctctcatttgatttgccattctgaaatcaaaagaaaattcagtagttctccaaacaactttggcatgatcacaagtgaataaagcatgtcctttggattcccaggcattagaacataagcaacaagttgtagagtttaaaactttcctattaagcaatgatttagcaccaagaagggataattgtaccaccctctagccaaagaattttacttttgaaggaagtttacaatcccaaaatttttctacaaagatgcttgagacatggaacttgaagacagttcctcctcttgtgaagagcacgcactcgagtttactaaatactcaccagttccattataatgccaaacccacttattgttagtagcaagaaaagaaagtggacgggtgagaatatgatctacatcagcagaggaaaaatccaattgtaaaagctccaagttccattctctattaactgttatatagtttgaaactcgactcacagcacaacttgtataatgcaagggaatgcaaattaaaatccctagaatccatggatctaaaatccatggatctgaaccacatataatattagttccatctcccaccttcatttttaatcctttaaccaaaaatcacgccccaactaataccctatcaagttaaagaagacataccccaactaacagccatcataaaattattattaggaaagtatcgacccttaaatacacgactaagaagagtattgggattttgaaatatacgacaagcttgtttagccaataaagtttgattaaagtgaacaaaagataagaatctcataccaccttccaaatggtagagtaaagaaatttctattttttccaatggattttcactttgtctgatgtcgatccccacaaaaatttagccatcaaagtctctaaatgtttacaatatttggaagataatcaaaaacaactcattgcataagtggtgatcgatttcacagtcgctttcaaaagaacctttcccaccaattaaaaaaaaattatgagtccaagcatgcgttaacttccagatccgttctttaatgttgctaaatatttattttttagtctctttcagagtacacgggaaggcccagataagattatggcactcacaaatcggcatacccaaaatttgttggaaagagtttttggcagctatcgatatgttaggtgataaagacatgacaaacttatctatatttaactattatcctgatgcacgatgataaatatcaagagtatgcttgattgctccacaggatcagtctttagcctgaaaaaaaaaatagactatcatctatgaaaagaatattagaaatagttggagatctacaagaaatagccatccccttaagtcgactaatcttttgctcatattgcagcaaatgggaaagaccctcagagcaaattaggaatagatatggagagagtggatcacctcggtacaaacctcgatgaggaatatctaaaccaaaaactactccattgatgaggaatgaaaatatgtttgtgtgtagacacatcataatgagggaaatgtaataaatattgaatctcatttccctatcacaactgcattaaaagaccattcaacctgatcaaaggctttgctcatatcaagtttgagagcggcataacctttggaacatctattcctctgtttcaaactatgaaccaactcaaaagcaacaagaacattatctgttatcagcctatatgggagaaaagcattttgtgtctcagaaatgaccgttaggagaatctccttaaagtgtatgaccaacatctttgagattagcatatagataatattgcatagacttataggatagaaatatttcattgtctttggttttttaactattggaattaatgcgattaaagtcttgttaaaggttgtaggactgtcaccattattcaacacattcagaacaacgttactgacaattgtcccataatctgccaattatgatggtaaacatagctgacattccatcaatacccggacttttttcttgccccatagtcttaagagcagatagaacatcagaggtagtgagttctttcaataaaaaaatattttgctgaggggtaattgttgctggaattgtagataggacatgagacaaagcctaatgatcctcttcaaaattcgtaaaaagactttcacaatatgaagagaccatttcaaaaataccttagttagaagatatagtattcccattctcatcatgaagagctctaatttttttatttgaattcctagcagacacctttgcatggaaaaatttggtgtttcgatctctgactgcaaccactccactctagatccttgttgccaatattgttcttcatcatttgccaaaagttcatccaatatggattcatcgaagtgaacagcctgagagtgatcaagatatgaagtcagattggagtttaaagttttaactctttattgagcatgtgagatatccttcttaagcttaccgaacttatagttgtgccacttaaatgaaccgcacatcagccagacaagacacaagaccaagaaaaatatcaccatcattgttgtaataccaataatagaaaattatatcagaacaatcctcttcattcaaccagattcattcaaaacaaaagcgagatcgtcgtcattcattagcttcttggtgttgagaaaagtaaagttcgaccataatttctctttgatctgatccatagtaatccaagtgggtgatagtgggtgatgctaagttatctttccaaacatgattaatgaaataccaattcaatctctctttcaaggtagatatgtttttcttatttttagcccaagtgaaattgataactctatggtatagagttattttttatgcttttaaattgaaattattgtgagaagagtagtgaaa

SEQ ID NO: 112272 - DNA, 2477 bp, Cannabis sativa
atcaaacaattcccaatcatggtccttgcggatcggatcatccatataatatacaaaaagaaactccatatatttgacatctttctctttgaatgagatctcaattccagcgacggttcattagatatctacaactagaatccagggttgtgcgattgcgaatgggtcgattaggttgatgtttttcttttttaacattttttaatctattaaagatattttaggaatattacttttaattgattagagatatattaggaatattaagtttaagtttttgtttttactaaatattaaaaaaaaatatatttaatcagggccttactcgtgtacatttttttcactcttaacagaatggtagtgacgaactgggataaacacaacgtttggtatttaatccgtcgataaaaaatatggtatttaagtataaaattgaaaacatatggtatttatgccacaaatttccctttataatacattgttattattttctaattttaaatttattattgctaataggattaaaagaaatggccaaaaaaagtaactttcttaatattattttaacgttgtggtactttcatcacaaaaagaaaaattagtatagctataagtaaacacaaagtttaaggattttagccccacattaaaagaagaaaaagtagtattatgtatatttacaaaaaaaaaaatgtttctgtatttatttaagttttggcaatttgctaagtgacttgacggttagaaaagctcatttttgttaagaggtcgtggtcaaacaccatatagttcatgctctttgtcctgcccacttattaactcacacttttcaaagcatgaaaggtggtaattaattatatggaaaagttgatgcgagactttctttgagatggcggtgaccttttgggaggcaaccatttggtagcatgggaagccgtgtgtagacctagatttgagggaggttagggcattggttggaaggttggatatgagaaataaaggactgctcatgaagtgttatgaagatacctgctcgaaggcaattctttatgggacaaagttattagaagccgccaccgctactgcgaacaacttatgggacataaaaagggttgagagattgacatctaaaggaccttggaaaggtatattagacttctatgatgagtttctgcaaatgatttacttcaaagtagggaggggggtcgaattcgattttgggaagatgtttgcaatgggaattcttctttgaagagttcattttcggacttagcagtaatatccatggttcaaaatgtttgcattaaggaattgatgatcagagacagggataaaagtagcatggacacaagctggaactttaagcttaggagatgtttaatgaatagggaaatgccaatcttgttcgaaatgttacaatgttggaaaatcagtttttttattaatatattgtatacctgtaataataactctgattttattgtaccatatttttagagaataagttgagagattcaatgtgtcttaattttattttattttttggaaaaaagagaaaggggccacttgtctgagactggcctccccctgaaatatattgcaagcctcacttaaggcgaaggaaaaccatagtaaacaaaacaggaagcaaaaataaaaacgaaaattattatttaatttgcttccctttatagggattattgtaaatgttatatacattgttgggtagtagaaataaaaattacagaaaattattaccctaaatctgtcgactcggtatcagagccaaaaaaagaaagaaaaaatcgtactcaaccctaatcgcaccatgtcagactccgagtcaggtacaacaaaaaaaacaccatccaaactaattccaccttactttctaccaaatctacctagtctcactttgtccatatcactaccattcacttgaaaggagaaaaccttgtaagatgctatcaatcggtaaagatgtatatgaaaggttgaggaaaaatgaaatatttgactggtgaaaagaaggctccagcagaacctgattcaatctatgaaacttgggatgttgaaaaaactatggtgatggtctggcttgttaactctatggaagaagagatcagctccaataatatgtgctatcccacatcaaaggaactatgggacaacgtaattgaaatgtatccaaaccatgaaaatcaatctcaaattttcgggttaaatatcaaacttggagaataaagcaagaggaggccagagttacgaagtactttaattctttaaaaagaatccggcaagacttagatcttttcgatacctatgagtggaaatttgttgaagatggcaaacatcacaagaaaacaattgagaaaacccaaatctataagttcctggctggtctcaatgttgagtttgatgaggtgagggggaggattattggaagacagcctctacctccaattggtgaagtattc

SEQ ID NO: 112273 - DNA, 3931 bp, Cannabis sativa
atttagtgtaaatttactacaaaactactttttgtgccgaatatagcacaatttttacgggataattagctaaatgaccttaaaaaaagttattaactaagtaaccttcatttctaaaaatttagctacactaaccttctcttttaatgaaacttttatgtcacaataataccctttagtattttatatttgtttttaattaaaaatagaacaaccatatcatgaaaaaaaacagccctccccctcacatggtgttttcatactctttctctatttttcaaaaaatttctcaaaatcttataaaatctcttcaaatttgtagaaaattaatttataatacactttgttaagaatcttgatgataattaatcatgtgctaatgatccctattttgtattgttaatggctgtttagtttgtgcgtggtcccttgtgtaattggataaattctgttatttcttttctttgctttgtggtcccgccgtgtgtggcattgacaagtgtcctttgtgtatttgccttcctctaccttttgctatttaatgtctgtactgtacctcagcacctttgagctaagttttcatcaatatagtaaaagtgtcatttctttacttggtatcagagcttgatagctcacgctagaatgtcctctgggaccagtcatcattctgaaactctgcctatggcaggtgcagggcagagaaaccaaccaacatagcctgcagtggctggaaatcacggaacatttaaagctcaagaccaacctcaaaccagctccccacaagtctataatggagttcaatactcaggttttggatctggtggattcacgagtgcaccctttggtaatactctgtcttaaccttttgctttaaagctagatcgtaataactatattttgtggaaaaccatggtgtctacaattatcagaggacatatgcttgatgtcttcatcaacggaatgaggcaagctcctcctgagtttgttccaactggagtagcaacaggtgatggtcaacctggatttggagtgcgtatgaatcctgattatgagcaatggatcgtctgtgatcaattgctcttgggttggctctatggttctatgatagaagccatagccactaaggtgatgggctgcaccacaactagatctctttggacatcactggaaaatttgtatggggctcattccagagcaaaaatggatgatctgagaaccttactgcagacaaccagaaaaggttcaacaaccatggtggagtatctgaggcaaaagagatcatggtctatcaacttgctcttgcaggtgatccataccctgaatctcacttggtttcaaacgtcttaagtggattggatgttgaatacatcataatcgttgctcttatagaagcaaagaaaaacctcattcatgtcacttggcaagaacttcaggagactatcttgagctttgacagcaagcttgagagacttggaggtattagatctacaaaaatccagaatcccaacaactcctcttcaccatctgcaaactttgctcacaaaccaaaccaaccaaacaacaacaataacagcagaggaagaggctattcatcaaaccaaggaaatggaggaagaagctatccttcaaatggaagaggaggcagaggtggaagaggcagaagtagtggaaggaattccaaaccaacttgtcaagtttgtggaagatatgggcattctgctgcctactgttacaacaggtatgatgagaattttatgggaactcctccaaacacagcagctactggttcaggtcaagagaagaaggatccaacagcatccattgccacaccagaaactgtggatcatgaaggctggtatacagatagtggagcaagcaatcacattacaactgatgcagatcacatgagtcataaatctagctatggaggttttgaaaaacttactgttagcaatggtaatcaactcactatctctcatattggaactggaaatttgaaatctgataatggtgaaacattgattctcgaagatatgctacatgtccctcaaatcaccaaaaacttgattagtgtatcaaaattaactactgataacaaagtttttgttgaattttattctgactcttgttttgtgaaggacatggaaacaaagctggtggtgctacaggagaaactcaaggatggtctatatcagattcatggtccaaacatcactcacaaaatcaatccaaatgccttcactgcttcttcaaccaacaattagtcaactctagagtttgtcatttctacttcaagtcctttttctgcttttgctaagtctagtgtgtcgactgttgtgtccaaaagagatttgtggcataggagactaggccacccatctccaagaatattgaatcaagtgttgagtaatgcacatgtacaacttcctttgaatgaaaaacagaaattttgtgaagcttgtcagtatgggaaatcacattctttaccatttaaactttctaatttcagaccaaaagcaccacttgaattgattcacactgatatatggggaccagctcctgtgatgtaaaacacaaatctaagattttatatacattttataaatgactatagtcgacacacatggatatatcccttgaaaacaaaagccgatgcactaaatccttttattcagttcaaaacacttgctaaaaactagtttgacaccaagattaagcaccttagaactggctggggaggagaataccaagcattctccaatatagttaaagaatgtggcatagcttttgatcatccttgtcctcatacctctgctcaaaatggcagagcagagagaaaacacagacacatagtagagatgggcttgacattgttagctcaagcatgtatgcccttaaaatatagggttgatgctttccaaacctctgtgtatcttatcaataggttgcccacaccagtattgcatggaaaaacacctcatgaggtgttgtacacaagaaaaccaaattatatgtttttgaaaacctttgggacagcctgctatccttgcctaagaccataccaaagtcaaaagtttcaattccactctactaaatgtgtcaatctaggatatagtgagtcacacaaaggatataaatgtctgagttcgacaggtcggctttacatttctcgaaatgtcatcttcaatgaagatgaatttccatttcaacatggttttctcaataactatcaacctgaaaattttgtcagtgtcacaagtccaaacagctggttcactcttcctattctcaagaaaacctcagaaaatactttgccagctgaaaaccaaaatacaaaacaacaatctgatactagcagtgcacaagttaaccttgcagcataatcagatccttccatcagttcatcatccaacagtcaggtagatttaacaggacatttgtttgttgacttaaattttgatattgctaacccacttgactcaaacactcaagcaatacaaggtgatgaagaacagaatgaagacagtaagcctaaagaaactgaaaacagcaaccagaggtcaaaacatcctatgatcacttgatcaaaagctggaatacacaagccgaaagtgcatctcaacaaaacagaatggaaagaaaaagaaggagaacctagttctgttgctgaagctctaaagcacaaggggtggtctaaagctatgtcagatgaaaacttggcactaataagaaacaagacatggatccttgttcctccttcacaagaatacaacatagttggtaacaagtgggtgttcaaagaaaaactcaatgcagatggctctctttagaggctcaaagccagattagttgcaaaaggttttcatcaaaggcctggccttgactttggtgaaacctttagtcctgtaatcaaagtgtaaagcccgcttag

SEQ ID NO: 112274 - DNA, 4321 bp, Cannabis sativa
acccgaaaaaattacaaaccgcccaatctgttaattgggcgggttgaaaataggtccaacccgcccaattaaaccgaccaacccgaccaacccgattatccttaatttttacagtataagttgagaaatatctttttttttttgtattcattaatcaataatactcttatattatattttattaaaatatacttacttttatgagtgagtgacctaatatactttcactctctacttaagtctagcatataatttacactaatataagaaatctaataaaatctaataaattaaaacaaataaataaagtaaattagatataaaatgtaatttcttttaatttttacttcaaaattaccatgttttaaagcaaaaatgaaaactcattgtattctaagtaaaataataaaagaaaaagaaatgggtttccatgagtgaatttagtgatatttgagaagagagagagagaagaagaagaagaagggaaaatgtcgtttacattgcgaagcgtgaaggtgccgcccaattcagcgaccttggaggaagctaggcaccgtgtcttcgatttcttcagaactgcttgcagatccattccttccatcatcgacatctacaatctcgacgacgtcgtcaccgtctcccagctccgttccactatcgcttctcagatccgcaagaactctcactccaccaatcccaaggtctttctctttctctttctcatttcatttgagttttctggctattattatgctatatttctgtttgagaatcatgcctgtaaactgtttgatggagtgtttgttagaaaaaattatggaagaaggccatgtttgtagggtttggtaataggaggagaaaggtttttcagttccttgctgtatgtaagtttgattaaatctttagataaatttaaagttctcgtttttatggaatttcattacttgtagcttgttctaattactcttgaaattgcaatgataacccattgagaaatgaaacaattcactcagagacagaactgaaatttgtagtgagcttaagctacatagtttttccaaaattttatggggcttaggtgctattttttgtaaggatatcttttaaatggaaataaataaagaaaaatcaaaatatagatataatttgagatcagtcttcctaccaccgactttgttccatgaaaaaacttatgctaactaatcggttgcttgaccttctaattgttgtattagtaacctagttagcgcatgtttgggatgctgggcaagccaaatgattaggttaggataaaagtaatatcaccttggccaatctttcagttagaagcagatagatagcacatcagtcctgttgggtataagtataacaactcttcatcttacatttcttctactttttctttttactaacaaaatctatgtttttattgcacaatgccgatgacagggtttcatttgtattagttaaacaaaaattgtatcctttcattaaatatgcccaacacaggataggattattataccactgccttgccttggcttggcttggggaactgatttttaggattagagcaattctatgttaggacttgggataaggggttgtattagctatgatagctggctgtatggttgagtatagaatgttctagctgttgagggatataaatagggaaagagaggttagtagtgggtgtggaattattgagtatagaatcgccattgttatatctgtgttcctatctgtctacatttcttgtgtttttattttacgatgtttcatatgttggtacatgtgcaagggttgaacttgtagccgcaatcgtttcataattcattatatgattataaaaggacaccttatttctcttcctgtaaatacctttttgacttccagtaagatttctttctctaacgttcagtcaatctgaggtggaatatattaaaatgagactcaatagaacatgaacctatatttcactagttagttttatataatattgagttgtgttctctattaaaattcacccagaagttttattagaagatttgcatgggggtagtatttggtttttggagaatttatgggtgagtgatttgactttggctgatagatttgcatgattatatatggttgcaaactcaaagaacgactttatagcactgtttagagaaaataaggatatgagtggatctacgggtttctcatgtaatttaaagtttattagaaaacttaaatgagagagctttacacgtttcagttttgtcagtggtgttggatcatttaaatgttgcactttcaagttgacaagatgatttggagtttggatggctcagaagtgttttcatgtaaatttatttccatgaagttaaaaaaattggaggggtctagccattttaattcatgtgattcatatgttcaaaataaaacttattttgatagaggggaaatacaacgagatgtagttttttcagtttacaataagatttttgacccttccatctaagtgtaataaacctgtacagtgttgagccaagcactacaccaacttaaaatctacaagcacttaaaaccatagatcacacaaactggcaatgtgaaaaacggtggtctatgatctcattatctgccttacacaagacaccatagcaagaagtgacctcaatactcttgactttaagtgagctcttccaatggtccttgtccagtctagactttgacggggtttttccaaactaaggtgtttcaaatgcagttttgcacgggcgtatttcagactggtccttcttagccaaacttttctatcttctaggataatgcagaaacaaccatccctcaatcaactcagcagctctacaagactgaggacatttctataattcttctgttaattggtgcattttatgcaaatagaacatgagatgtttgggcgaaattcgaggtggatggtataggaaggaaatgggatgtttgggaagaaaacagtgtggaatgtgggtagtgggtacacttgctattacctgggccattgccatatgattagagagataaaatatagaatcttcaatgatatgaaatctgaagtgggtgctctttgtgatagggtaagtatactgtattagggataaagtatcaggtgtctgtatgggtttcaatactagggatgtcaattttttccctttccccatactcaatgagtggtcattatgtggttttttgataataagctattatatatatatatatatatatgaaactaatgttgaagaagaaaaatggggacagtgttgctaatttgtaatggtataaatttgcaggtgattgatatgcttcttttcaaggcaacagaagagttgaataacatcttggagcatgcaaagcagcggcaccatctcattggacagtacgtggttggtcagcatgggctagctcaggatttgaacttcaaggatcaggcaacttctcctttcctcacaaatttttacaagagcaactacttttgaacaacttcctttctttactgttgttctcccatgggaatttttttccttggggagtgaagttcctaaataaagatgtgtttgaatttgcttttatataattctggtgaacacagaccattcaatcttcttcttcttctttttgtttggtggtctctaagtgaaaagcatatccttacatttgatgaaaccgttttgttttcctacaatacaaccaattttctgtctcttctagtgctgatgaagacatggtaatttactaaattattatatgcacttgcatatgatgctctgctgattcttttgtttgtatatatatgcctaattgtgggattcaattgggaaatttgattatttatgcatactaattgggaaaattaattctctaaacttaaacatttcaaaattttaaaaataggtctactttacattaaacccaaaaatacccctctcatttttcaaaccccacttctttctctacacctttgttctctctatctctctctcttgctcgatttgttgaacaggccccttcaacatcccaacccacgatgaaccaccccgtagaccccaccgacccagggcgcacccccaaccaaattgtgttccgttttttagtttttattgattttgtttgtgattttagtgttaaagatagattttgtttgattttgtttgtgattttgttagataggttttaaaatctcagatctgtgattttggacaaaatccaatggggtctgttgtagttctgatgaggttcgatagggtcgaatgaaactgtgagtttgcgaggtaggagacgtaagtccgatggg

SEQ ID NO: 112275 - DNA, 4227 bp, Cannabis sativa
actttttatgccatatttatcataaccttaataatttttcccatatttttaaaaatagcacattgtataatcacattttaagcagaggagatattgtttagtacaatttagattcgattgggcttccaaaagcccaactgagtggtactgagtaaaagtaaaaagttatggttcatcagaccctaaatagacacgtgtttgatataaaacaaagtaggatggaaatcccatgaaactcagcaaaaaataaaattaaaaatgagacattattattattagctagctcaattcaacccttttccatttcttctcttccgcagctctaatctaatctaacccaatgaaaccgtaaaaaccaaacccctcttcttcttaccaccaccgcaatccaattccaaaccttcccttatataattacaaaaacaaaatatactcttaaattagaaaaccaaaccccattaacctctctctctctctctctctctctctctctctctctacctcttaagaattttccccctttatttaaactcttcccagcttcttcttctgattctgcttcaccttgattcttggtatgtcctgactccaatcccacttttattttttcaatacttatgaagaattcgattcgtttcatttttctaggttgttttttttttttttttaatagatttatgcattaaagttttatgttgtggattatctggggtttttgcgttttaccctttacttggttactgggaaaattgatgaaatgaaattcatttaaaagaaatttagtcagctttaaaccctaggttggatttggttttgattgtagataactagggatgaaaccctagtatagttaggtcgctgtatatactgggttttgttttttgagatgagattgagtgagttcatgattatatttttgaagaaaccttatgtttcatttttgtatgtgcctgtactagaattttgagtactaaaaattgctgttttgatttttaactccttttttttgtttgtcttatagcactaaacttttatactctcaaattttgctgagttgattggcttcattttccccattatttagttctctaatcatagaagtgaatgaattttaaaatcttcccttgcttttttttctatgtttgcatggcaagtttttcgattgtatcaaagctgaggaataggtttagtgtgtctgtttcatggtttgaaacttggaatagaaaaggttaaaagaagagtcaggactgagtgttgagatttatttttgctggaaactggggagtgagtaacttgagctatttattttaatgatgtttttgacaatttttcggaaacatgtatttgaacatttcatttccaattgggtttaatttcttaacttttttcattgcatgaataagcacagtggttctattttttattttggttttgtttgttggtaattgtttgcaaaatataatctgttgatttgcagagatctgcatttcctggaacttcaagaccactgagaattaaattctagtttctttttgacatatttcgctaatgggggatgcggaaaatgctcttccaccctcgaagaagagggctgccggaagggaaatctctcgagataacccaggtcttgatgatgacgatgatgtttccgagcaagaaagtggaacattcaaaagagccagtgaggaggtcttggcaacaagaagaatcgtcaaagttcgtcgacagccctctgctccctcttccaatccttttgcagggatcaagttgcttcctacgacagaagcacaaactgctggtgagaaaacagtgtcaggtgatgtagatggacagccaaaaatcagtgctgagaacgagaagggtaaagatgatgataataagcagtctgaagtcaaggataataatgctgaggtgcaagtggagagtaaggctgaggccaacatcgagggtgaggttaatgcagaatcagctgcagaggagaaaagtagtactgtcattgatgaagtgaagccagttacagataatgaaccagctctaagcgaacataagactgaaaacgatgagaagagtggggatgatgataagaaagatgagaagactgaaaatgtggacccaagtggagaaggtactcctttgagttcatttcaacagctttcaagtagccaaaatgcttttactaatctttccggaactgggttttcctcgtctacattttcctttggctctattgcaaaggatggatcatctgcatttggcacaagttctgtttcgctttttggatcgaaaactgatcaaccatcttttggtcttggtctctctaacaatggaaactcttcccttttcggcacatcaagcacatctgctgctgtatctaagagtgaaggcagcggtttcccatcaatgcaagaggttgaacttgcgaccggggaagaaaatgaggaagttgttttcaatgcagattctgccttgtatgaattcatggagggaggctggaaagaacgtggaaagggtgaactcaagatcaacgtttcaaaacctgacaaggacaaggccagacttctcatgagaacaaagggaaattaccggttaatcttgaacgctagtctattcccagacataaagctcacaagtatggacaagaaaggcgtatcctttgcctgtgtgaacagtaatagcgaaggtggaggcggtttctctacatacgcattgaaattcaaagacccttccatagtcgaagagtttcgtggtgctgtaaccgcatacaaaggcaaggcttcttcggatgtgaacaccccagagaattcacccaaggctactactgatgagtgatgagttgatgatgatgatgatgatgttcatttgcggatatttttctgtcatgaaggtttgccattattatcatcctatggcaaccgttatctttcattgcaaacatattattacaaggaagctgtttagaattcgggaatgttaaagcaagccccttttgtagcagagtcatagacgtggccttttctttttgttgtagcttaaatccgttctagtattttgggaaagttttgaactttcagactgagactgcatagaaatgtttgacacagttttatagctggcctattatcattattattattattattattatgagatatatgcatgggggagactagtattattccttgatatgaaaattaagtacactcctcttttatagttaaattaaattaaattacatatcataaaggaaatttgtgaaacaacccaggttttttgtttggtcattggttcattggtgtgattgattggactggagagagtgagctcctgcttttgggccacagatgaaggcacttattaatgtaactggaccaaactcagtaccccaaaacttttgtgtgtttgtttgtgtggaccaattcatatagagtcaatagacaaacagtgtcatgctttaggaggtccccttttatataacactgcatattactatatgacaatatatgtgtaattgattacatgtactggaaaattctttggtaggagtgtttttgaataattaacatggttaatgaagttttacattttctattaaaaaaaaaataataataataataattggagaacacaaaagatccattcaagtttgttatttactctaaatatatgcacaactaatttattatgagatgtcataaaatatggatgaaaattgttaagtaaacttgtgaaattatataataagtatacatcagtgtaaaacataaataaagcaaaattgaaggttaaattacaatcaatcgtaaatataaactaaataaaaatgaactactctagactccacatctataaaatttacttaaatgattgtaagtgcctttacaaaaatattatagcgaaaataagagttcaataaactacaatatacactgtaaattcacaaaatttaaattaatataataaagaggaatagaaaatcagagtctccgaatctttattagaatttttaagataagcaataaatttttaacatcatcaaaatattaaattttttttataagtagtaaaatttaattttaacaaaatacaattgaacaataataatatatataattacttttaatcatataaatatctaggcctgcacatgggttgggttgggcggtttttgggcggtttggcggtttttttatttggcggttttttaaaatcacaacccatacccgccca

SEQ ID NO: 112276 - DNA, 1215 bp, Cannabis sativa
  modified_base (27)..(39): a, c, t, g, unknown or other
ttccgtgaaatcgtatttttgtaattnnnnnnnnnnnnngtgtatttgtgaaattatcccttcaatttaagcacacaaacacaatatgggcttaagacaaatttgattttggggcattctaaaatatatgtaaaaagtattgaaaaagggtgttataggatttgaacccataacattgtatgatatatcatacaccttaaccaactaaactatgaatatttttttattttttattctggccccccgaaaggtgtgggctcaaggcacgggcctagcctgcctatgcctagggccgaccctagtctctagcaccctcctaggtactataatgctatttgtgtaattaagtatcgggttctatataaattaattaaataacttttaaagaatatcactaactatttacatggtgacacctctaaatggtactaggcaccacaatataatcatttgacaaaagaattctcattacataggtttttttgtatgagtatgttattaagtatacttcttttatggtgcatttaaaaaaatacattcgaggtggaattgtatttaaatcatgttaagtactaagttttaggggtgtaacacgagaactttctagaaagtccttcattctaatactactttcatccaaacacgcttaattattattaggttaaataaaaaaatttattattaatttttacacatttgtttaactaaataattacataattaattgaaagtaattgaattgcactattataaaaagtactattatcatcagccaacacgttggtcaactattgactgacacaattgatcacgggagagaggagatgtccttccttaatcgacacaattcagtgatcaattgcaacacaattaggtgataaattgtgtcggtcagaacactcacagtaagagaaaagttgatgggattgagtgggagttttttcaaaaaaaaaaaataaacaacatatatgttggttgatcacagtcacaaaggatggttgcacctctgctaataaccccctcgaagggatcagatcaattcactttgattgtcttctccaattcaaatttaggactggccattttctctgttattttctccgccccaagctccctccgcaaccttctttcttactctctctttctctctctcatgaatgattgtattgttgattttgtgtgattgagtattgttagatctgcaattgtgtcctc

SEQ ID NO: 112277 - DNA, 5076 bp, Cannabis sativa
tgtcccaggctcccagccacagctaccatattttacgagatttgacaatgagtttttgacaatctctcttttaacaaaaatggtgagactaacatttgggagaatcatggcaataccttcttgttctccaattcaacctcatcacttcgtctccatctctcgacctcactttccttctaaactccattttcccatcatcttcgccagagccttgtctgtttctgcctctgccgcacagcctcaaaccgcaaattgtttcaagagttttgatggtgatattcaaccatacctgcgctgcaccatgcctcataaacacctcaaagtcgccgttctgctcagcggtggtgtcgatagcagcgttgctcttcgcctcctccacgccgccggacattcctgtaccgccttctaccttaaaatttggttccaggtacgttacttttgccattttaccatgataaatctctctctctctctctctctcttgagtataaatatacttgggcttgttttaatctaaaaatgtaaataatttatctggggcaacagaatttcgggaaatttcattagattatgtaaataaaccatgtttattgatgagttgttctgagcttgaatagcctaatgggtggtcttttgtaggaagattttgacaacttttggtcggaatgcccatgggaagaggatttgaagtatgcaaaagctgtttgtaatcgggtttgtttctttaatctgtaactttatgtatgaatcattgggaccttggttttgttgcttttttacttacgagccatgcagaacatataaattattatggaaactggcattttctttttcagattgaagtgccactagaagttgtgcatctgactgatgaatattggaagaatgtggtacgaccaactcaccaatctttttatacttaagttttatagcttcttcatcctctctatctgcatacaatatatttatgtatgtttatatatgaatataatataataaacatatatatatatagatattatagaatcatatgatcttatccatgcatgtaatgtctctccttcttgtcttttgaaagaacaatattttgtttcaacacttcatcctttatggacttcttcctacataaaatattactgtataacacgaaggttggtgttccattttgggtattagttcataataatcttaacttaaactataaaagtttccttgccttgaaaattaattacaaattttgtcatttttatgctctaggtctcctacattattgacgagtatcgttgtggccgtacccctaatccagatgttctatgcaatacaagaataaagtttggtacgcgttaaatagaggtttaagatgttatattgtttatgactcaaaacattgtttgaacctaagttattctcaggtgcattcatggatgccatcaaaagtatggactttgattatgttgcttctggacattatgcgaatgttgtccactcatgtacaaatcaagtggatgatgattctattttagagctatcacaggatatggtacttatgaataacataattgctgaattctaacttctgtgtatctgttccttgcttatggcagtcaccttttgttatgctagatgcatttatggaatctcttcttgctcatggttaaagaaggaatctgtttcaattttcagaatttacattttgtgatgataattttgacatatttctagttattttgatttgttttaggtacacaccacattttcttaaaaaaaaagatcactaactcttgatgtccttaacttctaaactttaggtgaaagatcagacatacttcctttcacatctttctcaggtgcagcttaagcgactaattttcccacttggttgtatctcaaaggttaggagctagttttatatgtatggcattgctatcaaattcaaataagcaacatctcttgattttcttgcattttaataaaagggtatcattagctgtatatgcaagaaaaaatataatgttcaattgagattcaactttcaagaaagtacacttgctctgtgccaacttctgtgcttttaattttcattgtgggagtcctgcattgatctttaacttccttttctgtttcctccatgtaaatttcatttacaggaagaagttcggaagcttgccacacaatttgatctgcctaataaagacagaaaagattcacaaggaatatgctttcttggaaaggtatggtgtgcaattctggtttagatgatggcaaagactggaaattatattttagaatgatattttactcacttggtctctctcgtgtgccaagctaaattttttgggtgaacatcaatcggggtgtttacggattggtttggtccggattttcatccaaaccagaccaattaaatgatcaaaccaaaccaaaccaatccactaaaaaacgaattggtttggttcaaaaccatagtttgtatttcgtagttgatctaaaacttttttacaataattgttcatttttttggtaattttttttacttttaataagtttgtaatacataaataacaataaaaaattattatcataacaatattaattcaatatcaatagcctacctaaatttgttctcaaatatcaacatttcatccaaaaaaaaatataaattaagtatatacaaaataattatactactaccgagatttctagtcattcacaccggattcatttggtttggtctggattggttggggtttggaaccacaaattgcgtattctataaacatccctacatcaatgggggttgatgcaatgttaactttttctctcttttctatttttttagataaagtttagtgaatttgtcgccagacacataggggaggaggaaggtgtcatattagaagctgaaacaggtgattttcttggaaagcatcggggtttctggttttatacaattggtcaacgtcaaggtttacgcctaccaggtggaccctggtatgtttcttagtttcaataatcggatcactctttagtttatccaatgtagcggtagccattgttttgtagcgagatactgatagatttataaatttcaatgaaacagtcacaattagggaaatatggaaggaataatctgtggtattgatttaaccaataattcgagatcttggttctctcccaaaggattataatccactattttctccacaccctaaaaagactctactattctatttattcttacagtagacctcaccatactagctgcaccctaggtacacaaacactcagcccatataactaactctgctgcaacattcccctcacctgaatctctgttgctgacttggcccttttctctgctcctccttgtgcacacatacgtgaggggtggcttatgagatacctctgtagactgagattttgtcatgcgagttgaagaggccatatatatatatatatagatatacataggcaggctattaatatacacattatgtattatatttgattacataaaaatcacatgttttatttgaatttaaaatttaaaaaatttagaatttttattctttctgccaaattatccatcttttttccttgtgcaggtatgttgttgagaaggatgttaaaaacaacgtagtttttgcatcaagaaactacttttcatttgataaaagaaggcgcatttttcgagttggctccttaagatggctgagcaggcttggcacagatcaaacctgtcatctgcagtgcaaggtagagaaaccaatttctggtgcatctcattgtcctttattcaactagtttcaacatggcaagattgaattgaagactaatctctctcatacacatacaatgcaagtgataaaaatatacttgtttgtacaaatgtttcaggtcaggcatggccctggattttacaattgtagcttgaccatggaatcaggtgaaggttgtgatgaagatgttgcagttgtacaattatctgaagatgatcaaggcttggcagctggacagtttgctgccttctaccaaggaaagacctgcttgggttccggtgtaattttggagtcttgggatgacaagggatttcctgtatgtgccaaagctctcgaaattgcaagaatagaagataagtctcttctcggaaaacccgtaaagataaaagtcaaacctcccttggagcttgatcaggaagttggtagtacagagcttaacaaggaacataaaagttctcaaatcgctgcagccaaacgtggcaggctggcattattcccgcctatcaagtggctgcaacaatttagagataactggtttaggatattctaatttgtgccaaggagagcataagtatagaatagatttatatagctaggacaaccctaggaatgatatttagtaatgtacttttgttcttcaaagaggtcctcaattgatgtataattaagtcattttgtaagtgtactattacttcatttagttattgcttaaaaaatttctcacatcattttgttatcaatacaatacgttgagtttgaattgtaatcacttcatgtttaattattttcttaaagtttcaatcttttttaactggaagatgacttatctcccccaagattattcaaatgcatgcaaaacaaacagtataacttatttcgttcactttacataaaaattgtgtaggttgaaaaacagctcttaaaaggtataccttatttcattcacactttacgtaaacaaaacatatccccttgaatctctaattgaattgtctagagaattaacatctttaaatttgattttccactaatgtaatatatacttccatcataaattggagaccagcttgatcgtaaccaaacagaacccatacattgaatcaagtccatccaccctcatctttctttagtcaattcccgaaaacttgtcaagcttatcatactcttccatctcactccacttattccagccactttccatctccgcagcttctttgctcaccaatacacagattctacaatggttttgtatgttcgaaaaaaggctgaaatagttttctccttcaacgcttcacgt

SEQ ID NO: 112278 - DNA, 4540 bp, Cannabis sativa
aagagatgataccaactataagaagaagactcaagaaaatggcgcagatcattttggagacccgtgtagagaggctctcatggactcggtggacgtagtagcgagcggtgtggtggcgcttcaagggttggggttggttctccctattgttcctttggatcggtaaacggtccggagtagagtacattttttttttggattgaggagttggatcaattttgatatttttttttggataagtagagtttatttgaagtgatttaatgcatgcaaatagagtagtgtttatagagttttatggttttatgtatgtcaatattataagaatggtggagccttgaaggagaatggagatgagacgatgaaggagtttaggtattttgcatgggaaagaaaggaataagcatatatgaatatgtacattacatcgttgtttttggatacatacctacgcaaaatgatgcgttaaagtcactttacataaagtgcataacgtctgtaattttacaagtgtgatgattaattaactcgtcattattcttatttttatcttttatttatgatcaaacttattattaaacatatagattaggttcatcaaagtaattatagtgtgagaaattttacgggctaagaatacgttcgactgttccggcctccacccaaaatttagactaaagaaagaaaacacgatagtttaagtaagcaattctagttattcagatctttttcagataatatagttagttaattattagcagaaagcaaattttgtagctgtaagttgtgagtggattacctattacattctctaagagatcattttagtaattcagatcttttttagactatattcaatttttttttgaagcatgcatctctaatttatgtttattgtatacataaattagcacttcttgcagtcaaggtgaatggtgaatggtgaatggtgaattaatttgaatggatattttctcattaaactcaatttgtattttcaatgaatgttcattgttgaaaaaaaaataaacaccaatcatcttaatcatagagtagagagtggaagcaagatgtttaagtgatcggtctcttgtaatcatattatagaagcaagataatgatcgctagtctagctaccataccaatccaagtaagtcatttccaatccctgaaaagtgaacaaggtaattataagctctagtatattgctataaagtatccttaattatgcataacatcctagaatatatatgtatggttattggtttaatttaaaagcgatcccacatataataatttcaaattaattatgtgaaacatgatatgtacaccaatcaaatttcactatatataattaagtgctatacacctaataaaatgtttttgtttagtataaatacataaatatttgaaatcatcaattttttattatttttctaagatccatgtttgagtgaagagacaagaggtttttctctttctttggagtgaagaggcttattttgcccttattttgcagtccattagtggacccacgtgtcttcgatatataggcgtggcccatcaaccaatatggtggagggtttgattgggcatagatccagttaggcgttgggcaagggaatcattaaggcccaacttcaaaatcttagtagatagcttgtgtggcccaaattattcattggactggcgtagtcacaggcttttggattgggccggttaatatattcccggtcactaattacatgcgtgttgcaaaatcttacgagtgatgtttggtcgaataaattttataaataccatgtatgtacctaagtacgtggtcattagaagatgttaattattcttaaaaatgttgttaatatcagttcctcaatgaattctttcgctttaatgtataataagatcgatgagagcaatttaaaaagaaaaaaaaaaggttttcatgaaacaataatcgaatcaaatcaagaagttgcgtaatctgttaatagaataagttggaattattgtttgttacacatgggtgtattaatttaaagtagagacatgagataactattttttgtttttgttggtacaaaaatccataatatattagccactatgctgcatgcagggaccggactagctgttgtacgtaataaactatttccttatacggttgactgcatgaattacgaaaatgatttattaattattacacaaaaagtcatgtctattaaactagtatacttaaacaatataataataagtttcctttttggacgtgcatgtatttggaaaccataatatattaaatatattaacttagacgcgtggccatctactatacaaactagattgatgagtgtccaggcacgcaccaaccaaatatgcagcttttatatatttggtcacatggaggtctcgcgcgtgtgttttacctaatcaataaattattaagctgctattattgctccctcaaaacaaaatttatatgaactaattaattttccataataaccgaactcatgtacgtcatcgatcgtttacttgaaactaaggtaaattgtagaaatttagtataagttgctgtgaaaacaatatactatatataaaatgaatatgatattctttttattaattaattttacaataggactgcaggtatataatttcaacatttatcgcgatattagagtcgaattaaaaacttccattctctcttttaacttttattagggacttgaaattctttcaaatatcactacattattaaatatataagatgaataagttatttttttcttttatcaattgaactattcatcttattttaaattctaacaaaatgtttatctgttttataagttttaaatatttgacttttcgtaccaagtatatatgtatatgtggaagttaactctacttaatcaattcaatgaataaaccaataattgacgttaattaattaatttgatacaatataaaagaaaatttgccccctcctactacatgcagtttaattttatatagataaaacctctctacgtacgtgactggtaattataattaaggcatatatactataagtacgtactactatgccaaccttcctttctctaatttgttatcaagtatagaagtgatatatatatatagatcattagtaattactagatgatcatgattcatgagatatttttttttaaaaaaaatgatgatcataagaaattatatatatttttcattaatttgctatacagtcatgtattaattacgggattgcgatcttttaatgcatgtcaaatgaacaatattattcccgtaatatactctaacagctttgctagagttagtaataatttagttgttcatcgtgtaaccactattatattaattatataatacatgtacctacaccaatctcgctcgtatataaatatatatatatatatatatattttttaaaatgaatattaatttttagacatataatacaagtacatatttatatatgttatatctgttattgatcttttaataattttttaactactgaattttcaactatctgcatattgtataatattatacccgcggaccaattaaagaaaaaagactatcatgatacgaaagctcaaatttacttaattcattgactttaaactttttgattttttatggtaataaaagaggattaatttttattagaacaaaataattctgtttgctccgtgaaattttttatttatttttattataaatatatataaataaaggtctcgtggacataaacttttacattattaattttaaactactggattaaataaaatacaaaggtcaatgtaaaaaatattgtaattaaatttagttataaataatcaattaaaaaagaaaatataagggtcaaaacttgtctccctaattaataaaaataaatttataaaattgttatcccaatttcgacccattgccgcccctagctctcggcccagaccttaactcggacctcacgctagtcgcctcaaaccctagattgaatttggactctgactccaactcagactcaatcctggtccgactgctggctttcgaatcgaccttcactccgtgctcgaatctcggaccccaacccagcccagaacccgatctatgtatattatcactaatgtacagactgtacagtagattcgtataagagctctaaccactcatctgttaattacactactaaattactgatccaacatatatgccacgttggaaacggggttgtgtgttggtacttggtaacatgtccatgttgagcgctttcatttttttgttttataaaataaaatatacataacgtgcattgtggagtcatgacaaataattggttgattttatctggtgctctacagtttcctttagttacgggtcttaaatattatctcttaattttaataaaagtaataatagatctaattttagtttgtattaagataagaattatattgttccatcttaatattcttcctcaagattgactattcctttttttttttttttt

SEQ ID NO: 112279 - DNA, 2484 bp, Cannabis sativa
  modified_base (31)..(37): a, c, t, g, unknown or other
ttttagaatttatattaggatgttaatgaannnnnnntggtagtaaatctagatcctgataaaatatttccaacactttgtacatccaccagttctcttcttttatgtatacactatgcacccatatcatccatagactttcttatttatttgctactgcccatatgtatttatatattgctgccttgttccattctgccagcttttcaatttcaatgcctccagcagccttttcttgacaaatggtatcccaagcaatggatccaggaccttgaaacatagcctgacccttccaaaggaaagcactgcttatagcttctatattcttgatcactttccttggtaaaattataatttgactccagtaggcatgaatggctattaagaccaagtttatcaacactattcttcctgcaaaagacaaattccttgaactttatgtcttgattcttgcaatcattttctcagctaagataggacaatcttgacctgaaatcttctttgcacatataggaattcctaaatatgtgaaaggcatgtcctgttcagtaaaactagaagcttgtaggattcgagttacctctgtttttgacatgtattgcaataaattgcagatttggcagcattaggatggaggccagaagtcatagaaaagagctttagaccttgtaacatgtagtatacactcttgaaatctcctttgcagaagagtaatacatcatcagcaaaagctagatggttgagtttgagatctttgcacctgtcatggaaacagaagcctattccttgtctccgatatttattcagttaaattctaaataaatatctatatagaatcgcttacagatatttcttcaaatatttaaatattattattttaatatttaaaatataaatatttattattattttattggtttaaattaatatatcagtataatcttaaatctatatatacgtataatttaataaacttaaaaaggttagtcacatcattattcactcagagaaagaaaatttttcgctcatgtgtagacaacacaataatcatgattatccataatgtacgatttaatagaatttatatatcaaaactataatcacgaaaatatcatgtaaaccaggtaatataaaattaacttctatatccttcattgataagttaataagattgtattgggatgagttttatttagggcataaataaaactcatcccaatacaatggaaagccaaatgagaaaaaaactcgatgcaaggaagaatctagctgcgggttgagctccttgtacgaggaactccccatggttatgctcgcgcactcccagcattggccttcccgcacaccagcttgctcgcacactcctcgtgccaagcgcgctccccgcactagcctatctggataccaacagctgcccgtgcatcaaccttcccgcactagcttgcacacgtgccagcctgcccgtgtgcatgaactagtcattcgttagctagtcatgtgtcaactgactgtgcatcaataggtcatttgtcagctgaccacccatcaactagccattcatcacctggccatttgtaagctagccgtccgtcaattttccatgcctcagttggccatcccttttgtcagctattcgtatgtcaggtgtcaatttgttagctggccatgcctcagttggtcgttcgtcagctggtcattcgtcagctggccgtttgtcaaccatcatgcctcagttggacgttcatcagctggtcatccctcagatgaatatctgtcagttggtcgtgcctcagctggccattcgtcaactggccatcctacagctggccatttgttagctaactatcccttaagtggtcgtccgtcagctgactgtccctcagttggttgtgtgttagctgacttttcgagctagctgcgcatcagatggtcttgtgtacatctcattcgcaagcacaccatcaccttagtacaaagataaatgggcgaagaatgatcagacttagtctaaaagacctatgaaacataggctcagcacttagtaaaattctcaaaatgtcaaattagcttggtgaacaagaggagaatatcaaaagaaggtacaagtattttttttgtaatgtccccacttcaaacctccattggacccttacacccacagaataatgactcttatacaagagtatgtcactctggctgcttcatggactgatgactgaccctacaaaccaacacgagtatttccagcgtgctttatcctcactcgcacacttcctgggtaaactttttctcagaaggtcacccatcctaaaattacctcaggtcaagcacacttaaccgtgaagttctttcgtgataagctaccaaaaaaaaaagatacaatttactgatataggtagtaccaatcaatctatttaagccctctttaagtactgcgtagtcccatacctacacagtcttagactcatcccacttgaccttccc

SEQ ID NO: 112280 - DNA, 2476 bp, Cannabis sativa
tagaacacaaaattaaaatttaatataaatttaccacaaaattatttttgtgctaaatatagtaattatttttgtgctaaatatagcacaatttttacatctccaagttctaatcacgtattgaaagacaaaggaggttttggttccattttttttaatacttgatgagaatctcttcccatttaattaaatttaccttattatatatgttcctttctgtcatgttatgatacacatgtacataattaaatacatataatttttcactagaagtcattatttcccaaggcacacagaaaaccaaaaactgcttgaggaatagatgtggacctgaaatttgtatctggtgaccatagaatctagctatgatttaatgctttgtcgaaagattgatacatacatattgatatatgtttggctataatttttattaatatataggaatgtttattaaatgtagttaataggtgtcacaaatgaatttccctggacgaaaaggcatcgatctttggactgggaaattgatggctgaacctacaacatgtaatctggtagtggtggtaatttataccagaatcgttttattagagcatctaaagatacaaataaatgattaagctaaaatatagtttaccttactaaaaatataatctaatcctctgtgaaaaagtgatacaaattttagctgttcatcaaatcatttaaattgttcgcattataaaaaaaatgcaatttaaaattctttacagtgcagtgcggtttgaatttttttaaattacgcagtgtagtgcggtttatagttttgaattgttaatatgcagttcaaacggcactgcactgtatattataaaaataccaatttttatatttatttaggttcaatatatgaaggttcagcccaaatgctactaattattatattgttgaaactatgttacgacttcaatagaatttatacattaaacatataattttgaaagcaatatgtaaaccatacaacataaaaatgatttctgatcttttattaattgataaatctgattatattgaaatgtattttatttagtgtataaaatctcaacagatccatccttttgcttgatcccaactggattgcaggtttgcaatatattaccttcttgcataactttgattctattgatcatcatgttttctttttcattaacaatgataataatcggaacaaagatacactccaacactacttgcctgaatatcaggtcaatgacatcctttagattcccattgacccttccttgcaggacagcctcatctgggggcatcaccactctggcattttaacagtttgttcagcctatcacctgactaacctcaacccttatccatccttgccctcctcctccaaccctcgttgtttcaaacaatggtggaaaacagtctggaacaccataactcccccaaaaatcaaacacttcacttggaaagcctttaaccatatcctctcctatggcctaaacctgtttaacaagaaaattcttagcagccccctctgttcccactccaaaagcaaagtagagacagtcacccatgcacttctagattgtcccagggctaatagccccctctgttaccagtaaccataagtgtgacatcaaggaatattatatgagaggttttgatcaccttagcaaagaggacttcaccttgctgattagtctactttgacagatttggatcagaagaaataatgctctatttaatcacaattctaacaacctaattgatatggagtattatgttattagcttgttccaggattacaaggcagcacaaaatctcaactcaaaaaccagcatgttggaagttgctcatacagatcggattcttccctcaaacagcaattctgcaattcttggcctccagcacggcaactacaggttaagtgtcgatgtagctcttgacttgaagaagcttcgaacaagtttgggggcaacaattaagaactggaataatcagaccatttcaggccttttagctccaaaatggggtgtttctacatccctcttttctgaagctgaagccttctggaagccctgaaatggtgctctgcaatcaacctccagcccaacctcattgtttctgactgctcacagttggtcacaaaagtttggagcaattgaaaagacaatttagctcattcgagcctggttaagttaattcgagagtctctatcccaattccctaatgcaaccttgtgtcatcttcctaggattgagaattgtgaagcataccaaaatactgtgtatgcacttcgacttgataaggactcaacttggtgagtttagttttctctcatttttgtttgtgtatctattactatggttattatctcctttccccttcttgttagttacagttacctcaaaaaaaaaaatgatgagggtattttagctaattattagtactttattttaaatggagaattttatttaca

SEQ ID NO: 112281 - DNA, 2073 bp, Cannabis sativa
  modified_base (38)..(38): a, c, t, g, unknown or other
  modified_base (2044)..(2047): a, c, t, g, unknown or other
atttttggaagaaaagagaaagattggtatattttttntatgtgttataattaggtataatttaacaccattagtcatttttaagcataaaatgtcaaatttcccttagggaatcaggaaatgaatacactcagtttaactatgtgtattcgttatgagtagtactacttttatcatatgtgttgaatcagctaactttatcacaatggtcatgtgtaagtaattgagaaagttatcaatcgtgttagcataagatgaattgatataggttgaaataagatgagatgaataagattcaagttaacattaagataggaactcctcaaggttaagtgaacaatatcaataaggaattgtaagaggtcaataaaaagaaatgatggaaatcagatttaattaacaaagggattgaaagtgggaaatataattgggaacgacaataatgcatctgctttttgataatccaccatgagcttaccttggagttaagcatacttaacttagggtaatctccagatagaatatctttcggggagtcatctcagaaagcgtacgagtgaggacaaagtacgctggaaagattcgtattgggatgaagaatcaacagtcgttctagaaattattaagaggaaggaaagtattaatagatcaagatttataaggtatcaagatgagtatatattagtagatggaagtaaggaatgctataatttgatatctttcggaaacgaatatttaacttgttaataagttaaattagtacatcaacttaaaagatcccataggaagaatagaaagacataattgcgaattatgtactatgggatcttatgattttgaccgaatagtagcgattggacatactaaattaatatgttgtctatcaatgcagacaaattacagaataaacaaggatatggagttcatacaaaggaatagtttaatcttgtgaaattccaaagttgatatcattggaaatgatgttaagagttaaagaaagttcttgagaaccatggagattaaagcaaaaatagtataatgttttattcctaaaagatgggtaacttgagaagatcaatggaatattagaaacatgttgtgagaatatttgataaaagttagattatcttagaataatctcttctcctgatggagtgtttatctaaaagtgataattaaatgtaccattggttaggtactttaataagtgtggtgtgagagaaacattagacacctgttcactagaataacataggtgagaaaagaatacgatggattgaaaagaaccaaggaacttataaaactatagagtgaatttgagttgtatgctcgtctcattgagtacacaaaaaatctatgctaattcaaagtgtaggaatatcaagttccaaatgagagattctgtttatctccaggtatcacctatgagagggatatgtaggaagaaaagttaaaccctagattcattgtacctttttataaagttgtaagtaggcaagatagcctattagctagcttgaactccagcgttgtctggagtgtataacgtgtttcatatctcaatgctgaaaaagtatatattagacccgacccatattttgagttgtaacaattttaagtttcggacaaatttattatttgaaaaatagcctgtccaggttttagactggaaagcaaatgtaggttagaataagacagcaacactaattaaaagtgttgtagaaaaaacgtcatagtggaagaaacaacttgagagttagagttgtaaatgcgggaacagaattccgaattgtttaagtaagtttctagaacaaaacttttataaggaggggatgattataatatctcagaaacccaattatgaatatttaggatttattatgtattatgtattatgtattaattaggtagtaacgagtaggattatgatcctgctaatctaatttagtataaattataaattttactataagtggataaataagcgtaatttatttggaatatattgatataatgtaagttatttgtgttgggttttatgccnnnnataaaactctttacaatctgattagt

SEQ ID NO: 112282 - DNA, 4749 bp, Cannabis sativa
acagtataattacatggtcagacaaacatgccaaattgtgtaattacctctaattacacacaaatcaaattatattgtggctttccaaacgcacacctaatttatcatttagtaaatcaaaaaattaattaataaattttgcaaaataattcaaaataatatttattcattctaaaaaaaatagtatttattcttttttattattagtttttttaattttttgtttttatttccctctttaaaatctcaaaacactttgaataagcacttttttgaataaacggcatgtggtttggaggctaatgtttttatttatttttatttaattttaaaagagtcatatgatatgacgttggttgaatcattgagccttgtgtgaaatgtgacccttcttcattttacacttttatttctatattttagtatttagcttaacaacaatttttattatatagtattcttatctacattttttaataataatttgggtcctctcattatataattaaaatatacaatttgaattattaggtttcaaacaataaaaatgacaattttttatcttgtaaattggtctcaaaaattttaattctttctttctcctctcaagtattagatttccacaaaagagtagcaactaacatgcaaataatttttagattttctatttctaaactgacttgagagtaagagcaagactacaaattttcactaattttacggtacaaattttcactaataaagctaattaaaaaaaaatcatatatatttatagtaatttgtattttatttcaagtagtgttgttaattttcgttatggacatatcaagtgggtggtattaaattagaaaaaaaaatgaagatcattaacatattatgtaaatgttaggttagaatgaatgaaaataaaataataaatataaaaattgaatagaataaaataaaattcaacatatacatataaaaaattcttatcttgcttatttattcttttttttaaaaaaaaaaaaaatgtaaaggtcattatactaaaatagtaaaaaattattctacgaataatatttacattatattaaatgcaactaaataaataaaaaaatatataaaataaaaatttattgaataatttctattttattaccttcaaatccaaccaacaaatttttactataataataagatagaacaactttattaacaataataataaatgatataataataagatagaacaactttattaacaataataataaatgataatatattaatatatggaggtgtgagcccatataagtgatagtaacatagatatgtgagagttttgttgttaaattagtggggttcccaattcaattcaagctaagctaagctacaactcccatccaatatagtgatgttgctccaaccaaaacctttaattttaattctaatattattatttgatttcttttctacaaaataacctctaaattgatttgttttctttttgtggctctaatttcaaaaatcaaccaaaattgagaaagatatcaatatagataagtaggtgtgatatggtatatggtatctagctgggtcttactcttacactactttttctcaactcttttttattttttgcccttttgacaatttttcttcttcttcttttttttttctcttatctaatcctctaaatggatatggacattttttctatgctttttttaaaaacacttttcttaattcctttctttccaatcactctactactctatatggtctctttcaattaaaattaaaaaaaaatctagagaagggtgaaagtgaaaacggtgagaaagtatttatatgaatatcctcgtattatgtttctgtttaaaaaattttacagtctaaagctaagtgagaaagaaagtacataaaagcaaattagatttagtcaatattgcctttgttgtttggttggaccactacaacaacaactactaacttatataatatatttatttatttttcatttttgcatgccttgctgttaaaaagcatgaaatattaaataggcaaatgacaattggcacttatatatggacattagaccatcatgcaagtctcaagaagtgaccaattttcttttacatattttattaagatttattagttatctttggtgaaagaaactggtgatatttacaatctagtattgtattatttattaatgtaattaagtattaataattatataatttaatttaataattataatatgatattgttaattattcataaagtgtcacctttagatggtattaagtaccacttgtacttaatatcaatgctattattatagtgcttagtactattataggattataagataacatacatggttagtaattttttataatcattaatatagtaaaataagtaagacataatattgaattgcttatgctatcgatacgacacaattatagtagtgctagacactttaggtgtccttcaatatttctcttttaataattagcatattagcggtatgcatcattactaagtagcattttaagaatagtcaatataataatttataataattattaaattaaaatatatgagagtcgataaaatgtgacaccttaatattaacatttctctttaataatattatgagtacttaagtagtttaataaaaatattgtcgttagtatgcatgaaataataatccttgtattatggagtttttatgatgagataagatgcagaaattagtttgagaaatatggaattaaattaaaaaggtcatgcaatgctggttttagggctttattattaaatcaaggggaaaggccaaatttaaaaatatataaaattataaatacttatggttgggattgatttatggaatggttgttgattacaatagaagataagagcaattatttaaaaaattcagaagagaggatgaaatttaatgataccccatttagtgtttttatattattttttcttataaatatggtgaccaaatatcaccatctaaaactcactataattaatgttgaaaagaagaatatggtgccaatgtcatgactttagtaataaattgctctatattcattacaaagaagtatgaactaagtaatgttcaggcccaaatcactatcttccacatactgcatttattgtcaagcccaaataagcccacaatcaaaaatacatataattccacttttgtttatttatttatttattattatttttttcaacaaacaattatatatttggttgggataatttgtcctcttgtttcagacaataaattcacccaagagttctgttggtttgctctcatcttgtacaataattacacttaacaaataaataaatacaaaattactacactttttaagatttactttctttttgcaataataatggataaccttatacaagttgtaaataggtccatggaaatagacatagatagaacacatgcattgtagccttttttttttacacttttttagtcttttcttccttttatttttcggtttggcttggtttgattattgaaatgatgtaatgatagcctttacttttcacttcccatgaccttttttctttggtaagttcattgtttggaaaataaggcttcaatatcttgaatttggactatactccaataaaagttaaaatactaagtgtgtttggtttaggataataaaataataataataaatatcttatttttttattccattgcattttaaaatattaaaatatcattcaaatagaataattttttaactatttcattttttgttttaaaaaaagactattggaatgtcaataccaaagttatataaatatataaagtatattaaattttattttattatattcatgttttcattcttagtcatttatttttttactcttaaccaaacgtgtcttaaaagtaacaatatatgcatacaaaatagtaataaaaaatcttatgatgacaataatttttaaattgtgaatctcctcttaaaatggtgttagaggttaaaaaattgtcatgttattaggtgtactgttttgatgtatattttgaatagagagagctaattacaacttcctattataatttcttagtcaacagtatctaaaatcacatgttggaatattttttttcatagcgatattcattactcattcctgtaaatttttaaaattttttgaataatttacagtacaaaaaatagagttcctaatattctagttgaataatttttatttttattccttaaacttttacactaccaagttgtgcctctaagatacgacttgtttataatacccctcaaaatataaaatataacttttacaataacgtgatatttccatcataatcaattcaattttatcgtgaaacgagtgacatgataaatttttttttgatattggggcaagggggattcgaacttgggacctcttctttatgataaatacatacaaattaaatgtatttcaccctttttactttaacaattaaaaaagtaaaaataaaaatatgtattattatatataagccttttatcctattattcattcaagtaaaaaatgtgaagtatatttaatttgtatttatttatcaagtatcatctaccgtttcactaatggcacgtttactaaagcgtaatcgttatcggaataaattaatgggagaaatgaaagggaataaaatgttatgaaatcaaaataattattttaacatgttgt

SEQ ID NO: 112283 - DNA, 4507 bp, Cannabis sativa
  modified_base (32)..(36): a, c, t, g, unknown or other
  modified_base (1124)..(1124): a, c, t, g, unknown or other
  modified_base (1193)..(1205): a, c, t, g, unknown or other
aataatctggattacattgaaatagagttttnnnnngggcataaaacccaacagtgcctcgatttcaaccatagtaactccctgctaaattcttgttttaaaccccaaacaaagaagttcaagaacatagattctgttaccccaaaaattctcagcaataatgatttgaattcatcacgaaattttgaaaggtctgagtaagcttcaaaatatggcccaacagataatcataaatggaattaccaaaacgggactgataaacttgaataaattaatcacattctacaaatcctataccgtatttccatccattgaaactatgtagatggtaccccatcttaacggaaagcaaccactaaaagtctgatctatagccgaatcaacataatgaagatcaaagaatttgttgattttgtaaaccaagtcatccatcttagacccgtcaaattgatgaacttctactctgaatgttttgagaatagaattaaggtctcgacaattcgtctcaacatcaaatcttctacctaacactcgggtattctcatgacttgcgatattcaccccatcatggtcagacaacaatggagaaaaggcctaagccagatgctcatcgaggatcaatttgagctccgccattttcgattgagctcgctgctcccattttagatccatagcttgcaaaatcacagcaaggtctttcttgttcgtcctaagcaagaaaaaatcaattaaagcaccacttttagataatataggctcttttcgagattgagctagtctccttatgcaaaactgcaatttcattcagcataattctcaaaatttttacaacttttatttatattgagttgctaacaaactattgctgactgaatttgggtacacatccacaatccctcaatgttccagcatcatcacgaaatttctcatcaagcaagctctacaaaaattcttacttttagtcacgataaaatttgtgactaaaagtaaaaaaattgtaactaattatagaatatcattcttatgctgtgactaaaaggttcgtggctaaatgtattagctacaaaaattacaatttgttgtgactaaatatgttttaagtcacaatacttgttgtgactaanattaaattagtgacaacttataacaaaatgctatgttttagtcataagtaacattttgttgtgactaannnnnnnnnnnnntcacaaaaaatttatgttgtgagtaattaaaagttgtcactaaatgtagttattttttgtagttgagaacacactcgctctgtcttgctacatgctatttcttcttctcttttactgctggtactgtcgttctcttaagttgtaatgttgcaggtgccttctttcatttggtcttcatcagtaggctgacccgagtccctctctcaacttcccatatgctcatgtattacaacagaacccaactcaattggaccatccttttgggccttctgacagtgatcgacacctttatttgccgaggcaaattgtatgctagctttgccatgaagccaagtatatttccatttaattacttgcttcccatgttcaagggaatatattcattcaaaaaaggcatttaataattgataacattattggaataaagtttaggtttctgttgcctctttatgcagatgtgacaacaactaacaattgtctttccttatctactcatataacgaccagatatctatacttggtaattagagcataattttccaaatttaattatcattttaatgatcagtcttcattaccaaattgaagcttgttcatttctttaactagtagtaaacactgactgaggtgctaagactcggatccaaatcttctgtccctaatttctgtctcatctcctgtcccactaattgtattttgccacgtcaattaaaattccatctgtatatttaacagagacttacatcagttagctccgtttctttgtttttctattatttaatatatatctttttaattattttcaaaaaaaatatatatctttttaattaattatcatttcacatctctttttaatggctcactaggcatcacaactgtcattactactagcattttataaaagaaattagtaatcaatcaatagaacatatctactctattacatgataattagaattatgacttttaacataatttatctactaaaaatctaactaaaccaactaaatcaaaaagagtcaatttgtagaaaatcaattcacgtctggttctagaaaaaaactcaaactcttctaaacaatttgagagcaactatacatgcaaatggtagttgagatttgttacagaaaaaaaaaaatcagagacaaactaatgcaaacccaaaagactactaaatttaaattgcacactagactttttttttagaggtgttgtatagattgaaaatgattgtttgatgcaatacacagttttgatttataaaaaaataataattaaacaccttcagtaaagcaagatattgaaaaagaaaaagaaataaagattgaaacagatgagagtatcgcgaattagaggaaaaaagaaagagatgatgagagaaaggagagagagaatgatgatatttttttcattaaaaaattaaataaaaatcaacaaactgagctacttgatacaaagttctgttaaatatattggtaaaattttaattaagtggcaaatgtaattggttgggacagaaaatgagacaggaattgggacagaagatttgaatccctaagactcaatgttttgctcagcattatttgcggcataaatattatatcttttcaattgtatacgcttaacacattttttttgatggattaaatactatgtgttattttattttctacggattaaataatatatgttatattattttgttgctaaattttattaaatctcactaaactaacttgtatcaattaattaattggtgttcttgagcagtgatattgttgtttctgtccccttatctcgaggtgtcatatttctttgttttatgggtatagagggtactcagtctttgttggaatgagtatataatttggagctcattaagttgttgggttatagtgtataattaagtttaactgaaaaacaatgtagatgttttcaaatggtagagacagatcaaagtagaataagcggcagatttagtacagaaaccgaaaatgaaaacttcatataatacatgagaggtacaaagcaaagtacgtcggcgtagcactagctagtacataataatgaacttggcccatacgtactactacttatcctaatgcatattatataacacgaacatacataatataaaaacctaactatctatagaagaaacagggagtggtacagagacccccaccaccatcatcatcatcatcatctatctagctagtacgtgtagtttttccactttatttcaaagtcgctacgtatatacatacttaataattatagtaattaagcaaattaagacaattatttaatacttaaaccgtgtttggcagcgtattggactaggtaatccaactcacccttatctacaaacccgtctccgttcttatcggcaaagtgtcgggctcggaaggctctccagccaggagcaaaacaaccaaaacttttgaacgcatttttgagctcttctttgctgagccgaccgtctccgttggcatcgtatcgctcaaaaatgcctttcaactgtttgtcgtcgtacggatgagtcaaaaccttaaaattaaaacccattcgaaaaggcttatttatcagaattgatctaaagcagaaagagctaaaaatattatagtagtttgagatgggaaaggatttaaatagaggcacacagagtaaattaaatactctttgactgggtctgtaatgtatgttataattaactcaggtaaagtttgtactcttaggttagatggaatattagtcgccactacacgatgcgcaatattgtctcaaaaaatgaaaagattctgataactgtaatatataatatattgtagtaattacacactccactccatatatattctttatacaatccctttaaacttatataatttcacatacaatatatataagattgctgcaggacccataaagatatggacacataattatagtatatggcatctttatctattagcaagttgacacgttataaaaataaatatcagtatcaacacacatatgattctatcttacccgttgataggcaatagaatttggaaggttgtgatttactatattttaagttaagatcttcttaagatcttgaataaacacaaagcaaaaaaagaacgacattaggtatactgtgtgatataatggcaaatcatctcccagttacatctggcatacattttgtcatatctacaaatattagatagatgttacgtgtaccgtgtaccaggtgtgttaatttattttagtttttaatttttttaatatcataattttaaaattaataatat

SEQ ID NO: 112284 - DNA, 3976 bp, Cannabis sativa
acctacggtttttatcaaaaaatccgcctctaaatgtcaatttcgaatttggtgggtgttttcacaccctttagcttcactttttataaaatgggttaagaaaagggatgctaaagacccatattgtagtagtattgatgacaattaaaaagaattaattttgaaaagttaaaaattaaattttaatagtcagaactatcaaatatatacaatggtaagaagtattttagtgagagtttactactcgttaaaatagatgatattaatgaaagaaaaatagattgttcttaaatgtattaattagtattccttaacgaaaatcttgagttcaaagaactaaatagatttggataaatgagatttattgaaatactagatataccaagagtggtttgaatatctaactaatttaaattagtgaatcaaaccacaataaaaaagaaattaatgagaaagttaatactttctaattttgaacattggagttgaaatatgattattcaataattatatattaatagtctcagtcattatttaatagattcaaatgataatgaatatagaattttaataagtgagaaactttgactttattaaaataaaattgattatgataatcaacaaaggtatatgagatagttcaaatatagtatctattaagaatgcaatgaatgattgaatcatttagtttaggagtcagatatttgaattattatatgaagactttgaattatgatatgattaaattcaaacaatataatatactcaagaatagtaattatttattatcaaatattcttaaaaaaaagaaagtatatcaatgatgaataattactcgtctataatgttattaaatatagatttaataatgcatcatgaaattagggattagggatgttaatagagtgttgaataaataattgataagatattcatagtatgagatacatgtattgaatataataattgtttaattattgaaatttagggaacttgtacaatgagattgaacaagtaataaatttcaaatctgttaattttggtgtgcctactaatacccatgttacccttccttgtatctaggacaccaactgacataactgtttttgacaattatgttagttatgtgtcattactgttacttgtgtgtataaatagcctattggccatctagtttctatcatcacttgtaataaacactaagtatcaataaagatataattctctctcaattctgtctaagagtattcgagttcctaagagtaggttcagttgttgaacctgtgtctgttctggtagatgaaagtaacaccagctggtgtgatcgaattggtattagctcaacaaaatcatcaattgagaagaagtttaaatgacatgattaaaggcagcagacaaacataaaactgtctaattaagtgtgagtattaaatatacttgtagtatattaaaaaaccattcaagtggtgaatctatttgtaacatgttattaaaatttaagatgaaggagctaattaataaatatatattagagtatcgtttatgaaatgagaaataaatattcttattaattaagttatcttaaatattagagtcacttgagattgtcagtgatctaaaataagataggatgtgaactgaaattattcattgcaatatctgacttgattagtcatagaatctaatgagtttattattaattgtcataaataatagattaatcacttagatgtgactaatgaaagattctagattaatcaattttaaaataatggattttgaataaaaaattatttaatattcagaatattaaatgataatcaaaatatttattaattgttagctcagaacatttaaggatgttgattcgtaaatgacttcgcgagatccaaatacctatttgggatcccctatgtcaacctaggctaaggacccttcctcaagttgaatgctatgatcactagggatactagactcaaggaatattttccttcttgtcacgtgtcaaaaataatgtccacatcaccaaggttagtttcttggtaaacaactttcatttaattgtattttgtgatcaatacattatacaaaaacgtgctttcaacaccgattaatgtaatggtcaacgttgttaatcaaagttattgaataaacttaaaatgtagcattggtgattaacctacttgttgggtgatcaacaacgttggccataacaccaacactaagcattagtgtcagttgtgcactaatactgtgttcaacacaatatcaattttaaattacaacactcatttaatacaaaaacattatctacctaaaaagattataattattgtgcaacactacgcgaaacacatattaatttcctaatataaagatagaaaatttttattgtgaggatattacttttgtccatatcagtagttatatgaatatctttatttatagcacttagagaaattataacttaaatttaaattattttttatataattatgtacattatgcttatagcaaacattatttcacctcttttcaaaaaatttaaaataatttattatgtcggaaataaaattcaaacatttagttgtactagtatttcttttagtacgtgtgtaaataactttttcgaactctatttattttcggtatcgtaaaaatgagtaagaatatctaatataattagggaaatttgcggccaaagtcctcaaaaagttcagcttgatacagattagtccccaacttcgaaaaatagcggcaatagtcctcaaggtcatgctttttatttgttcgttagtcctaattttaactgagacgtttaagtgcacacaattgccacgtgtcaaaatattattcgtccagattattattttaattttaaaaaataaataaataaattatttaaaaatattttttttttcttttcttcttctttctttttctttcttttcttctttcgtcttcttcgttttcttcttcttccagaaacaaccaaaatccaccatttcaatttgtgctctactcatcttcatccctctcctccttttcacactctcaacttttgaaccaaacaataaccaaattcaccaacaacaaccaagaagattccttacccaaaaccctaaaaatttccccaaacacaacaaacccaaaaaggtcggcaacggtggtggcggcgaccgtgactttctcttctcatcgtctccatggtttggcaaaatgtggaagcaaaaacctcgattcccgtcagctctttattgaagaagaaccagagcaatggcagatctcaccgtcagccatatctctgacgatttaaaactcagcgagcttcacttatttctgagaagaagaagaagacagtggttgtgctggtttggggttgggggccggttggtggttgattgtgttatggcagtgagaagaagaagaaaacaaaaacgaagaagaccaagaagataagaaagaaaaagaaaaaaaaaaagaaaaaaaatatttttaaataattgattaatttatttttatttttaaaaattaaataatattctggaccaataatattttgacacgtggcaattatttgcacttaaacggctcagttaaaattaggactaacggacaaataaaaagcatgatcttgaggactattgccgctatttttcgaggttggggactaatctgtatcaaactgaactttttgaggacttttgccgcaaatttcccatataattataatataaactgttatatacatgtatatataagggataattatataaagtacaattttttgaaaaaaaattacatttttacgttttaagattttttttttatatatatttttacagttttttatagaaacaacacgaaaacaataattgcacgtttactctacagtaatcagaatcggaataaattaatggagaaatgtaacggaataaatgaaaaataatttgaatcaatatttgtaatatgttgt

SEQ ID NO: 112285 - DNA, 7930 bp, Cannabis sativa
ctctctctctctctctaaagcttcaaagatgccataaccaccaccatcactggcgaccatactctggccatcacctgacccacaaactgcaccattcaaatccttgaccgctagcgatctcaaccctcaagcggggcctcctcattcgccaccattagcaagagatctcgagtaaaaatttaaaggttctaactttgaacacatttttcgatcacctctagtttctgtttgacgatctgttttcaccattagaattagcttattgaggagaacaatctacactaagtaatttcacccaacttgatacttttttttatgacatttttgaagctatgcttttttcgagtgagtttttggtggtattgttttgataaatgattagcatgggtgtgatatactagttgacgtggttgttttgatatatattgtttctattttcggtgatggttttggtacacaaatttctaccaccaccgatagttagtgtgactgcttaggtgaggtttcagaattctaaactttaaatatagtcgtgttatatgttgttggcctagattttgaatgtagattacaatgatgataattatttatccatttgatggtatatgtgatattgatatctaagattaaactaaaaaagttagagctcaaaacttgagagcttcggattgtctttatcatatattgtgcatattgttatttcacgacctagtctctttgtaattataggtagatcaggtgtgcactcacctgtaggtgtaagatctagaatctatatgcaggaagtgagttgaatttcagccccagtattttggttatttgcgaccactcagtttaggatgtcattttgtatgattggtatcaagagttatgtgtctagtgcacggtgtgatatgcatttgaagcttgattttgtgattatttgtggtctctattttgtttgtaaattttgataatggtgatgagatattttattattaaaggctaaccatgcaggaatatttattaaactaagggtcgtttgatatcagttatttttctactaggctttataacctcaccccttattctcccattccaggaactcaatttgatgctagtggattagtatggtaccgttggggaagaaagttgttattagtttagtcttattctatttatcaaagtttctattgaaaactgattttgtatttaagcttgaatggatggtttagatgacttaataaattagctatgtactatttaaaaacgagaaatgatggatgctcgatattattttgatattttattaacttattaaatttatctatgcgttgacaacataattgtcagaatattattgttcgtttatattgttgagtggtcttaattttgttattaatattttctttacaaatataagagctattcaattatttttaaataagtattttgtaatataaattaaaggatcataatattaattatcttcatgcaagcgtcaaagtatgacttttgaccacccaagttatggattttatatatctatcacggcctacgactcggattgtgatagaaaaatggtattagtgcaccaggtataattacctcggaatgtgtcaccaaatagtttaaatttattttaaatcataatagtaataagtatcttgatatttatatataaggcatatttatcttagtagcatccaatcatcactaactaattaaattttggttctcaaacctaagaaaatgcctctaaaaggaaggaagacaaagagaattgtttgagaagacctcactcaagctaatatccaacctgcacaagcagaattccctataaaagctcttctcgaagccttaagagtggttcccgctcaatagatggaccttgccgctcgatagagttatcattttttagatctttcataagttcgagggtggacaagatcccattgtagctgaaaggttgttgaggcatatatagaaaaacttcaacacaataggaacacgtcaagaatactaagttactttttttgtgtccaagttataaggtggtgcagcagattggtgggagaccttgtctagggtaatgtaaactgatgttatgacttggtgacattctgagatagttttcaaggagtagtattttagttcatctcacaggaggactctgattagagtatttgattccttaagacaatgggatatgattttgaatgagttttacatgaagtttgtagagttatcctcttatacatatgctagtattgttgaccaacccttggtgattgaacagttcatgggtcatttaagacctgggatacatggtccaatagcccctttgacctttaataacctaaatgggtgtgtgacacatctttcaaaattgaggctcatgtagaacgaaacgagaggaagaatacaagcagaggaaaagtaaatgatcgaaagataactaagaagaatcaaagtcaatggtcccagaaaaaacaaatcaatgggggtaccactagtattggttcttttggaaatacccatagtggaccatatgggtgtttcagttgtggtcaacaaggtcataagaagaaagattgcccaaaatgacaaaaaatattttaagcatctcatggaggacccataaggagctatgtagagtcttctctttttcatggatagcctaggactaaccaatctcagtcttcctcttaaaatttcacacctcaattaggccaacagtttcagtatcaacatcaattcaagccacaaggttcatgtgtcaacatagagtactcacaaggtttccaaactcctaattctagtgagagttaaagagggtacaatcaaggtagagggtctggtgcaggtacaagccctcctagtcaaggaaaggggaaaaaaagtcatccgcctaagcctatgctcttgaggttgatgatatacagagcagtgtagactagggagttgttgatgatatggttcttatctcacaatcttggctcatgtgttgtttgatactggtgcattgtattcttttatatcattgatgtttgctagtgtgctgggtttgtctttggaaaattttagccctgtgttgcatttaagtgtacatatgggaggacacggtgaagtatccaccatttgtaggtcagtttgtattatgttcgagagacacaagttgtctggaaacttattagtgttgcctatggggcaatttgatgtgattttggtatggatttcttgtctaaataccaagctattttagattgttcacgcaaaagaaagattcttttgatgtctagtggtgatttcattgtttatcgagccaacatgagtgtagtgagacaaaattccatcttaagggcatgcttaagtgggaagataaacttagagtgctatgggaatctgtttgtgacgaaaatgggtctagggatatacaccggttcccttggatattaatggttagtggttttttgaatgtgtttccaaaagatttatcagtgttaccacttgacagggagatcatgttttgtattaatttgatgccttgagctcaaccaatttctgttgccccatattgcatggcactagcaaagttggctaaattgaaaaaataataaggggagttgatggataagggttacattagacatagtacttccccatggggagctccagtcttgtttgccaagaaagttgatggaactttgcgattttgtgtcaattatagacagttgaatcaaatgacaataaaaaaataagtatgctctgtcgaggattggtgaattatttaaccaactcggtggatcaaagttcttttcaaagattgacttgaggttagactatcatcaattgagcattaggaaagaagatatccctaagactactttcaggacatgttatggacactttgtatttttggtgatgtcatttgggttaatgaatgcacatgcgtcatttatgaatcttatgaatagagtctttagactgttcttggataagtatgtggcggtattcattgatgatatattggtgtatttaagacgcgtgaggatcatgtcaaacacttggcaatagtattacagaccttgagggatcatcgatcatatgctaagatagagaagtgtgacttctagatgactgaatttaaatttttgggccatgtaatttcataagatggtatcactgttgatcttgcgaagatagactctatcctactgtggaaatgtaatatcccacaaaatataataatatttaattagataattttatttattatgtgattatatggactttagagtataattataatcttacttgtgttaattaatgaaatattgagtaaatgaataaataaagtgtaatttattaactacggagattttattgaattatgtgggtaccattcttgaaataaaatatttttggattcagcgaccgtggaaactcgacggagtgatcaaaaatatcacgacaataaaagatgagttgtattggacgttttataccagattagttagaatttgtttggatggcggtttattcaggatagttagagaatggccaaattactcctaggtcattaaaaaacgtaagtactttaagaagggtaaaatagtcagttgttaagaatctagcttttgtttttattcgcaaaaacgtagagtttactaggctgaaatcaacttttgtcttagtgagttattataaactaaatttgaaaattaaggaaaaaaaaataaataaatcaaaaatcaaagtaaaaccctgtttctcttcccgttatttcgacagtcctagaaaccagcaaaataagggaaatttcttcatcaaatctaccgattcttagctaaattagcaaggcttagggttgttcaagccataaggtaagcttttcatcctttctctttctatttctaaggttctaggatagttttgttggggattttgtgtcgactccggtctgtggtgttggtggagttcaagtttgattctaggttttaattcagtgttgtgtaagtgtttttggatgatttcttggatgttaagatctgaatgtggagaatttagtttaagaactcaattttcaatctttaatggtgaatttgtgtttttgaggaattattgagtttttattgtttgatcacgttgtttttatgttgtggaactattctggaaggtttgaacaggtttgaagaggttttggtgtggactcgatgtgaaaaactagaatttcttatttttgcaagaattgaacgattggttctatatgtcactagtgaaccggtcaactagttggctagcaagggtaactctaggtttttctctcaaatatggtttttctcagggtgttttctagaacttagtttagggtattttagtgatgtttaagctattttctaagttgctagagattaaggtttatctggttgtggaattaaggtttattccaggatttgatcaagttgtttatcaagtttcatggtcatgatataggacccgggatcatcgagcattgttccactcaggtcggctcgcacacctgattattggattgaggtaagaaaagtcaattgcactgtgtagcatgtctaataagatacaattattatcgttaatgactcgatgatgattgaggtaaagataccgtaattacagttacttagaatgagtaattactcacttgaaactgcgaataggtgtcttacttatcgattgcttcattgggcaacggtagtgacatatggagttcgttggtaacgagcggtaaggatgctcgatgaagcatcaaagtcatgttgtcttatgagataaataattgttcatgtaatgtttgtttacatatcgaataaatgtttatattggatgatgaaattattagttatgcattgttataatttctaccgttatgcaatatttgtattttacttgctttgttgagtctttatgactcacagatactttgtggtgcatatcatgagtcagagatctcccagcaatgtacatatcagccgccatgtcttggctctctatggacgggatccatcttttggttatattttgaaaatgtagctttgttttgtaacagctgttttgccacacgttttggatgtttgtaaacaaaaggggatccctaaaaccagtggcattttgtaaagaaagattagttatgaaattaagttattatatcaaaagttttaattaaactacattttttttaaaactgttagtttattattataaactaattaataaaagcacacatgtggcgtccctacaaatcagggcgttacaacatggtatctaagcgaccaaggtttaaacatcctgaagactggcttcatatgtacattggctgcaaagactcgttcgactcatggtacagtaagtgttaattattagttgattataagattactttttaatctcttgaattacctgcttatttgaatgtgcaagctgttagagaagcatgataggatttgataaagattgtaaaatatgtttatgcatgtgcggtaatgcttattagcattaattttggtttgggagattctaatcatggaaagttatggtcgcaggtgtattagaatatgcacccaaggtgatctaataaggtcaatcgcgagctctctgggcttggggctggcggtgagggtgcgaaccctccactacctcaaaattgggaagagatgtatgtcacgatgcaagagaccatctgccagctaggtgagaagatttgagagcagagggagcaacaagctcgaccttctcctaatcccaatcctaaccctccgacacctctagtagtgccacatgatgtgggaaatcatttggatctgttgtacgagcagttcaggaagtataatccatttttgacttcatgcgggtttagagtaatgattgggttagatgtgccatctacatgttgcgtgaggatacccgcatttggtggaaaattgtatctcagggtcatgaactgagtaacatgacctaggatgccttctgaacattattgtatgaaaagtactacaacaaatctattcgagctactaaggcggtagaattcatacggttaacttagggtaatatgacgatgactgaatatgctaccaagtttgagtgattggaaaaattgcctctgatgaagtgggcattgaggctgctaaaaaaaccaaattcattcgaggattggaagaacatatcgcgttagatgtgagtgtagtttccaaacaactagggtttgttcgaacctatgctcaggtgttgagctagcccatgctgttgagggtgcgaaggaccaaatcttaaagagaaacagtatgagaagagattcgtggaaataatcgccaagtgtcagttttggtaaggatgctgaccctagtgattgcaggaaaaggcctaacgacccagcagctatgggtcctaataagagattccaaggtaatcaaggttttcgatgcagtggaaataaaaattggcaaacctatccaaagtgcccgaggtacaagagacgccatcagagagaatgttaatctagagcctgcttccagtgtggagtggtgggccatctgaaaagaaattccccacagttacaacgaccaaaacagaagaaagatgatactccagttcttgctcgggtgtttactttaactcaggcagaggccgatgttggtccttctaccgtgacaggtcaactttctattgatagtaccttgttgactattttaattgattctggccggggcaacgcattcttatttgtcgagtaaagtgattggaaatctacacaaacctagtgatgttttactaagtggttttggtgctttactgcctactagagaatcggctatttccagcaggtgggttaggtcccttctagtgtatgtggagcagggccggccattaacccgtgcaaggagtgctaatgcacagggcccacaaattaaaa

SEQ ID NO: 112286 - DNA, 2192 bp, Cannabis sativa
tatcatctttcaaacctttttcaaagcttccttcgattgtgtgatcagttatattggagacttgagaggccaatactttgagttgtttcttagcattaagttgtagtagtactagtgtctagtacatgaatcattttgcctgctttttggctacaatacatatcaaagaattaaggtggcgtttggttgggaggaatgaaattatagaaataggaatgggaatggaatgtaataaaatataaattgcataaaacatattgataaaaaatcattaaattttatctcatgttacattggaatggttttcccttcaatttcaaaatggaatattttccaccaaaatggtggaaaagacgtttaattggaatgacattccaatactttcaaatgcaaccaaacaaatgaatggaatgaaaattgtttccttttcattccatttcattacatccaacaaacgccaccttgaggtgatgggttggaggtaatggaatgaaatggaatggaaaggaaataatttttatcccgtttggttgcattttaaattattagaatactatttcaatgcaagatgagaaaaaattatcaactttttatttatttattttttatgcattttaaattttattttattctatttctatgttttcattcctccataacgttgagtattttcctttaaaattatgttagatcatgtagtgcaaaaacttcaaaaagtatgctgagttaagctcttctcatagagtattttactgtacagcttcgtttacaggtgcttttaagtcatctaaactgtattgttgtacgtgttttctgttcctgcatgcaatcatgcaattacatctaattgcaatttcttaacctattttatttgttattacggttttttgcttcttacttttgatatatacacacatttgaaacaaaacaacgtgcttgtattaatgagaagaataataccaggaaagtctggaaaatcgtcatttatgaaaatagaacactgagagcacaagaaaataattactcataggtacaaaatttactccattatccgagtaaaatagagaaaggaggtgtaaccacaaaacaatccattgtctaattttatccataacttattttactaatatatttttttagttatatgcagtgttattttcatcgtacaatatcagtgtgaatctaggactaaaatgttcttaacagtaaaatcaatgaattgtctatgatgtatgcttgatcttcccttcaaattccatgttgctgattttgggtgaaattaaaattattatttttgttattaaataggcttaggaatgttgagtttgtgattttgtagtatttttgttttggcctcagtaaggttttgttttggcagaggaagcaaaatatatgagaaataaatttccttcatgtttgtttggtagttggaaaaaaacggtagtagtttgctataaatgactctagtatccttggattttaaagttgcgagtaaaaattagttaataatcttttctcacatttctaaacttcatttattttggagtcaaaatttggataggccaaacttgaagtattattcaattaaaacccttgaagtcatatttatatttatttattcttcttctctaccaaacatgaccataaatttgtaggttttacatgaggaggtgagagaacaagggggagtggtggattttttttaattttttgaaaaaaagaaagagaccacttgttttagaccctccccttttagcatgtattgaaaactattaggacttagtataggcccagtacatctcgtcccatttctttattgggcctttgcttttgtattatatatataaatctttactttgtaaaaacctaatttcagccaagtcattttcggctgttcaccttcaatatcagatgttttccctctctaaaatgtaaaatggtatcagatgttatcttcgcccagtgtgggtatctgatccaatccaattttttttttttttctcattcgatccaatccaatcagtaattggatttagaaaatcagcatccgattcaatccaattacaccttaaaatccaatccaatccaatccaactacaccttaaaatccaatccaaaccaattggattggatcggttttttaattagatatctaattacacacttaaatttcaatattaacttaaaaatat

SEQ ID NO: 112287 - DNA, 2976 bp, Cannabis sativa
attggggctactcagggcatgatcacaggccttgtttgcatcacccctgctgcaggtctacctactcgatcatcttctcaaacctatttaaatatgttcacatgacattcttaattttttcgttgtcaactttttataatcacctaacaaattaatcaaatgactccaaaataaaatattaaaattaaaataatgattattactcacctcaatacagggctacaacaaaattatggagctttttgttttttaaagtggtattttaaaaattactaaaaaaatatgtgtatttttaaaatggttatttttctctttaagctctaggcagagtagatcgtaggcgtaggccgaacccggcttagccgaggcccggacctgccccaatgacacacagaaattcagtgaaaacaaagcattagttcttaattataatgattatatatgtatgtccaatcttgtgaaagttaacactaaaatatgtacattccatgcatgtttcctaaatttgaagaacttttgaatagataacaaaatatgataaagagaagcttgtgaatttagatccaattaagatttttctaacaatgaaatataacacttatgttgctcacaagtcacaacgatgatgatgttgatagtactagtacaacttttcaagctcttgatctaaatactatttagtattataaattgatattaattactgttagctacattaaagagtacaagttaatttcaaagctcgcagtaatatcattaatagtatttatttatcttgatagaaaattatattattttgtaaaatacaattagactatagattttttttttattcttttataacaaatgattgtggttacaaaatttttaaaaaaaaacaggagtagtacaagggtgggcagccataataatgggaatgatgggaggaagcatcccatggtacacaatgatgatcctccacagagaaataaatctcctcaagcaaattgacgacaccatggcagtcttccacacccatgcagtcgctggctccctaggcggcattctcgccggcctattcgctgagccaaagctcagccgactcttctacgctatccccaactcccaacgctacattggactcttctacggcatccaaaaccgccagtacaaggccgggtttcgacaacttggcgttcaacttctgggaatagtatttgttgtttttctaaatgtcattgccactactgtcgtatgtttgattattagattggtggttccacttaagctcgctgacgatgtgttacatagtggagatgatgccattcatggagaagaggcttatgctttatggggtgatggtgataagtatagctttgttcacgccgtcaaagacctcgctccgccgcaggaacttgtgcctgtagtcaccgatgaaactagagttgatactcaagctcaaacctcataaatgtgggctcatgttgttaattgataatattttatatatgctacatcgtttttaatgttattattactattttttttttgttgttgacctaaatatagaaaacacgaacatatttttgtatgtccatatggaaattctatacaaattccttctaatcttatgtggtaagtatttttttttttaattaatcaatataagatgatgtgatatagtttatccaaatggaaatatctctagtcaaagtcttcacgaaagctagtcttcatctggaaaggagttccatatagctagcttgtccaaccgaaagaaatcttacggaaagctggtcgtcatccaaaaaagagttctgaaaggctagcttatccattcgaaaactagtccttccagattgcgcttcatcagtttgagatgtctatccaagaagtgtgatacatgttcggagagagagctcgatgccaagaactgagttggagatctcattgtaaggagccaattaagtcggttaagtcttaaacaaattaactgcttagtagttgtttgaagccaccacatttgggattcatatccttgatttataagtacaatcgtcctctttattttttttaaaaaataacacaaaacacctgaagcagagtacgcaagttctttgagagagagttttgattgaacggtagaaagagagaggtatagagaaaagagattattgggttgtgtaaaggggagccttctcaaggaagagtgttagagtaaaaacacattgagagaattcaaacagagaattgctcttaactgtattgtacttatgttcttgctcaatcaataaagaaagtttcggtggcgttccagaattgaagtatagccatatatcatatcgatatatcgaacttgaacccgtataatttttagtgttattttttacagttttcttgcattttttatttttagttttatcatctctgttatactttattattcctctaattattgaattgtgtttggttgattttatcattgctaattgtctattgattcattttaagttagtttgattctgcacaatagttgaaatttcccacaaatcagagcttggttatcgatcagacagtaaaattaagattcttttcgctacaacagtcaatgtcatcagtggcaacattcgaattggagaagagaacatgagacttcacactatggagagaaagtccgaaaggggtcctagtgcatcaaaaaatctccaaagtcattagaaatgagaagttactggacgagaagaaactaaacaacatgttgcctagtgccaggtgacatgtcgccagacatgtttttttagcacacttgtctttggagttttgtaactctttttcgactctcttaatttctaatattttctacctcattttaattacgtaaatgagtatagtattaattgttgggaatattttaccaggatctagatttaataatgttgaccgagattttcggcaactgataaaatatgaatataataatgagctgtaagaaagcga

SEQ ID NO: 112288 - DNA, 3809 bp, Cannabis sativa
  modified_base (51)..(52): a, c, t, g, unknown or other
atttttgatctttattaataagtaaatctgattatattaaaatggattttnnttagggcacaaaacccaacaccatattgttgggcaatcccaaagtattaactattatagcttaattggacgtggtgcataggataccaactgtcaaatatatgggcaatgcgatctacaaaattccaaatgtaaaagttgtactgactatccttaaatttaactaaggaagtacgctcgaccctaagtacagtgggagaccattcgcaagcaccaaatttattacttcgggaggcatcatcttcaacttccgaggggttgtgttgtttatataatgagtgcgagcaatataattcctgtcttcctcatcagcaggaactagaacctgttgccagtctaaatattttaggactttgaagtctccagtagattgtctactgccaagaagagcacaagccttcaaattgttctcatgcaacaagaagtcagctgctcgcaacccaaaggggagaccaaggagaatcctgtgcctcttttcaatttctgaatttggaacaggtctcctcgtaactgctgtcagtacaacacaaacaaaattagtaaaggcctacatttattaaaattaacatttaaaacaaagtttttgagaaaaggcaatacttacgtatgattccaaatgcaattatgctgatgggagagagacatgatgtccaaaagaattcatccttgaatttgttcttgttgggtaacctcacgataatcctttggtcattggtgtgggtcgtaaggtaataaaaaccacctgctccttgcttccttgtgggacaggccttcacagaataaaaataaaggattttaagtggggctaggcactcccacttcagaatgtgatataaaacttttaaactggccaatattctgtacagattctgtaccaggtggaatggagcaacaccaaggtagttgcgaaattccttgaaataatccttaagagggagtactgccctggctcttatatgttcgaggccccaagtgcctatttgagatggctcgctagtgttatagccttcttcttgagccactctttcaggaagaaagtaactgaactctcccttgataacggacctaactcgacatccttgtttgtatttgatgccacatgattttaatacttcactgacgtatgatccaatggatctaactttagactcgatcagttcagcctcaaaggtaactgcaaggtcttgagaggtctttgatttgcgtgctttatgggccataatctcaaagtctaagtcacctagcgaaaaagcaacattgacaggaggtaaaaacaatggtctttttaaaggaatattaattaatttagaaagtttaggccaaactgcttctcgcaaataatgacgcttaccctcaattatctcttgcaaaaatttcctatagcgactagaagtttcatcttggttaatttttatgaggtgatccctaattttctcatcatttaccttaagaatggttttgggtatatgaattttgggtctaaactttaaggtagaaatttgaggacaaaatgattctaaggattttgggattgtgatttctgggacaaattagacatgattatgattaataatatcccaatttctagaataacagagcacaaatgaaacccataaatttatgaatcgtaaaacctaaaattttctagccctaaagtcatttagataaacaaaatcaaaattacccaaacattaaaataatgcagataaggaaaaaccaaccaaggaaaagaaattataaagacaaagaaaaatcaataaagaaaaaagagtatatcacttactgttttgatgggaatttctggatagagggaaacttgacgattgaagttctaaaggttgtaaaactgggttttgatggcctttggtacaagaaataaaatcaactgaaatgcacaggaaatatgtaagagataacgagggcatgcaagtttggaaaggaaacaatcgaagttttttgcaagaaagctcaaaggtttgaaaaacaaaaattgtgaaataagatgctcagtctcgaatttatactcaataaatgaacactgcttttttttttgagagaaaagtagtttattcaaataaagataacatagttgggaatcacaacaggggacccctccctaagtttaaagtcaagaaaaagatcattacttctaacagactttgctaacttatcagcttgcatattatctgttctattcaaatggacaaaggtacaattgagaaactcctctatcatactccatatcttgaccgttatcgccctcgttttccagcatggtggtaatttacgatttgccatagcttgcaccaaaagcagtgcgtcaatagcaatggcaatggatcgaaaaccacactccagactcaactgtatagcccagtgaatccccgaagcttcggcttccatcgcagactcagcctcaatcctcttagcagaccaataccatttcccggtttgtctatcctggcatcccactgctattcccgctttcccatctttccaagaggcatccgtgatcaataacccctgggttgatatgggaattttccagatatcttctgctgaaaccttcatggtgttcacactcatctgctcactactctggattgagaggaggtcctccaatctttgcaacatcttgtgtctttcctgcagtatatcaacttggttactcttgaaaataatagtatttctagagtaccaaattgtctcaaacaagcagccgacaaaagtaaggaatttccatctctcttcctcattgaactgctctccgatctcacacacaatatcgcttaaatcttggttccccacattcctgcatccaactgggaatgggcccgaaaaccataaagctctagcaaaggggcattcccagaataagtgtttgatggattccacttcactaccacaaaggagacatcctttaacagtgaggaagcataatttctccctaaccgggatagccccactcaaatttctccagagagtcatcgaggccctaagatgtaatctactatcccatatcatcgcccatttcttgcttctttggcctactgcaaacttcatggattccgcataggctcttttcatcgtgaactttccatcctgtgcattcttcccaataagcatgtcactacagtcacaaggcagccgtttaattttcccaatcaaattccccacctgagggccaatcagggcattaaatgctcaatgatgtgcctcgaaattctgaaccgccaaaactcaaaagcatgtaatttttaaaaagggttaaatacgattatacgcctaggatcatttaaaaagttatttttaattaaaaagtactttttagggggcaattgttatacccaaaatttggctatgtaccagaagctgacatgtgttctactaaaagaatatgaatcagcttgaagaatattataattaaattgcattattaaatgcgatttaaatctctcgtgtcaattatctaaaagttgatagaaatattcaaactccctgaatgcttagtcatatgcgagacaagaatcataaatatgaaacgagatagtatgtctacctcagaataaacatagtaatcaagatgtcaaagatcttacgacctgtagactcacgtacacgagcaaggtgaaagtaattactcaaccatctcactttctatataatgtgttatagtgagatttctctcacctagaaactcgagacaagactcctatttaaaggacacgtatattcagatttccaatggaagctgaaat

SEQ ID NO: 112289 - DNA, 1615 bp, Cannabis sativa
ttagaaaatattcgtgtcgaacacaataaatgctttatagcagcacttttttataatatatatatatataaataaatacatatttagggaaacagaagtgaaaagaaaatctaattatagtgaaaacatatttaatggggagaaggagattgaggtgggtgatgatgctagggggagctaggggagaacatgcaagaagggaatgggaatgggaattgcacatgcatgaaaagttatttagttatttagggtaacagtagtggcagagagactgagagcagttgaaattaatggcgaaaacaatggaattggaaggcattggacatttggacattggtggggggtgatggtgctagtgcttgtgctagtgctaagtctaactgctactactgctactgcttggtctcttttgagttgagaataacaagcccaatcacatgccattgctctgctctgccttgcagcttggcaaaccgggccaaacatactatactatcatatactaaaacatcactcttccactattattattagtattattattaacttacttttatttcactaaaattagatgaatgaggatggggtactacagccatgtgattgtctcatgcatgtccttctttttatgttgtgatcagagacaatagaagaataagtaaatatgtaactaaaaatggtagaaattgtgtacaagtcaacttctttcttctttatcattataataattgtatgtcgcaatatttgtactgatatgactgcattaactgtcccatgtaacatggtaagttgatgatttataagaaaagaaaattaaagaagaaaataaatgattgtttaattatatgtgaagttaaaatatttcaccactaggcaaaatatctgattcaataattatgatgataaagggttggcaatatataatgtattttaatgcattacttaaaaaataataataaaaaaaagaatagggtggtaaaattgtgtattggaaagtccccaaaaacataatatataggggttttagtcaaagtaagcttttggggtgagtctgtggttgtccatgtggctatcatgtggagaagtcgttattgcaaagtgaaaacatttaatgtggtaggagtaggagtgagtaaatgttacacaacacaccacgcctctttatttaatgtgcttcaatcttcattctcttcttcccaatattctttgctatgctatgctattctactacaatatttggagactaaaaacaattgtgtacctagaaaggactagaaagtagaacctcaaactttgtgagagcataccacatgactactcatcatttgtcctctttatttttatttcactagcaccaatgccatctctcatttcctcattataaccaaacacataacagtcacccactaaatgtggttgacactttttttttattattttattttacaaatgttaaatatgtgtaattttgaagaaaaaaaattgttttacatacttaaaaaaagtacccccaataaaatttacacttctaattaatttatataattaaagtactctatgtctctcttccttgaaccattgagaccacccaaacccaagcatcgagaccaccaac

SEQ ID NO: 112290 - DNA, 2636 bp, Cannabis sativa
  modified_base (186)..(187): a, c, t, g, unknown or other
catgaaaggggcatctggtccatctttataattacacaacaaccaatcaatgtcgggaaaagttgaagaatacccattttttttatacattaaccaaatttacctccaaataaaatttaattcaaaatacttttatgagttttgtacccatattatcctctcatactcacataactaagacataanntcaaacataatagatttgtgttctttgtagatagatgtgtaggcttgtgggaaagttgggataaaattttgactagagaaaaataaaaaatatcgtgaagttataggagtaaaattggtagaataattaaaaaaagaggtaaatataatagattttaaaagagggtaaaattaaaaatatcaagttaaaagagttatgtatacaatttagcaaaatgtcaatggtaataagatgttaaaaaagaaatgggccttgccttacttaacttgggcttctttgcttcaactttaggccttttacgaaaataagaaaagaaactctaatcaccgaaaaacaaaaaagtgtgttataaccaattttacttcatttttccttacaaaaaaatatattatttcattattattgtgaaaattaatttagttacacatactttacactacactaaatagaacacaagaaactaactactacatcattttgatcaaagctcttaaaagtttaaagcaattgcattacctagcttataaataaaacaccataaccaattctcacaaaaataataaataaataaccctatatcccaaacacttgcaatgcttaggcaacccttttcaaatttagaatataattttccttaactacccaacaattaataaaccctaaccaacttttatataatcacatcacaatcatcatcatataataatagaaagcttactaaaaatctcaagacaaaaaataatatgaagagtaagaagcaagttgtttgtgtaattttacaaactttatatttgtgtgtatatcctaatggagaatgaacaacaaagatgcgtccacactcagaaaagtattcaattaatagaatataattattaaacaaaaaaacaaaattgtaattaagtgagaaaaagggattcaaagtggaccaaaaacccacctttgaattttcctttctttcactttccctaattccaatacccaaaaactcagactttcaaacctccaaatccaaattttgcccaacttttcaaaaagcaaaggggacaaccattgggtcttggcccactaaggaagactagaataaaaacaaaaacaaatcccacttctttttttgggaaatcggcttataaaaattaaaatggtatgaaatcttggcaattttgattatttttttaataatataataaaaagaaaaaacacctctaatcatattaatcactatgtctttgagctttttcatgggattagagtcttcacatgacattttgtctatttgaccctaacccatctacaatttacaaaacccaatcacattcacccacttcattctcttattattattataattattttcaaaagtttaatttgccatgtgttctaagatgctcttttcttcacgcatttctgatcatatgtttttctttttaataaaatatatttattttcagtcttgattaaattaatttgataatcttatatctaaaaacacatctcggaatttaatgagtgaagccgcacattatagatcgaaatgggcttaaagtagattattttacttgggaacactaaaaacagtaactttgactcagtaaatttaattattaagtgttactatattcatcattttataccttttctttttatcctttcatatataaatgacttggcaatcattgaatatatattcttgtatcatccgaatctttctcatgaaaactagtagaaaatctagaccactcatctttgtatgggcccaaaagcccatcagtaatgtccatactgcatactactccttatctctctctttcttatttttctcatatatgtatatcaacacctaaaatataaagtaaaaacattacacttaaatgacatcacttagctttttcaaaacattcgagacaaatatgattggttgagaaaatataaattgtcacaataagtgttattttttagtgcatattttaatttgtatgtattaagaataatagaaaacttaaacttatacatcacaatatgatttttagttctaaaatctaagagcattcttaatactttgaacacatctcaaaacatgatcatagtgttagagcataaatacctgctaaaatctacacaaaaacaatgtttattgtttattgtttactcttttatgttttcctttttacttgatttggttagcctattatcatctcacttaatatttgtcattactcttttgagtttttcctttttaactaattagtgagaattcattcctttcacataatattaataaataggccacatacacgtattaaattttgagtgagtaaattgtaaaacaaatttcgagaaagacatacatacaaccatattaagttagagcattgctattaggcaccagtggtgcctagcacctttgcgacatgtcgcgttgcgattggctagcgatactccctaaaagcta

SEQ ID NO: 112291 - DNA, 2343 bp, Cannabis sativa
atcatatttgtagtttgcttcctttattaatgccatattttgtggcatttagttttgttgccatatttatcataagatgactcatttttctcatattttttaaaatatccctattttaattggagaaaattaaataaataaggtttataagaagaaaaaagtagcatgattcttgttttaaatccaaaatcataaaacacatagatatttttattttctcaatcaatggtaatggtgtaacaaaaagtataatatcttcatttcttatagggtaaatttataggataaattaagtaagaagtaataactagcagtatccttaattgttataaaatccaaaatcttaaaaagcataagagtacttttttaaaaaataaataaatagatagataaataaagttatcaatggtaatgacaacatccaaatatcttcgcttgtaccttaaaattggataaattaagtaaaaatgtatataagaagtgagaacaagcatgatctttgttttgaatccactttcataaacaaagagatttttttttgaaatagaaaagatagaaatatcaatggtagttgtaaaaaaagttcttcaattcttttaaggtatcttaattagataaattagggtggtaacatatttttaattaattttttattttttaaattagaaaagtaaaaatattttccgaaatcgttttctataaaactgttttcactttttaattttttaatcgagaatcaaattttaaaaaatttaaaaataaaaaaaccactttcaatatttttttttttaaaaaaaaaacttaatcaatatttaagactctaaccccaacctagaccttaaaacccgaactcggacctcgaccccaacccgaaccaagacctcaatcctgacctgaacccgaacccaaacccaaaccttgacctggactcggatcccgacctggaccctaaccttgacccggacgcaaactcaaacccagactccaactccaaaccctgacctcgaacatcggccctagacccaaactctagacgcagaccctagacccgaacccagaccccgaccccaaccttgacgcgaacccctacctcaaacctcaaacccaaaactcggccctagacccggaccctagatcccagacccaaacttcgaaacctgagcctagacctagccccagaatcggaccccaaccccaaacccgaaccctggtccctagcctggaccccgacctaaacccagacccaccgagccccgacctcagacccagcctcgaccttgcaccccgacctcaacctcaacccgagacctcaaaccccagacccgaacccctatcccaacccaaacttggaccctagatcctagcaccggacctagaccccgacttcgacgccggacccagaccctggctccagacctaacttaaataaaatcaacaaatgaaaataaaatttacagaatacacttttatttaatgtttttaaaattaaaaaataaaagtagttatagaacatatttttattttttaaaaaatatatttttatttttgtgattaaaaaatttaaaattaaaagagttaccaaacttttccaaagtaaataaagtttataagaagtaagaagttttatgatcatttgttttaaatctgaaattataaagcataaaacttatttttttttattttaatatatataaattagagatatagtaatggcaacaaaaaaaaaagtataatatcttcaattcttctatgatattttaattgaataaattaagtaaatgaggtctataagaagcgtttgataaataaagtaaatgagttctataagaagcaagcaaaaatagcatgatcctcattttaaatttaaatgttgtcgaaaaaaatagacaactcaaaaaattgtgagtattcgagctacgcgagaatacctacaagcaaaactgcgagtattcacctaaattgacgaatactcaaaataaaaataacaattagcaaattgtaaaattgagcatgtaaaacacaatagaattatagtggttcagccaaaatttggtctgcttaatctactttttgaatgtagttttgttattagtcttattcatatcaaatcactcctttatatagaaagcaagtgatcattcagttacaaaatcgactagacaagaccgttacaacattaattactcttaattgaaataaaaaatatttgtaaaataaatgaaatagcagttttttgactgttcttatttaatacacaaacgagtgcgagtaccttgattgcgtactagtcgttctgtaaagaccgcttagtttaatttgaaaattagcagttaatcacgttta

SEQ ID NO: 112292 - DNA, 4182 bp, Cannabis sativa
  modified_base (4156)..(4156): a, c, t, g, unknown or other
aactagttctctgtaggaaccttaaagaacctcacaaataattcaattctatcctatatcaattcaaacccagtagaatacttaaacaagccataataaacttaattcaagcaacagaaatagaaataaactcctgaaatcaaatctaccattgaagagtaatgtttgagctccaaggctcaaagtttgtccaaataaaacaaaaaacaacattccatgcttgaaccatcttaaataacttcaaatcaaccttagaaaacaaaaccaaactcaattcattcctacagtaacctaactcaaaattttgcatgaatacttaatcacaaaaacaataaaattcaaaggaacaagaagggaactttcttacctgctgccctcaatcgataagaattcccagcagaaaaccctttgaattattaataaattgtaagaaaatctgaaagtcatatggcgctaagtgtggccaacccaagggagagagagtttggaaatccatttttttttctaatttcctcattgtaataataaaattaatttcttatttagcttattttaggaagaaaaataataaatctaacgattatcacaatccacatactattagagacaaaagaagggtgaattaccaattcacccttattttcacattgaagtagctttgccacctaggagtattttggtcaaactaaatatccccaaacaatcccaacttactaaaagtcattcgataatgccctgctatttctaaagtactaaccatcataaagtgactctataggccatacgtcacattccactatcactcgcataaaataagaaaaacatgaatttttgcatataacataattaacacgcttacatttttaaatatatctccacaattgcataaacaaaaattaaaagtctaattttaaattaaactctaattatctgctaattcttagagataaactaagcgatcgttatagttcctgacctatttatctaatcgtgattaggtgtatcgacacctgattacggtttggatatatgtttatgtttttgattatgcttttcttactgagtctgttgacgtacaattattacgtgtatgtgtaggtaagagctagaatcgaacctggatgagtctaaagctaagggtgaagattttacatatcaagactattagacttggaatgttcagggtctttgggaaaatttaggttcccttttgatagtcgttggtagacaactttttatgtacaaatattttgtaaacttatgtaacttttaaaatgggatgtcggattatgtaaataaggatttttatttattaatgtttcagttatttaagaaaactataattatccatgttttttaataagcctttggattagaaaatccacaccaaataagagaacatggtaacacgcctaatctagtagggtgttatgcagctggctcgcattgaagcactagaaagtgagctgagagaagccaaggaggctcaaaagaaggtagtagagaaccttgctacaactagggacctcaaggtggaagtttttgttgagttgtctagggtaataggagagagggatgaagcacttgcacagctggctaaagctattgaggagaaagaggaggtctcgcaccgtctttgaattgctcaaaaaggtaagaagaaacttgagaacgaagttgctaggctccaatcccgtgttaaggagttgtagggggagataggggaggtccatcggggattgatcgctcatgacaacaagattatggatcaagctctttacaatgtatggtaggcgaaccccaacactgactttagctccttcagtcctgaagcctattttcaatgatctggcaggggccacccttagtcctcttaagtcatttgttcgtttagcgccctttaggtgtatgaagatgggtgcttttattttacatttttggatgaatgtatcagacttatttgttatgattcccccctttttatcttatctttatgggtcttaactacctactgcttttaagggagtgcctgacccctagactcactcaagcttttcctaggctactcctcccatatctttcattggtttgtctttgaactatgtgaattatgttctgttagatgcttgatgtttgttaagagagcgttaatgacctttgtagtgtactttctattctcaacctctttttaaagggagataattgttctgtgaaccaactccaccttttgcatgtatttattgcttgcttccctacacgcgttttgaggcttgtgtgctctaatgaccatttttttgtgtgcctttactgatgggattaccactaagctttctcttttctaggactagtgtgggtagctaatccccatagtctcgagagttttttttatatattttatccccccaagcgtatgttggcattagtgtgagaagacaatacgtatgtttttttttcaaagacactgcatgaatgttgttctaaaacttgtaatatcatatatgatatcaaagtttcacgtaacatcataataaaactacatgcgaatggaagacatttcaaacctcttccttgactgaaattaaacagcttaaagataacaaacttcttacttcattctcaaaaacggtcattatcttttcattggtaatacttctttaatttctttgcattctacgctctcaatatcacgaggtcatccatgcgagtaagcttatatgttccatgtggaatgatctgtgcaattcgatagggaccttaccaattttccccagcatccttgccgcgaggtctttggtatttggaaggatctttctcaacactagttctttggtctaaactgcgtaaggcaaagagaatagggagtacaaaatcgcacccgtaagagaaagagaatagggtttctctagtagtattacgaagagttattctacaagcccacaacacattagggagctcctcgatccacgatcctttatttttttctagcttggtcttgaggttcttcttaatcactttgttggtggcctctacctggccattggcttgggttgcactacagctaaaaaacccttttgtattcccctttccacaaaatatttgcctagtatgaccccaaactaagtgccatatcagtaatgattttataaggagctccaataggcatataatgaagttgttgaagaaggagactacttattgggtgggtatgtgaactagaagttctgcctccacccacttgtgtagtagtctattgtcacaatcggctacttttcccctaatctacccaattgcaatgctcctattagatccatcccccatatggaaaatggccatgtgctagtcaggttggtgactttggttggcagatgctagctgaagtttgcgtgtttttggtacttatcgtaccttttggcaaattccatggcatactcctctatggtgggccaataatatccttgcttgatgattttgcgagacatggaatgccccactgcattataatcacactctccttcaagtatggcggataagactttttgtatttcccttttgtcttgaaaatcctcttttgtataatgctccatcgactaacacataacgagtcgccttatacactatcctcctggcctctttttcctctgcgagcaactttcattcacggatatatctgaggtatggagccatccatgagccttcgtcagtcaccacacacactcgctcctccttggtggtcagttattcaagacattctacaagtgttaattctaatgtttaatttccctttttttgccaatgcatcagttttggtgttattatctcgtggtatttgttctacagtataatgttgcaggttctccaagtaacctttcaccttagttagatattccatcatcttatttcccctcgcctaatactcacctttgacttggaatacaatcaactaggaatccctaaagatataaagcttggtgattttcaatttctttgccaaatgcaagcaagctaacaatgctttatactctatttgattattggaagccttgaaccaaattatactacacaatacattatctaccctttagaagccatcaacaacacgcttgatctggctccaccgtcattgcatgccccatctcttgggttttatgccctaaanaaaactctatttcaatgtaatccaga

SEQ ID NO: 112293 - DNA, 4295 bp, Cannabis sativa
aaaacactatggtatttacccttttttttatgtatgatgtattatacactgatttttttttttttaaatgaaaggttgttcattgtaaaaaaatgaaataaaggcaagatgttgaggcaaataaaagctattccctcctcatgactatttattgcaccagacaaggaaaacgacccaagccaaacagccactgcagagtccattatcaagttggcctaatcgacaatatttagtaaagggaggatcctaataataataatatttgtgggttttcgctgctatttctataatgtccttttgtgttttacttttttttattattattattattttttctgttgtcgtcttcattaatttcgactgcaacaagtgatgagaatttaatgctttaaatggtaacaattttagttttcgtcagatcagacttttcaatacaaagaaacatatagaatgaattgacatgttatatatacagttctctctactttctttgatactgcatgattgcaagcttacaggtacattaagcagattgtcatgtcacttccacagacacagagtaagaaaaatatgtgtaattaatttaattaattaggcaataaatttgtcttttgtaaagatttgtatatatttatacatatgtgtaaatgtataggcactaatcgaataagtgatgaatgttaacctaattataccggtagattgatcaattatgatgaataatttgtgcatttaacctatgtattattttttttttcgaagaaaaagattcatcattatcattgtagggttcgttttgctacaatgatcctcttttgaaagtgacttcagttacaaaaacgacactatatagtctttgcctttcacgactatatgcattatcaccacatatatatacattttttttaataaaagaggtaaatatattaaaatcaaataaaattacacttcatgatcatgattacataagatgtaatctcgatagaggaaagatcgaccataccagttattttttggcgaaaacctacttagccatattataagctgcaaaattataatgtcttgaaataaacaaaaatttacaacttaacaaaaggttagagagatgtttatatagaagcacagagttaccaatagctcaactagaacaagttccctttagcatattgataattgtctcaaaatcactctcaatcagcacaaacgtatgcttcaacaagaccgctgattctagggctaacaaacaggccacaacttctctagtaaacaggtgagagaaattgagcatgttggtagccacccacaaaactgactccgtgtggtccctagccaaaaccaccactcacattgaaccacaaccaactttaacattacagttgattgacccattcttccgagaagagaccaaataggagacttaaccgtcatcggcgaagaaaacagacaagaattataatctgcatacacatagagatagattcaatacaatttgtaatgttacatatatatattttgaaccttgtcgttgcgggttttacagatcgtatccaccacaatcgaagcatataagaaataactcttggacatccactcctttagactacagactccaaagaaatttaacccaatcctaaacatggccctgaatttataactggtataactcctcaggggggagacctcgataggtgaatgacaaaattgcaataaaggaaagacatatatactcatgtataattctccatttatataaattaacatgctaaaattttttactaagtggccataaatggtatgggagggtgcatgcgttttagggattttgggttcgaattaatctcaagttgtgtaatataatatatatatatatatataaatattttaatagaaaatatatgttgaaaattcttgataataatcataaatgatgaagtactataatattttaaaatttaaattaataactaaattattatatagtttagcatacatatgctctttattgacatttcataacactttgaagatggtcttataagtttttgaataattctaccataaactcttcttctaaatagatatttcggtagactctctatttgtttcggcacctcgaagaactttttagttcaatttttttctaattgtgtatgtgatagttatttaggactaactataaatttttaaaaaaatttgtatagtatacaataccgataacatgatttacatattttattgtacttgtgactattttttttaaaaatttactggaggtcctaaatagcaactatgtacgcgaccattaaaaaaaattaaattaaaaaaattctctaaatgccgaaacaaataggagattgaccaaaatgaccctttaacgagtttataaagaaattccttaaactttttcctcatctgcaaaactaaaccacctttattatgataagaaaataaaaaaaaaatactcacatattaacggtaagaatataatattttttttataaaaggtaagaatataataattaacatatgtagaatcataattataaaattattattttttattatatcttcataaatatatgtctattagatacatatttaacatttttttattcttgagttgagaaaaaagcacagtagtgatttgatcaaaatagccaaatcgtgattctcgcctttctaatgttcttctatctcttttgctaagcttggtcgggatttcaagattttcttacaaaaggctctccattacttaagttagacaaaaaaattgtgagaaggaaattaagagagtaacttagaaagagaatcgaccatttttctcactaaattatacctattaagatcatttagtaataaatgagggcaataatcaaaatcagttagcttaattgattcatcgacaatttgaatccagtcaaaatttcccgcttaaactcgttaggcttattgcttggattgatgatgttagttgaacccattctacgtccacctagtttgatgacattaatagagctaagccccaaccatcgattgatcccaggtattcttagtagttttggacgcacatgttcttggacattgttaagctttaccttccgttaatgtaccttgttgggatttaccttcattaatgagtaaggttcatggtccaaaatatctcgactccacaataaaccgagccacatgtctgccttagttcgaagattagagccctaatgaaatatttttgtcatgtgttacgacctttcatttcattattagcagccaccaatttcttacacttcaccccaattgagttggtggtgtttttattgtagtgtcctatagagcgtgcttggatgtgctttaagttttattgctttcttctgagagccaatgtttcccagtttgcaattcggttcggttttgcaaattttagtcatttcacttcaaagaaatcactcagctttcgagtttgccctttctctttcccaactatattttgaaccagatttctttgcttctattgaccttgtttatagctaatgacgtgtagtcaataaaacaataacatgaagtacaattatgaataaaaattgcaaaaactgtaaacgatacacaaaatctatagaggttcgacccctttcagcggtaatagtctactcccctttagttttatttctataggagaatatcaagatcacaaggactggctaggtgagttttttaatatctcttgaatgttacaaatattattgcagagcttttactctcttaagaatatagaattctccctatttagtgaaatgatttcactatttacaaggaaaatgatctagaatatttacatttaaaaattaataattacataaaatcatgagtatttgactaatcccacttttctctcatccttctaaattaatctcacaaaaatgttgggttcgttcaggattctcaaattctgatcatttcagttttaaaggctaaatatttactacacagcaaatgtctagaatttttagttgttgtgattgattttagcagacccgaaatatttagtcctgaggatgtatgaatctaagatattttctagatgttttcctgaagagttatcgtgatttccaccacattttatacttaacttgtcactttaggcagagcgtattttaaaggcattgtatcgaatggctctaatagagcttaaggagctaaaaattcaactttaggggatgttggatctagggtttacccaacccagtgttgttggaaattattttaccaggatcttggatctacttacaagtatgtttatt

SEQ ID NO: 112294 - DNA, 4936 bp, Cannabis sativa
  modified_base (4892)..(4895): a, c, t, g, unknown or other
ttttttttttttttttttccaatacatatacatatatatataaatgtatatttaacatattagaaattcatctcttctggatgagccgtacgtaaattcttgaaattttataatctagctttacaggaagcggtttctctaagtttttattattttttttatttaaattaaatatcttttgttgtttcagtcaacaatcatcatcatcgttttcaacttttatggctaaaaagagcgtggaagaaaacgatcttcttccggcgagtaaaagagttaaagcaacatcatggatcaataaggctgaagacgaggacagaatttcgaaactacctgatgcgattattctacacattctctcgtttcttcctagtaaggatttggttccgactagtcttctttcaaagcgttggaaactcatgtggtattcagtcccaacactctctttcttagatactaaacatgctagattgccatggcactatgataggttctgcgattatgtggacactagtttggaacgccgtaagagaggtatgttttttatgggtgattctgtcataactagttttaagcttcagattcatagctatgctagaagtattgctcatcgcatagataaatggtttgcttttgcggttcagaataaagtcaagaaaataagtttaagctttagcaaggaaaccgaatggaatcgcgatcttcgctgcttcgattattactactactgcttacctaaaacactagtagtaaacgcaatgcatttaactattttggagttgggtaaggtggagttgaattctcgttactcatttagttttccatgtttggaatcattgtcaatggatcttgttaggcttgctgataatgatgtgttagataagttgttgttaggttccccttcacttgagaagtttcggttagattgttgtagtttgagaactgatcatcagctcaatataaatagtttcagtctcaagttcttgcaaattcaacttactaaggatatagtggagcaaattagagtggcaaatcttgaatctttggaactatttggtgtttactttggcacaataaatcgctcggtgtgcaagacaattagaaatctttcattgaattgtgattggggtccggaagagtcgtcatcattagaatatcttatttcaaatcttcctctccttgagaatttaactttgagcaattggtatgggttagggatgaatcacattaagatctcgagtaagcaattgaaacgttttgagttgaataacccgtttacagatgaaatgacagttgtaattgaatcagcaccaaagttggaatcattttgttatacgggcaatatcaaatttagtatatcaatggtggagtcatccaatttgttgaatggaacattcataattcttgaccgacaagggaactatgatggaaattggttcatcggtttgatgaatttctttttgaatcttaaatgttgttggaatacaataagcttggatgttgactcagttgaggtatgttcattactcatttcaattgatttgttctgttattaatttatataattagtctatttatcatatatttttttatgttttaatacggtttcttgattctatacatgaaggccctcctcgttccagaaagtttgaagagtatatgtcgttctcctatggttaattgggagcatcttcgagttgttactgaatgcaaaccagaaatggaatcagatttgagagatgctctgatgtgggtttctccttctttaaagacattatctatagccaataagggcattctttagaaactatgactatgctgtagattattgtcttatgtttgtttttcttttacttttcagctggttgctatattagtatctatagagtgaatgagtagacaggatactttaacttgaataatgtatatatttttctgctttcgattttcagttttataacccctacaaatcttgacctgtagaactgtcaagaagttaatttgctgaaaacttttaagaatttctcatggtaattatatggctgcatatatgctctgatgaggaataccaatcagttggattgttaaacattttccccttttcttgttattattttcaattctatgatgcattacttcattttatcttcagtaatctgttcaacaatggttacctcacttgtattgaatttatgcatctttaatctgtacatggatctctcatttcacctacaagctatagaaggatatgttgttgtttaaagcttcgcacatatcatggttttgtgacaactttatgagtggtaccttatcatcattgtactcgtattgctgctggcattattgccagaacatgtcactaagtggctttgaacaaacaaggttcctcccactgtttagttcatgaatatgaaaatcgtgcagaatatcgtttggactcagttctttttgaagggaacagatcttttctgcttcttcatagccaaaagcagggaaccagagaagaaaaaccattgttgttttgatacagactttatacccactctcagtaacaaatctccaagcattaagaataaccataccggtcggttgttctgattgtgggaactgttgctggtgttgtgattttaagaattatgtttgtaagtggctttctacattgttcaactcaaaagcagggtcaaatgaattaaggtaacattctaactttttcgatattccaacactttgaacatagaatgctgtgctgagtttgatgtttttctcaagaaaagctacttcattattgctatagtgatctatagaattctgatctgctattttcttcgcacacacaaaagctcgttatatcatttcgttataattctatgggaatgctatagtgatctatagactgctgatctgcaaattttgtaacaacttgcaggctaaaagttatcagcaaaatacaaaggttggccttatggaagagttgcgttccaattaaggtaaaagttttctgatggctggcagttttgggaaaggtgaatgctcatgacacaatgcaacaaagaagaccatctatctcttctactattggaatgtaccttttccaaatcatgatggcccaggttgttggtggagtttgggagagttgttggtgttgctagttcaagtgttttgtgtgtttagtgggtttctactcccactttgacataaaactctgaatgtgatcaaattaattaagaaagctacttctttatttgcatttgggcaatctattgaacatttaagccaagagcactagtcaatttgacaaagagtggacgattagcgaggactggttcagagctagagtcggctagcattcttttaatttcactctcgacttggatatattatccaagtcggctaggatcggttcaatgaaaaaaaacgttctctgaaccgaacgtgaaagtagttttccatcaaacggctgttctcgcaactccactctcgtcttggattatatttctatcaccaatcgtatgtccatctatgttcagaattgggccaattattagtgtttaaaatgttactacgtcaaatgaggtataatacctcaaatatgtacctcgtcatttttcttaactaaatgtaatgaatagttatgagctaaatatttttatattcttttcacttttatttagtttaatttattttcagaaaaaaatttatatgaaaaaaaaaaccaacctttattacaattttatctctataacttttatacttcttttattttctttaccaatataacttttgcacacacataaaccttttatgatgatgtcattatattctattgatactcaaaatatttttcttatcttttatatacatgttcactattttatttttagttttcattttaatttttcatttcaatttcattttgaattatttttctacaatcaaaatcaattttttctctaaaaaattactccccacgatctccaactaccgttaaagttccatccaacgatttttcttttgttttttctttcttccaaattctgtgtaaatggtcgtgacccgctcctcttcttcaccatccccattcgtgaaaaaaatcattgttaagaagcccatttgtaaaagctctaaactaacaacaatgagtgttaaatcattgttgaacaaagagatagggaaacaaactatagttaaagatgataactctaatgaagattttgttgaaccagcaacaaaaccaaatggtcctttgaagaaaaaattatagaggaaagagtttgattctagaagttaagatggggaagaagcatgcaaatcaaatttctaaggtttggtttcagtttcttttcaattttgccctaattttgaaatgttgtctctgttttgtttagtattttttcttgtgattttagttatagggttttatatatttaatttattttgttgctttcttaatgatagattttataatttagaatattgttagattctattttaatttatgtttgagacatctaattccgatgatgatggaagctatgatgacaactccagtaatttttccgataactttttttagcaacactctatgctccagtaacttttcctgtaatatttattattagaaatttatttactttatttatgttcttttatttggtttcccgtatttaaaattttgtttattttttaatcccatatctttttacattattttttgaagccatataaaagtaaatttttaattttccctcatatttatgaaaatttacgggatgcacttatacacttctatctcttttggtatatctgaaataaatttttagtcaattttttttctcatggtcatgtacgctatatttatgagaattgctaaagggcaccactggtgcctagcaccnnnntacgtgtcaatatcgctattggtgcaattaagtatcgggtc

SEQ ID NO: 112295 - DNA, 7310 bp, Cannabis sativa
  modified_base (7201)..(7207): a, c, t, g, unknown or other
aaataatttccaacattttcttggggtcttgaaactacgagaagcttttaatacttttattcctttcgcagaactcggtaaataattcgccatcaaattgagttctattgtcaaatactattttaatgggtattccaaatctgcaaattatgttcttgacgaaaaaatcgagaaccttcttgcaagttatggaaactagaggttcagcctctctccattttgtgaagaagtcgactgccactactgcgtactttgctcctccttgccctgtgggtaatgcccaatcaattcgattccccatattgcaaatgggtatggcgaggtcatcattctcatttatgttggtggtacgcgaggcttatgtgaaaatctttgacctttatcacacctcttgaaaaatttatgtgtgtctttatttattgttggtcaatagtatccttgttagattatcttctttgacaagctttgccaacccacatgatccccacaaaaaccttcatgaatttctttgattatctcgcttgcttctatggggagttcacatcgtaggagaggcattgaataaccccttctatataatttgccttctactatagtatagcgagacattgaatacaagagtttgcgcgctttgttttcatctgtaggaagttgtccattgagtagatagttaataatgggagtcatccattgggtgagacatcaatcgtctcaacttcttccttttcacattaactagggtcgcttagcatctccactggtaccaaatttaaattatcaagttcattttgtgaggacaaattggctagcgcatcggcattagagttgtgctctcttggaattcgttcaattttaaaataatctaacttctccatgttttttcaaactttctccaaatatttttccatctttaaacctttgctctgatattcgcctagaacttgattcacaatcaattgtgagtcaccatagcatataagatttttgacttttaatgttttggccattcttgaaccaaccaacaaagcttcatattcagccttgttgttagaggtatcaaattggaatcttaatgcatgatgaaatttaaagttctggcgagatcagtatcacccctgcacccaagtcattttcattagatgttccatccacgtataatttccaagttttcgcgtctcgcttgacaagtggattttcatctagaactattccctctattaggaaatcggccaaagtgtggctcttaatggatgttcttgggtgataggttatatcgaattgacccagtttgatacaccattttatcaaccttctagaagcgtctggttttgaaaagacttgtcttaatggttgattggtcaaaacctttattggatgtgcttggaagtaaggccttagtttacgagatacatgaattgcaagtttttcaagaggggtatatcttgattctatccctaataaccttttactaacatagtaaataggttgctggtgctttccttcttctcgcaccagtgccacacagattgcagattctaagacggccaagtagatgtataaagtctctctagttattagtttggaaaaaactggaggtgttgataaatgtttctttatgctcttaaaggcttccttgcactccttcgtccattctaactttttgttgcctcgcaacacattaaaaaatgttaagcatttattagttgatttcgagatgaatctatttagcgctgccattctccctgtcaaggcttgaatttcttttgcccttgtgggcgagggcatctctatcaaagccttaatttttaaagattcacttcaatgcccctcgcgttaactataaaacctagaaacttccccgaggagactccaatggaacagttctttcggttgagtttcatgttgtacttcttgagtatttcaaagcatttcgcgaggtcttttgtatgatcttcacactttgccgactttaccaacaaatcatcgacatagacttccatgttcctccttatctattttttgaaaattccatttactagtcgcttatatgttgccccagcattcttcaaaccaaaaggcatgactttatagcaataaagtcccatgttggttacgaaacttgtatgatctctatctgggacatacatcttgatcttggtatatccagaatatgcatccatgaatgtcattagctcgtgtctagcagttgcatccaccaactggtcgatcattggcagtggaaagcatcctttggccatgctttatttaagtctgaaaagttaatacaagttctccaagtaccgtttggcttctaacgagaatgggattcaatatccatgaggggtagaatgcctcgcgtataaaattgttggttaataacttgtccacttcttctttaagtgccccttgtctttcagaatccaagggtcgtcttttttgccttttagctgggtaatttgggtcgatattcagatggtagcaaatcactttagggttaatccctaccaaatctgaatggctccaggcaaattgatcctggtttgtcttcaaaaagttcattaactgctattttagtttttcattaagatttttcccaataaacacacatctagtgggattgtctgaatctaaaataatttcttccagttcttcaattagttttaactggtttttctcatcttgaatctagggatccaaatcctcttctttcttctcgctttcctctgttatggccaccattaattgatggttggcttgtctattctgaagttctatgcgatagcactcgcgagccaatagttggtcacctcgcactacacctactccggatgatgtttggaactttaaggatagatgcttgattgaactaactgcccctattccaatcaatacagggcgacccatcaatatgttatataccgatggtatatcaacaactaggaaattctgcactatagttgtaggtaatggttgctcgcctatagttaatgggagttcaataatgccttgactggtgacactatctccggtagatccacataaattcaccatacaaggttttaacttttcattttatattcccatttctttaacgtatcctataaaggatatttaccgagcttccattatccaccaacactatttttatccttttgttggcaagttgtactgtaatcaccagaggatcgacgtgtggatacctcacatgtttcgtatcttcctctgagaacacgattggaggttcttctattttttctttctttgatggttctagagcaaaaactgattgctcgtttttaacttcattgacatatcacttatgggcattactgctttctccagcgaaatgtggccctcccaagataaccaaaatgtcatccccttccacgggaggaggttgtatcccttggttttcctgggttactgggcagattttgctgattttgttcattaccttgtcgtcatacatactattgaaaataaccacgcgagataaggctctctatctcgtctttcaactgacgacattctttcgttgtatgccctatgtccttatgaaatcgacagaattttgttgaatctcttttgtgtctcgcatgtctcattgactcaggcttgcagaatgcaaccctgtgctcatttgaaagaaagatgttttccatgttatcttgagtttcattgagcttggtgtaaacagtgtaaattggcacatacttatcgtgctttttctgtttctttttatttttagatgattccctatagtcatctttctcttggtgtttgaaccatctgtattgtcatcctttgtcgagatggttcttgctatggcagtgctacatttacttaccgagccaatctttagcaattctatctcattcctcgcttcctctttgcgcaaaaacattggcgctctcacagctcgcccccaacttttgagaggtcagtcatattccctacttgaagagcagtaagttgaatactgccattcaagtttctaactttagtagaggtagtactaaatcgactcaggtaagccttaagtgtctcgcctggttgctgctttatgttagtaagggaggatgcttcaggccacctctctcttgctgcctaaaattgtttcttaaaatccttggacagctgctccgaagaagttattgaatgatgggtaaacttattgaaccagctactcgttgcttcagtcagtaaggtagggaataaaatacaacgtaaattattcgagacactgctggctcgcattatggtattaaaattattaacgtgagcaacgggatccaaagtcccattgtattgcgagatgtgagggttttaaatccttgggggaatttagagttcttaatgtatggatggaaaggctcgggctcttcatgcgagtcataaccaggcaatttcccttattcctcatcttggtatcttctgaattgatcttccaactcaatgatttgcaattagattggatcctcttgttatcggttattattgtgttttgtcgtaaattaggtacattctgatttaagtgcttgcataaatggggttatctccaattcaaatgttcacgaagatctggttgtcttcattcatagttactcacagaccttgtatctgagaaactctcatattggtagctcctcgtattgctcatactctcttgattagcataataccctgagctacagctttccttgtcctacacaaatcttctccttcgaaaaaggttggacatacaccctctattgaggtatgtatatgactcctccctatcagtttgagaaggacgcttggggtgtctcggtggtaatccactggtcctaggttgagtcccaggatttctcttattatttcgagagatctcttcttccgtacttcagggttaccttatgttctcatttctacgagaagactctggcacgtcattgttttcattcccctaattcgtgaaaccctggggtctttgaggtactccttgacgaggtgcttgattattctaatgttcgtctcttggaacatccctagttccctaggttgtacctcctgggtgttctggggattttcttgatatgtttcttgcctcctggttcttgaatctcgaggtctacctcgtggccttctcactccagaatcatgttagttctgtgcattttttccttgagtcgccgaggttgcggctgcctctctttctaactcaacgtttagctggttagacttgaccaagcattgccggagttgtcgattttccaattctactaatggtacataactagggggatcataggcatcctcacttttgggtacataatcagtactagtattgatttcctcattccatctttctaggttttgatcatgaccaccttggcttcttcttgatcgtgtttttgatgaagtgggtggcctttgtgaacctgttggtgctttcccaggacgacgattagtctgttcaggatgactattgccgttgattatcatcagccatggaccaattttttgttggttaagagggattttttttgagttttatcacgtaggctctcaatgaaagcaccaaactgttaacgcagtttttcgttaaccgatattgagcctttttcgtaataaatttaacacagatatacataagaaaattgataagtataacaataattataatgacactagatattttacgtggttttgcagttaaatctacatactccacgagtctatcttattcaagatatttcaggatatttaatacagtgttccaattagtaatctctctctctccaagattttttgtccctttttctgtagaatctacccgtatttataggaatatagattggcagttatttacatttaaatttgaattacctgaccatttatcataaaacatgggctttgatcatgttctatttaaacacgtgtagataacaattgataaccacactaccacttatcattcctatcttcaaggcggttaacgctgacgtggatagagccatctcgctttgcatatagaagaccaccaaatagtaacttggtttaattatatgccttccagcaatggcatgagctccagtgtactgagcaaacttaaaaactgctctttgaccacaaggccttgcagattgtaaatcatgttttgcatgtttccaagttcttatacttagttattatgatgtggattatacgctaagtgtttcaataaccaattcatctcgtcaatatttccttatatgtagcgagatggatgtctctctatacattactcgtagtttccttgggattgtgccctctaaggtaagatggtttctcttcaatatgggaattgatagtttgtgtatccttgtctctcctaaaactatacagtaagcgagatatgaatatactctattaattttatatttaatcagttattccattttgcatttaatgatataatcattattataactgttggttcatattccacttgattgacacgtgtcactctctaaagtatagccgaatttcaggtagaacaagaggatgaatagtacgcttttaaataaggtgagattcttgataattgaatcttgttatctaatcaacaagagtccaagtagagttattcaactcaagacaccatatgagatgtggaatggcaagccaccagcagttgcacacctcaaaacttttggatgtgcagcatatgcacataatgtagaagacatgttgagcaagcggtccgtaaggtgtgttccaatttgatacgaaattagagtcaaaggctataggttgttgtcaacaaaaaacaacaagatcattgtaagtagagatgtatttttcaatgaacttgattttccttttaaaagaaattagaaaggtgttgatagttctgatatttcaggtagcttacaatcaaaactggagtggaaattaaggtagaaccaggacatactgagttggagaagatggactagttggagactaaaactaaaaagaaaaatcaagaggaacatttaataaattacgaacttgcaaggagcagaagcaggagaaaaacaatacccccaatgaagtatacaaaagctgacataatttcttgtgcactttcaattgtggaaagatcaatgatgaaagtgcctatgacctatatggaagcaattagctacaaggatgcaaaaaaatggagcaagtctatgttgaaaatattttaccaggnnnnnnntttactaacaagtatggttcattaacatcctaatatgaatttctaaaacaatgaaatgaacacataagggtttaagaaaaccttacattgggtgcaccggaat

SEQ ID NO: 112296 - DNA, 4044 bp, Cannabis sativa
  modified_base (2938)..(2944): a, c, t, g, unknown or other
  modified_base (4017)..(4019): a, c, t, g, unknown or other
cctgacactcatttaatgtatcctgagacccatctaatgtaccacggaatacattccgtgaaagtacatcacgagacaaaatcatatccctataaatataatatccaatatctttacatacttacgctttggtaattatcctacatatatacctttacatgaaattaatgaatatatatataccacatatgaactaataattaagaatactaaaattaatattaaaattatgttgctgaaataaaaactagtacttgtaaacttttttatgagtacatatacacgtacgttaattaattatatgtaatatcaacatcgaaggtgttattttcacataaaagtatttttctcaactgtaaagagaaaataagagagccataattgcattaataattaatgctgaagtagtaggtggtgactgatatatatatatatacaaaatatatatttaattattatgaaataattatatgggattttcaatttggaaggatttggtttgaatttttgttttcttttgtagtctttattggacttaaacaaattacaagtttttgtcaattaattttagcaaaaccatgtgaataatttttgacattttgcttctatatatatatatatatatatttcaaaccattttctcttattattttttatttaggaaatccattgttgttgtagggcatttcccaaaacacaaatctgacaataagtatttttttttttttgaaatcctgacaataagtatttaatgtatgcaacaaatgcaatttaattaaatggtagaaaatgcaaaataaaataagaattcattaatggggtttgtttttttttattttttttttattttgaagaaatatcaaaccatctagataaaaaataagggtaggaataggatatatatatgtttggtctggaacaattttagtcatctactatagatattattatagtgagaatttattttttaagaaaaatgtatatttaaaaattgataaattattgtgtgagtgaaattagaaagaaggtcagatgaaatggggtccaattaattaagatgatgaatatcaaagaaaagagtttgcctataatggtggaaaaatagctgaaagcaacattagaactactaaatctcttataattaataattctttgcctatatatttatttcatcaattttatgcaacattagagtttgctttgatttaataaatattgcttgtttatttcatcaattttaagctgatttgccgcatataattatgaacgtctatatcccataattaaatcaaaaagaaaaaaaaaatgatgaaattacaatttaattgtggttaaaaacaaaaacaaaaacttatgatgtaattgttttttttttttctaaacatgaaatatcaacttcattgaaataaagcattcaaattacaaattggcatgaaaattatctgccagaacatcaacatcatgaatgctacgatcagaatagaaacaagagcgcctagctacgaagtgggctactttgtttgctgatcgtctaacaaaacgaaaattaacattaggtagagaggataagagaattttacaatcatgaatgtgttagtttaatttattagttttagtgctctagttaatttatttacaaggagtattatttaaaaaaaaaaaattgaatatataatcttatatatatgaataattaaatcttctaacatacacaattattatgtgagtgagacactttgttttaatatggtataagaaaattagaatttatgttgtttattgagttgtaaaagtggttaaagttttgctaaaacaagcttagagctatgtgggcttaacattaacatgtgtatctatagatcaatttaattattaaatcaaaataaatatttgttatttattaaaatacatacattattttttttttgtttagcaagtactccatgtaagtaagatttcaaatttgtattaaatttggtacaaaaaataaatttttgttatatttaatttactatatatgattttactccaatgcataagaaaaaaataattaattatattgatggatatttaatattttattgagaatatacaaaaattattattttttattcttttattatttaaataatgataatatagtaaataaataatgtaaagtgaagtaaaagtcaatgaatcattatatttaaataaaaaaaataatgtttattgtgaacaaaatttggcacattttatttcttgtgttaaatttgacacaatttttagtatgtaccaaatttagcacactcagtagtagtttttgttaagtgtaatatagcaataatttttttttttttggtagaaatgctcttattttaatatgatatatttaattttttttttttgaataactattctaattatttaaaaaaagcattgtaggagactatgtaacactgctgataactgatataaactaaagcatattttctcaaatacttaaaaatagtaaaaagttacaaaaatacgaattgacagtttcatttttagttttacgaattttaacttttttttttattattttatataaaaatacaaacaattatttttttgcagcaacatgaaaatagtatgaaaatactagtaaaaggatggtacttcatgaagtgaaggtgaattgagttcatgggctacgttgtggggtgtattgggttgggttgggttaatgggcttatgactggattatagtaaggaaatttacatggtatactaatttttgctattttttttataaaaatactgctatacggtatttttttacttttttactgtgttttttataaatttcatactgcagtatactgtgttaagttttaactagtgttctactggtgttttttagttgttctactgtttttttgagttgttctattttgtgttctactggtgttttatnnnnnnncagtatttttgaaaacttttccatgtgacagtatttttataaaaattacctcaaattctagtatttttgtaagtttcccttatagtatggttctgtttgggttggattcttgggcttaagggaatattgtagggctcctgattgcgttggagatgaaggatcagaagtttacataatacactatttttttttttttttgtgaatttttatatttttatgtttaaaggtttttttatatatatatattttgatggtattctataaaaataatacaaaaacaacaaaaaaaaattacataaaagtaatatgaaaataatattaaaataataacaaaaaataacatacaaataacgaaaaataaacaacaaattaataagagcacaacataataatatatgaaaataccgtacttattgtaaataacattataaaaatcgtaaaaatgtttaaaattctgtataactgtattttgtaatttttgtgtatttgtgaaataatcccaagaatttaagagttcatgggctacatggtgggtgtattgaaagagaaaatttgattgcatacccactttactttacttgtttcaattcttacctttatttttatatcctttaaaatatacccacttttataaatgatatctctattataccgtttaagtttatataaattatgtgctagacttaagtaaagggtgaggatatattaggcaaattactcacaaaagtaggtatatttgaatgaaatataatatgaaggtatttttgattaataaataaaaaaaatattcttcaactttccccgtattgaaatggttcttgggcctaggactgagtatagttgggttcttgtttgggttggattcttgggccaacaaatggaatattgttgggttcctgattggattggagatgtaggatttgaatcttgggcttggaaatggggtgcatgaaaagaagactttagttttctgaaaatgcattgtgatatataagttggaaacttacaaaaatactggaatttgggttaacttttataaaaatactatcacacggaatttttttcaaaaatannntgtttttataaaacaccagtaaaac

SEQ ID NO: 112297 - DNA, 7449 bp, Cannabis sativa
aatgattttagagataaccttgcattaacacctttatgcataatacccaatgtatacacacgcttaatgacaattccagaagagagatagagaccgtgcaagtctactcagcttattagctccatttttaattaatcgaaaaaaaaataaataaaaagaaaacaattagctccatttttttaaaatataaatatacatcagtgagaatgtttataaatgaatcaccagggggacctcatttctctttctttttaggaaaaatgaaaatccccatttatatattttattgatcaacacatgctttgcttacaaaaagaatgcaatcatgccatttgttttttctttttttttttttttttttttttgctttatgaagaccattgatcaggtacagtaagaaaataagtagtcattgcctttcgaaaccttttcttgtactgttttggagaaataatggttggggaagcattcttcggaccacccagaattccagaggccttaacccaagtttccaaatgcttgtcccatgtgtactgtctcatgaaatcaatgattcccaacaccagctccttcttctcatcatccaccccaaccaaaagtgagtagtccatcacatcaacagactggacaagcagccaaaagaaaaacacataagcaaaccattggtttaaataaataaaaaaaaaaaatgtttcatacgacctttagattctctgaaaaaaaaaattactgcaaccaaaaagcataatctagaaagtgtgaaactattaccgccagaaaggccgtatcgttccaaacagctctttcaaggcttctctttgctttgcttccgagaaatatgggctttgtccgaagggtttccaacaaattcatatctagaagtactttgttttccccagttgtatcattattgtaacgtgaacgagcggagcccttaagatcgtagacccttgatatatttctcttgaagaaaaggttctccatcaccatcaaatccatccttgtttcctttccacctttcatgtgtttactagtgacctgccaatgcaaatcaagaattaagagaaaaaacaatctgatgtccaactaatctcatgtatagccactaatttacaaacacattaacaaaaaaactaatacctgatatataccgagaattttggctagagaagtaggacttcccgagccaagggagtctgtcaggtatttaaaatatgcaggtgcaaattcttcaaaagaatccaactctgtctttgtgacttgctttacaatgaatctctcatccaatgatttggcaaaatacacattgcttttgcccccttgtgcactccatcgcttgcagcggctcaatgatcgtacaaagtctacttcactaggacaacatttctttctaagagagtcgaacaattctgcaaagtagcatgtaacagaaaacttcactttgtcatctccaaatgagagcctcaaatgtggagattttttaaaatccgcaaataaggaactgatggatgacggagtatcttctgatccacttccataacgggtataatccaagtccatagagccaaaagattgccaggctgaaatagtggaagctgcagtattatctttgtggctctcatgctgactgcaagatacctcatgatcatttgatttattagcaacccagtcatcatattctttggaactaagcgcatatgatattatactggtgggttcattatcataaacagcaacaactatatcactctggcacgtctggggtaacaacattcgtacaccttcagtcacatgggatgcagaagagataaatgaaggtgtggaactcaaaactatatttgacttctgagcctcctgaggaaatatttgggagtaagttctcattacgctaaccggatctctgatcatattcctgaaatctccggaggcgtggaaagatctaagagttgacacatgcaaagaagaaggaggcagtccttttcgaactctttcttgaactcttaaagcagaatcaaaagaatgatttcttgctgacatcgccagccttctaataggtacagtatcactttgacttacctgcctcacaataccagcttgaagcccactttgagcactcaagggaagttgatcagtacctgtccaagcagaatctattctctcagaaagagtagattcatgagaaggaaagctttcggaggaattcatatctttagaggtttttccatctgcaagtgtttcctcctgcttgtcatgatgacacaagttcagttcagagtcattagggatgcaaggctcactccgcggcgacaatacatcatttctagggaagtctaaccaacttaatgattcagacacatttatttcatgtccatattcaagcttgtcttccttacaaaatgaatcactaatcaactctactggatgaccaaataaatcaccttgggcagccctggaaaatgaattacttttgagaagagtatccagtgaataaaatcggcgatcccaaacatgtgaaccaattaggagagaacgccttaagcgatttagttccaaaacatctacagctacttggcccagttgtgaaatctccataaaagcaggttgcaaaatagcctgtttcaagtagcaaatgaaaagacaacaaatttgtgatatgaaggatgattgaaaattaaataactacaaaagcacaagtatttataaattgtcaatttgaggacttgtcacaactatgctccatttccaacttacaatgtattcatttctttcttttttcacaagatctttcagctccaatatgcagctttgtaaatccctagtgtcaaaggcttcatgtccaaaagatcgagttttatcttccataccatcgagtacatcagatatttcagcatacaaggtttccatttttcccatcaactgtgaatgtatttaattgttaggacagtcatcaacacactcacaaaagaattaaaccagttccgaaattagtagtctaaacaaaaaatgctaaaaagaaaaactctgattttcaaacctcagttgcctcttttctcgtccactccggatggacatagccattaaattcaagtaatgatggcggcaagcgtacagagagaatatctataggggaataccggaagaaagcaaccatacttccaaacctgttaattaaagtcttcaatatcaaaatcactatattacaaactattattataaaattatgtattagcacttacccgtagtagcgaagacaatccttttgcaacgaatgaccacaagttgcaatgcgattagcagttgcgtgatttgagaaactaagttccaaaaacttcccaaaagaaagtccccaagcagcatctgacataaccactctgcgattggctggtggaactccatctatatgagcacatctcaggcaacgatgccacatccagattttaccgtctcgttctccgggtagttttaaagaagaaagacgcctgacattaatcgtaagatttccctgctgatgggtatagcataagacatgggcttcagctgattctttgcaagacctacaatgcgatgtctgagaataaaaaaaatagttaattggtcctttcaacccagagtcacaaaatatgaatagggaaacatgtaaacaattaccggatcaaacaagtcgtcacgaagatatctccctagaggcttgtcaaaacagccataaaacttaatgcgcataagtcgggagcgttcacaaacaattcctttaagtacacaatgactagaaaaagataccaatatgctttgatgactatcagcagctgagaagtactcacttgaaacctcattttcatctatcctttcagactttgtcagctcataaatctcttcaggttgtttctcgtcttgtggtaagtttaccattaaatcttgttgggaaaaatttctggcatcggaaaagatcctggaatctgtgacataattggacgggttcaatgaagtgtttagaccaatattagattcaaaatcatcattgtacgcatctggtactatgttttccatggaaggagagtccgcagcatcaactagcaaaggaaagtcattttctaggccaaaatgctcagacagagagccacatccttccaattcaggattgatatccaaaatttcccgatcatgagcagaaccctcagcaactgctacataattagttgaagcaattgaatcaaagttcacagaaaccgtaggatcagctgtttctttctcttgaatagcaattgactgtccttgtgccatcttcggcagggtagcaccctcatctgcaagaaaggaagtctcaagggataaatgataagcagcaaaaactgcatattgaacgacatgtttaaccttcttcagttcttcacgacttttgcccctcaacagaacctacacaagaagccccaacaacctagttagacgtaatgaattatccagtctgcgagaatagtaaaatataatgcagttcccgaataaatgaaacaaaaagtactggaaataaaatgtcagccaaagagggtagaaactacacaagcatcaaggaacattaccgtgcaacctaaacgtcttggacacccttcaaaaaacatcaaggtttttgttggcttcttgtttaactgattgctattctcatgttcttcagaaactttttccaagcgaaataattcacagtgccctaatcgagttgttgatatattatcaattgatggcgtgataagagcaccagtgcaccgagctatacgctccagcaaaggctttttaacattcagcactaacgaaatttccttcgtgagcaaataatcttgggcatatgaagaaacacttttttctactaacagaacatttggacggagagcttcaatctttgaaatgatagtcttcagatgctcattttcctgcacaaaacaattgctttaaaagtttatgataacatttcattatacgtagcttaaaaatcagcaaattatccggaaatacctgctgaagtaaagtatcaaaagaagccaactgatttggaactttctggtattccagtgctcctcctaaaataagtaacctggcatgtttgtattgtgaggtcatgcgcttgtgctttatgtttttggtacaaaccactccctttacaagggtgctgcatacacaacaacacggtaatattaagaatgcatccacgtatgagagatctaaaatgttgggatatcaaacatctccggaatgcaaaagacatatatacctatcaactggacttcctgatgctatacatttgacctttacataatcaccaggatccatactgcctcctctgctagtatctggcttcacagaatttgcagcttgccatgcaactgttgtaactatgtcaagccaatcctcacttccattctcttggccaattttgataccttctccttgtagcagctgtgaaacaagagccctaaaatgcccctggaccacagctttaagaggctccttgttatcttcattaggtttctctttcgctggaaagatgctagaaagactaccacttaatgagaagaatgcacctgagtcaccaaaatcatcatcatcgtcatcatcataagcaaaagatccattctctgcctcatcattttcatcttcagggggagggggaaaccagagaagaccattattttcgaagtccagtggtctttgtgatctctcatattggttacgaaaaattgacaagtcatctgaacagtattctgtgttttctggatcctcatactctaacacgggcctttttaaaacaggctcttgaccaaaatgactatttcgagacacactttccaccttctgtacagaatgcccaactgaaaaattaatcctagaggggttctcaaaagaacttgatactacagacttagagctatatctaacactaacagtatttgaatctacatcggcattgtcatgacaatattcacttgaagggctaagaaggtgcttccccgaatcctctgcatcttcttcatcactcctgcattaataaagatagatttactgaggcaggcaatatattaaaaagaaaaaacgagaaacaacaatcaagacaaaccaaatcatcaaaaagtatatcatcgatatgacatgaaccaagaccgggagttataccagctttccatttatttatttaatgatttatttttatttatttaaaaaacaaaaaaagaaaaaaaacaagaaagagaaagaaagctttccatttataatttgtaacaccaattataaccgtacaaaacattgaaaatttggactttaaacagtttcatatggtttaataataaacatgtcatgtgtgaggaaatccaagagaaaaaccttcaaaatctgaagaaaaacatctaccaaaactacacccaacctgattaaaagcttacctactagacgaggtatgaacatatacaggagatggatgaccgctaaatgaggacataacctcacttgtaatggcatggggagaataaccataatcccgggcttcaagatatcgtgaaaagtgatcactctgaatcgattccgcatatgtagaacacttgattctttcaccgtgaaagcacggagatggtggttcagggctttcacggggagaagcagatgggtgtactttctcattgaatttgctcccaactacccctctcattcccgtctcagaacataacttgcagaacttcattacaccgctagattcaataacaagtgactcataatcagggatacatttcccacaaaaccacctaccacaactttggcaatggtatctcggagaatgactggagaagtttgtatggcattcacaacacatattgttaccgttttcgggcatttcaaattcgccggaaaaacgtatatcgcttgcttctcggtagagccaagacttaacctttactattagatctaatagtgaagtatcaggtattcccatagaatgtaataacccaaccaagaattggaaccacctcctcctcccaaactttttttttcacaactctttctaaatttagtatttttttttcaagtttttgttaaaaaaaaaaaaaatctactctcaaactcgagttatggaatactctggtgtaaaaattaaccaaaaatatttgtaaggataaacccacagataaaaatggtgggcgactatggatgtgggttttgaacagattttgacttttttttgacttggttttttctttttctttttttctcttctttgtttttccttttcaaaaatgggaatagaaagaaataagtcctccaagaatcacaaaatatttcagaggaaatcgacaatataagatcaaacaaaactaaatatatttacaacccaaatcatatcccaataatcctcaacacatacccttcccaaaataaaagaaaaaaaaatgaaacaataactaacatttgttaataaat

SEQ ID NO: 112298 - DNA, 1679 bp, Cannabis sativa
aaaataaaaataaaaaaaattcttaaaacattattattgacatgcttgcccggtcacatttattatttatttcatttgtatatttattatgtcggtggaaattaaaaatgattatttatcgtaattatattagctataatcattttatccgtattttttcttttaaataaaaactataattatgttcgaaagaaagttggttaattgaaaaaagtacagaaaaaaaaaaaggtttctgagttgttggccacttcccatgccataatagcattgtttcaatgttttaattaagaaataattgttttcattgaaaagataagatgtgtctaccttggtagagtttctttctcgagtaccccatttttggagttttcttctgttttacgaataattaaattaaacaagttttgtttaagtttgccaaaaaagtatttttaactttatcgttatccaaaggactaaataagagccaaaaataatgatgaaaaggagtgatgtgttggtgaaattgaaattgaaaagagagatccaatggtcgaggtagctgggcatgcagtatccctaaacccatgcctgtcctcttctgttcttctgttgccatatgacattgacatgtgatgtagtcgtagactactactaagtaattaagtcactacagtacaattatgaccgttgaatttaatatacacataacatcacaataataatttttactttattattatcatgctggtaagtaaaataatccacccaagtgaatgagtagagtacttactactaatttgctttcatgacattacaacatattaattatagcacgacttaattaatttagtgcaaaaggactaaaatcaacacaaaacaaaatcctaagctagaaagagatgaaagatcaaacaattgaactcacattacaacaacaacaacaacaacaacacctctttgcatttctttccatctctctttttttctttttcaattgatgattaattaatagcactttttgggctcgaaggcaaatggaccaacggagtagtaaagaggggcaagtttgtcgacgggggatttgggcatctcaggccttaaaatgccacccttgtcaccaccgtggagggccgagggaatgtggcagttggggagtggagacttgagcaatgccactgagcacttgtgaactccataagttgtcaagaactttggttttattacgaagtaaccgtttttgtctgttgttccgtcctcgtacaaatggtactttgtgtttttacacactaatctcacactagcacctatataaaatcaaaacgaaattcagatataggaaagtcccacattggttaaataaagtgtcattatgtagtttatatattaaaacagaagaagaaactcaccttcaacttttgtagcgtttaatagtgtgttgactcctgagtatttgcaaggcttacagtaaaccactccttgaacagccaccatcttccttggtggaagaacgtaaggtgggtgaaccggcggcttcgctggtggagtcgatggctttggctttggtgcagggttgtacggttttggtggtggagtggctggcttgggtgcaggggtgtatggcttgggtggtggagtggctggcttaggtgggggagtggctcgcttgggtgctggggtgtatggctttggtggtg

SEQ ID NO: 112299 - DNA, 1457 bp, Cannabis sativa
  modified_base (55)..(63): a, c, t, g, unknown or other
ttattcttatttataactggcctaaattgaaacttaatttttttataacaaattnnnnnnnnntcttgaatagagtattcttaaataaaggttctactataataactaatttttttttcgtttcattattctcaataggaccgactctgagtaataataggccgaagatttttttttttgtgtgttatctaaaataaagtgtgatattaggtttattttcacgaaattttacaaaaataccattttttaaaatactatacacaaattttgggccctaagtttgagtggccttaagcgcagacctaacgagaaaattagactctatactctttttatattgtcctcttttatttttaccttctttttaaagtctattatttttacctcttttttaagacatttcaattttgcccctgtcacttcaaaatactctttatgtgaatcccttatgtcaggatattttgggtacaatacatataaaaagaggtatttttcgattaaataaaaattagaggtaaatttagttaattaattaatagaagtgacatttttcaacttaaccctagacctaacccgtcttagtctaggaccgggcctcctcccaactgactacaaactaattaagtttggcttcacaaaatcattatactcaagatctaagcctcccaacaaattatatataagatatattgattaattgaaagtaaaagagctagtagtactaacaatttgataaaatgttgattaatatatgaaaattatgttggacccaaacaatagccgtatcatcaaggaatgaaaatttttgtgtagattggagcaaaagtaaaggagattggaatctattcgagtaggagctcgcgtttgattagctagttagtgaggcaataagacgatgatttgtagctggtctgaaaaatcaagggactagaatttggagtgaagtatggagtgggtgccaacatggtagattgaaaaaattggaagaatttgggtgatagttttagaaacatttcaaatggaaaagaatattatttatgttgttatatgaatagttgtactaaatgaatgtgcatagctagcgtagaatataatcactttgaatgtatagacaagtctctagaagacaaatgtatgagtaattttactttaaaaaagaaaaaaaaatgaaatatttaagtaattcaaacatacttttttattttgcatgttaaatttaatgtcagatgctattaatatctaataacaatgctttttatttatgttgtgttgttgataaagagatagacaacatcaaaaaaaaaagatctaattaggggtgttcttgtttattgattgatttggtcagaatttataattttttcaacccaattaaatgattaagggtccgtttggcacagcttttggaaaagctaaaagctgcttttcaaaaaagctgtgacaaaaaggtgtttggt

SEQ ID NO: 112300 - DNA, 1123 bp, Cannabis sativa
atttccaagatgaacttgtttaaccagtctacctgaatttagaggccatggaacaaacataatcatgcaaatcattacacatgacacacaaacaagaaaatagtattttatttgcaaagaaaatgcaaatactaactcgatcattatccggggttttcatccacaatggaatttcattcatgatttcttctaaagaacttgtgtctagctcatttagtggcttcataattggatcctgcaacatctttaagtggtcaatcttatacttatatattaaaacccaaagtgaactaaatgatttcaaatgctaatctgtttgcaaatacagaggaaaacaagaactaataaacacaatatatatacctttatatcattggagtctctgtaaatgaaaagaataaaacccaacaagagtccactgcagagtccaattacaaaaccaagaagttccaagaaactgcttagaagccccatatcttctaatacaataatagttcagaaaaactaatgaaaaagaaaagaatataagtaaagaaagagagatagggaaactataatatgtaaggaaactattttcttgagaaactagaaaacaaaaccattgttattattattaaaaaaagaaaaataagaggaagaagaagaaaaaacagagcgccaaaatatgatggtatcggtaagggacaacgctacagcttgtcgtttacagttacgattcaattcaaaacagtgtacacatagctttgcctttgggcacgtgaaactacctctgcactttccttttttttttttcttgtatggatttcttcttaattacttatactatttttttttttttttttggaaaggtttgattttatttatgaaaatagatttgttattatattcttttggtaatactattacttacctcaagatgagctgtttactaaaataataaagagagaatgactttctttctttgaatggtaaattaacattatggattcgattggtatgctctattattataccgtattatattatatagtattatattaaattgtattttatataattttatgtaaaattatatgtagttttaacatttatagacacctaaatatataatattttagtataa

SEQ ID NO: 112301 - DNA, 8664 bp, Cannabis sativa
  modified_base (36)..(38): a, c, t, g, unknown or other
  modified_base (409)..(415): a, c, t, g, unknown or other
  modified_base (3259)..(3262): a, c, t, g, unknown or other
ttttcaaaatgtataaatttttaaaataattttttnnngcacattttttgtaattattttatttttgttgtacatttatgaaaaaagccctttttctattataaccaaaaaaacttacaaaaaattacaataagacttattaggatttttgtccccgaactttgacatgtaccaaattatgtttcttgaactttgaaggtcattaaaaatgcccactgaactattgaaattgttaaatttaaggacttttgtccaattttagtaaaaaaattataacatggatgaaagttcagggggcatgatttagtaaatgtcaaagttcgaggggcataatttagtagatatcaaagtctgggagcatggtttagtacataaataatcacggaaatagtaaaattgaataaaattnnnnnnnagtctttaaatctaacaatctcaaaagttcaggggaaatttttaactgtcaaaaaagttcaggggacatgatttaccgatttagtacatgttaaagtttagggggcaaaaatcctaattagccttacaataatatattgcgccaaccattataataagtagaaattatataatatatgaaaaaattataagaatttaattttttatgacataaataaataataaaatggggttatagattttttattattattattttcttacatttatatagatttttttatgtcatatttttataaaaaaaaataaaaatcccatatttataaaataataataaattttgtcaaaaaattaccggtaccgaaaaagtcaccagaaaagttgtaggtgccagaaaaatcacagaaaaagttattgttgtcgaaaaaattgctgaaaaatttatcgtccccgaaaaagtcactgtcgctggaaaagtcactggaaaagttaccaaaagtagatatctcagatataaataaaaatggaaccggtcctcaaagccatcgtgcgatcaaacgaggacggcaacaccaaatcaaccccaccagtcgatgatccaccattaattctggcaacgtgacctaaaaagaagaagaaattaatcattaccgattggtaaaagaactgctcataaactagtgtgaaacacaaattcaccatcaattacgattcaaattccacaaactaatcccctatattcaaattacagattcaaaaaaaatgtagatttgaacgaacactcactagagtacctgaccaatccaaaacaagtataatctaaaaacttgtatcaatacatttaataatatcataattgttgcattaaaattatttttctagattttcaatcctgtaattattcaattccgatcatgacaataacagaaaattcgcattcatctagcaccacggatctgaaaatattgatttaaaattttgtttttttaaattgcattatagtcggctttccattttattcatgcagtgataattgaatgtaatactctcctaaaatacaatatatataacatggtcagttttatatatattttttattggtttatttaatgttggtttacagtattctaacagttgtttattcaccaaaaaaaatattgacatgcaaaaataataataataaaaaaatagttcaaaatattcgtataacagttgtctaatagttgtgctactaaaatattattataaaaataaacatggcttagaattgaaaatacacgacttaaacaggaaaaactcaattgtggtacgtttgcttaacaacgtatataattattgcattacagttgtatttaaattttttcataattgacataccataaatgaattttcaaatttttagaaacatgacacaattccatttcttatattttacaatgggtatattgatcaaggatgaattatgtaaattacgaagtcaatagccaattcatctcaatgaattacgaagtcaattattaagctttcaaaatcataaaaaaaaaaaaaatgtatattttttaaaagggaaaatttttcttgggccctaggctagatgggccctaaaggcctagtccgcttatgtctaaggttatgccttgactctaagtaaacatgcattgcatgttactaatacctaattaatgttcatttgagttattccttgttgttgatgatattaatattttgttttaatattaggattgcaaataaaattactcaattcatagggagactcaaccactaaatacgtgactcatctaaaataagagctcgctttactaaaaaataaacactaatattcttagaccttctagaatcagacaaatatattatgaaatgacttccaaatataaaaaatatcattgagttgcacctcataaaatgataagtacaccttattattaaaaaaatacacttaaataattttcaaaaattactcttaatatttttttatataaaattttttctcacattattttatgttaattttaattttattttcatatttattttctaaatcatctatatatatatatatttttttttaaaaaagaaaattttatataattttttatcataatatttaaaatataatttatttgtatttgataagtatatatatatatatattttaagaatatgaattaaaagaaaaaagtttaaaaaatttaataaaattaaaactataaaatttaaacaaaataaaaattattgaaatgaagatatctttaaaaaaatttcaaaatataaataaaattttccataagtaaaataccaaactcattgtaggagtgtctttattatcatttgtttttgctttaataaaactctcatttatttatttatttatttatttatttttgggtgaattaaaagtctgattggctgattataagaaaatgagaatgaaatggaacataagaagtggcgtgactgactgtcgtccacgccaataaacttttccaagtaaacccaacaaaccaaagtctcttcctcttcctaacaataactaattaaccaattacattccaactaaccaatttttcatatctcttttctactttggacaccaataccagaatttcttttagtatttttttcggtattatactattaatgtaattaagtatcaaattttatataacttatacaaataattttaaaaaaatatcactaaccaatctacaaaaaaatcgtcacatcaatagcattggtctaaatggtctctcctctttccccaaactctatttttggttggtcctaatttctattttcctttctttttcatcattattattattannnntattattattattattattaatacgaatcaaaggcgggtttatttatttatgtataaaataaataaataaataaataaataatccaaatcaaattctgttatataatactttttcagttttcagtttcattttcaattttccaaacagagaaattcctcttactattattgcaagaggaccttctctctctcttcttggtttggttttttcaaatgaagggtcggagctctggtagaatctccgccaaatggattccattcgtttctatgttttccttcttcctcggcgttctcatcactatcaggtaccttttctcttttcatgcaatttcatcatccaattcaatccattcatatttttcatttcatcaataatgattcttctgaatattgaatttcgatagttcttctagaatgtggacgccacctgagtcaaccaatcaactcatttccagtcatcgccatgaccaggagcttcaagtcgtcgcggaggattgtgcaaccaagaaggtacttttgaattatatatatatatgtatatattgggtacttttccggggggttttattggagttttgaagtttttgatgatttgaatcagaagcctgtacaagaaaaggaagtgatgagcgaaattcacaagacccataaatcaattcagtgagtaaaaacttgagctactttcgatgcaaactcattaaaatttgttatttttattaaacaattctggtttgtatttgaatgcggagccgttccagatctctagacaagcaaatggcaatgattcagatggaattggctgccactcggagttctagggagttgggatcgtcatctgagggttcggataccaaacctacgttgcctaatgaaggaactacgaggaagaaagtgtttatagtaattggaatcaatactgctttcagcagtaggaagcgtcgtgattcggttagagagacatggatgcctcaaggtattgtccctcttaacttttattttcattctattttttcccaaatatttggattgaatcaaagaattattgttcttaagagaaaatattaacaaaaagaaaaagtctttatcaattttgttcttaaaatccaagtcctaacaaagacttaatgttaatgttgtgatggtcttttggctgaattttcatgctttccttttcttcttcaggggaaaagcttctccaattagagcgcgagaagggtattgttattcgcttcacaattggccacaggtaaaacatttctctggttattctttctgaaggcttactttgttgtatgtgttagtcagagacaatgaattgttataatatagtcatggaatggggttgcttcttttgccatttccattagataatgagtttacaatgggttacttttatagacgtatattttattcatgggatcatagcagtactgtaccattttcggtctgtaatctattgtgctgccattctttttcaactaccttttctcatataacctattgccatacaagaatgtaaaacaatttcactacattcttccactcctctcttctgtgtatccagaaaataaaaattggttagcttataaatcatctgtattacctcctctgtacacattagttattctggagcaattaggacagactcgtcattttaatatatagaggctaactatatgtttgttacgtatatacatttagtgctctacttataaaccaggataaattcttttcctaagaaatggttgtgtaaatttttttggtttgccattatgtaattttatctgatgtttatgttgcaacaaaaaaacttctactattgcaacattagaatcatcaatcagagaaatcaaatgatggtggaacactaacacaacctgagatgacatactcatcaaagatgtactggaaaatttctgatttgacatgttgccatgtatttttatacatttatggaagttggtaaaaccaattattgtagtgctagtgtgcctccttttggaattgacctgatgtactatttgcttattcattcagtgcaacttccaatagcattttagatagagccattgattcagaagaagctcagcataaagatttccttagattggtaagaaatggagctctttttgtgcaaaagtgaaaatggttatgaaataaaagtggtattaatattgtgcattattttgcaggaacatattgaaggatatcatgaattatctgccaagacaaaaatttacttctctactgcagttgcaaaatgggatgctgatttctatgtcaaggttgatgatgatgttcacgtcaatttaggtacgcagagtctttttgatttttatgtaattccttttaatttgggttatacacaagcacaatcctcttaccaagcttgagtacttttttacatatcttttctgtgcaggtatgctagcaactactctagcccgacaccggtcaaagccaagagtctacattggttgtatgaagtctggacctgttctttctcaaaagtaataactcccttggagctatcatatgaatgtagtttgttcatcaatatatttattagtactaatttctttaaactcatgttttctaggagtgtcaaataccatgagccagaatactggaaatttggagaagaagggaacaaatacttccgacatgctactgggcagatctatgcaatctccaaagatctagctacatatatttccatcaaccagtaagctatatttcagttaaaaatattatgtggtcaaaccaattttagacttatttttatacatatattcttggaatttgtatttatagtattggaactaatcaaactgtattctgtaattaaaatttgacaagcgtttagggtgagaaatctgattatatagctagacaaaaaattaactctataaactgttgaatatttcatgtggtcgtcactctttgaaatttcatggtcaaagttctgagaagctgtttttacctgcagacctatattgcataagtacgccaatgaagatgtatcacttggtgcatggttcattggcctcgaagctgaacacatcgatgatcgtaatatgtgctgtggtactccaccaggtactgaatttagaactaatatttattacgaatgtctggtaaccatacctaacaaaaactttatagtttgcaagtctaaaaggtaatcatgcatacgaaaaaatgttcaagatctagaaagattctatggcatcatattctacaattaacattaaatatcaagttcacacctaagtcttgtacagtaagtaatttgaaaaggttgtggcttggattcgtttttacttaaatgcagattgtgagtggaaggcacaggcaggcaacgtctgcgttgcatcatttgattggagctgcagcgggatctgcaaatctgtggagaaaatcaaatttgttcatgataagtgtggtgaaggggatggagctgtttggagttccttgttttaaaatgcattcattttgtggtgtctttctttggccaattgcagacacagaatgcagttttaaggagagttcaaattgagaaggcatttacgaatagcgatacacacgtcgaaagaataccggcgctctctcattttaatttattttttgttaaaaagactagtaaggaaccatgtgaaagggaaagccaaagttgttgtaattttataccgataatccatgatggttctaattgtatttataccaatctttctaatcaaatcattgttgcttaaagatatcttatatatataatgctaaagcttcattagccattttgggttgagctactttttcattcatttcttatttctttacatttataattaggctaattagaatttttgctctctgaactttgatatttactaaattatattttttgaatttttaagatcgttaaaatttctttctgaattgttgagattgttagattttagagttttgtccaatttcagttagaaaagtctaacatggattaaagattagggagtatgattttgtagatatcaaagtctggggaacatgatcgacttaataaaattgattgaaatcggatataattttttaaatataacaatctcaatagttcaggagaatttttaacgataacaaaatttaaaaaacatgatttagtacatgttaaaatttagagggttaaaattttaattagctttattaaatttatgagttattttgagaagtttccaatattttccaagaaaaaataactcaatatgaaaagtcaaacaataatttctctctcaccaaattaataatgtaacacatcacgtgtagatgtggaagaaatttgtgtgaattggataaaaatagtgaatatggttttaatatcacaagttgtaatagtgtatgtgtaaattccccagttagggaagaaaaagaaaaacagcccaaaccattatatttatattaggtggacatggtttgaccattacacaccctcaaagctcaatcatcaatgcacttaattgtatgaaactataaatataaatatatgtatgtatatttatagaattattgaccgtaattttttttttatgttttaatttttatatacttaattcttttattatttttttttgaaaaattcttttaagtttattttttttttgttaaatttgagacatcagttaaatattatcgttaaatactaactagatgaccactgtgtatacttgtatatacgtgaaagtaaaacttcgagatcaatatagtaataatccaattggtatttaacggtgatatcaagttgaaacctcaaatttataaaaaaaaataaacataaaggagttttgccaaaaaaaaaaataatcaaaatataataatgtttcgtcaaaatatataagaattttacattaatatacttatagaaaataataataataaatatattaccaaaaaaaaataatgtaccctcatttaaaaaaaaataaaataaataatatactcatttataaaatttattattatgtataacttaacaaccacaatttttcttatatatataattttgataatactgttcctaacttataattaatacaaacgctacattatgttaaaaaagaaagattacgattagatatgtaacaatcagtagctaaactaaacgtttagatactaatttatagttatttttgaataacaattactaattaaaccaaatatttagatactaattagtagaattttttctcagaaaaaaaaattaatagggttattttttgtggataccaattaattattataaaataccatatgatattagggtgcgtttggaaagacataatgtaattagatttgtgtgtaattggaggtaattacacaatttagcatgtttgtctgaccatgtaattacactg

SEQ ID NO: 112302 - DNA, 15661 bp, Cannabis sativa
gaactatccaatcaacccaagttttagtaaaattaataaaattgaatgtaagcccaaataaaaagtcttacagtagcaccatgggctttcgaacacttgaagccaatctgggcaaagctttaaggaagacatcccttcccctacactacatggtacaaaatatatcaatatggcccctaagcttatcacaaatacgcaattggcctatgtggttgttaaataataatttagatattgtattttgcaaaatgaatcaaattgatacactaaactcaatttcgattaagcaattttttaacaaattgaaaccctaaaatcaaaattttaatttgaatggtaactttgaacttccggtgaatgacaacttcatatttagtcatatcgaaaattccaaaattaaactcacgataataatttaatccattttgcagaatatacttccttttaacaaaacgtatgggccaaattagtatttttctcaaaatatttctaacacatttttcatcaccaattactcgaaaaatatataaaaaattataaaacattcataacttataaagaacaatattatttaatcacttgttcaaaaaagaaaagatattatttatcaatttcgtgaagaacccattctactttaaactttgtaagcctttgcaaaaaaataaaataaaattttacaagaagttattgggaatcgggatactgagttttcttacataggaagaaagtttggtgatttgattgaagagtgaatggggactagtgcacttcaacaccgggagttgtctgagtctccacatgttttggtataaagttacatgttttgtgtgaaacattgagttggaaatagagttggtatttattatatatggagcatactttgtgaagtttcctttgctcatcaagattataaaacaaagttatgtaattcaactcaagtctcctaatacatatgtcattgtatttgcaacggcagaaactaaaaaggaagggtcactgaaaaaaaaatgaaacggattagaaggaatgaatgaaacttttctcgaggaagaagaaaaaggaaaaaactattgtacacagcattctcaaaattataattggacctctccccacatataaatattttcctttcatattcatttgtgagcaaatattacatgtgattacattgcacacgtgagcatttcctatactatcatgtatttggcaacaaaacattttccatactaactagtaactttcaaatattcaatgttacaatactatcttacatcctgatttgtttgatcttcggcgggtggcgattcagcataaacttgtccttggtctctcacgtctctgaaaattgaaagaaaagagttgaggctttcagaagaagcccctcccaagatccacagtaatagagaactgaatgaactcatagtcccagagtgatcaccattatctgcttgcctagggtcaccttgaccaggcatctggtgaagagggttgtcattttccgttcgtccttgaaattgaggttcagctccatttgctggtgctgcttgatccggcgcagctctcaacccaggccctgtggccgtgtctgtattagctggtcccgggtttcttgtgtttaatcttgtgatgtggagagttgaagcaaggatagtcgaggaggtaatctggaagtccgggtgttgctgaagctgtgatcgacgattttgcataaacctttgcaaagctggcacctgtggtgtgtttgaaataaaaaaattagtaaaaaccagattttaaaataaagaatagaatgaaaggttaagagttgaatgtcaagtgcattttgataatggtcacctcaaaacgattccaaaagtatagaatgagatgatgcataaaagccgcagttgtagagagtgccaaataggaaaatcctggaaatttatgtgcaatatgagaaaagaaattccatataaaatggaaacaagatacaaaaaaataaatgtgtaaggttgtaccataggcgtatgaaaagaaatatatgtggaaaaccagaaaatataacaaaaagaagcgcggaaagaacttcatcgatataggtgtccgaacgctgcaacaagcacaatcaataattagggcagcaaaacaatttagtcaagcaaaaattgctgacatcaccctacattatttatattttatttgttgacaatagaccaatctcacatcaccctgcatttctataagagacgtgttattaataaaagatgataagatattatccaaattaaaacttaactattcatgacctaatacagaaaagaataaacgataattaaccttctgtctagaacttgaatttcggaggacaaaaataaataaattcccaggaatttcattatctttagtttaaattcaaacaaaaacaatgaaatatatatttgttatggaaaattaattgttaaatttaatgcaaatttataaaatatataaccctttcatacataaatttaaaaagaaaataaaaaaatcaacaaaatctagaataaattttagtaaaatatcttcctctaactttttctaatattttctctcacaaaactgttctttagaaaaaggaaaaacttctttacattcagtttttgtttcctccgagaatgtcaacatagggatcattgagtaaagataatgagcatccaggtttttttttcccaccatgttaaataggtgatttatatatgtagagtttggtgaaagtagactttaaaaaagatgcaattatgccaaggcccgtactatatttgtagagagaaagaaacaaacctgattaatgtaaatagttcactcaaccacactagtatcaggacaacaaaagccaatagttggtcatcataaaactcaaacagaaaaaacaagataccaatcattatctgcagaagcaacacaaaagtttctcagttagcatacagtagcaaaccaaataaaaagctgaacaacattctatctgaaggaacgccacaaatgtgcaagaaaaaaaaatatccaagaatccgtagaataatggcatgagatacagataactatatggactgatatatttagatgaaatgagtacaatgacatcgatgtatacttactggcacaaagactagtgattcaattacatgcacaaaaatcaactggaaagttggaagcctatgccgagcatggtgttgaagctgcactgcaataatataattttttgataagagacaagatctatattgatttaaatattaccaaaagaggataaggcctcctcataatgtaaacataaataaaacattaagaacaaaattaaaaagaaactcttgttaaaacaattaattttccatttccatttatgaatgatcaaggaaagaggtaaaatccttgaattgcttcgccacagatggccaaaggaattgccaaaacaaattcaactttattactacagagaacccacatatattcctttttcctatctagtcttttccttcaaacatatatttctttccagccatataatccaaatggttgctgtaaccacataattctgtgttacagctgccagattagattactaaaacgaacatgttttctcagtcttccaagagatagtgataatgcttccttcaacacatcaataaggggagcaaattatcatttgaagcacggaaggaagaaaagaaaatgtcgcaaaaagcattcctatatgctgccatcactgttttagtaattgacttagatctagtggtcaagtcaatacaatggatatttcttggagctcaatatcaaaacatgaaaacactcatacaaagagttctcatctgggtaagatgaaaattagctcaaaaatttaaaactcaattatatttgtctgaaaggttgtgacaggacaacaaggaaaaataaataataagcagacctgtaaacttcagcattcgagtttgtgtctctctcaaagtgaatgatactgacattgtagtcgtaaaaaacacaaatagggacatcataagcacaccacacttagtcacaagataatctgcagcagtaataagaaatattggtgaggtcagttgtgaaaaagtggaacagcagtgtgcaacactactacttacagtccagaacaattgtatatcatttataagcaattgttaagagttaacagacaatttgagcaagctctaatatgggtgcatggaagaagacaacaaacaggattttaggcacactgtgaggtcaaaaactatttctatagggacaaattaggagccacatcatttcatgattttcatttaagagataagccttggttaaatcctcttcactattctctattgcttggtaattttacttaaaaaaaagtaataaataaacaaagaacaaaacaaataggctattgatttgccacataatacatattttcaacacatttgcagcaaaaacttgaaaaaatgtcattgaatgaacataaaaatggcactatatacagctcaaggagtgagaaagaaatctgcttgctctacaaaaaagttctcaataatctagtttctatatatggcaatggatatccacccaacttgaaagaaaaaaattctgcttttaataaaaatatactcactaaggagaatgatcaggtaaataactcatacagaaaagtgactcttcattacacaatttgaaacaaaagaaaaataacaaaacatgtcagcagcctgctagactgatatttatcaaccacctatatactctgcatctacttggtaagccctaaggaactgttgagcagtacttcaagaacttcagcagcctttttttgacaaaggggtttcatgtacagtacatctcttgggttgaaaactagcactatgtattttatgagcatttgtagaatttgttaattatagatataagagagtatgcagagactctgagacaaacaaccagtgatatcaactttcatcaatactttttttttaatcatatttactcgcttatataaataaataaaacttgcaaattgtaacctcatggaatacatagcactagatgaatgcattaagttgaccttaccaccaaatcttgcaggaccttctggtggttcttgtgcatagctaagattatagatctctttggattgaaatatataaagataacctgcatggagtttcaatacatgttcaggcatatagaaatttcaaataaatgtacaaactcgacatggacaaattattaaggaaagacagagatggtccccttggtctattaaaaagtacacatatatatatatctatatatatataaaagtccagagtccaggcaccaatgagatatactatcacagaaaagggaaaagaaatatactgtatttatattacaaactacattatgcccaagcagtacgatactatgtaaaacaaaatttaataacactcgaggataagaagtcattaccttgaccaggagaactcagcaaactattcatcaaaatagtatcgtatccaacaaatctgttaatgaggagttgttgccacctaggaaaagaataaaataatctagttcaatacatttacattttccatataaaatctgaaaggcctgccaaccaaaatgctatacaatggaaggaaaaaaaaaattcatagcaaaatctaaattctaagaagaatgccccttattttaatccaatatacaaatcgacattcttaattatatctcaacattgtactccaagaaagaaaaaaattccagttcttggtcttacaaaccaaaccttcattttattctcaattatttttttcttttttcatgagggtacagatcaaactcttaaacaccaattattgaccttcacattgcctctaaacagaaattttgtataatcttttggccatacaaaaatccttaataaatttttgtcctttttaaattacaaattttgtataatcttttggccatcacaagaaattatattctgcagcttgtaagaaagctgtgattccaattcagttgcttgaaaggatcaaattctaggtggctacttgtatttataaaacaaaatactttaagaactttctttcttagatctctgtagagaatggggaagttttctgtactaattatgcttcttttttttctgtgccttttactgcattttgtaaaagtttggtactgtactttgttggtgttttgcatccacggttttcctccaccatcagtgatagctctcaatatatttgggaggaggtcacccctagacatgtgaactttttgtctcttttccaaaaaatcagaaatagttgtaatccttttgaccattggcaaacttcgtacttaattgaggccctaagaacctcaagatctagagttccaaggttccaaccttggtctcccctatttcccaaccccccctaaccactagatcaatgtagtggcttgttgtaatccttttgctatagagaaaatcttctacaatttgcctaatattttgtctcaattttatttgaggttctcgtttccattatcttaacttcagttgtaattgagtacctagtaccacaacattcctaacagtttcttcactgcaactgaaacattcgttgtccttcatttacaaaatacaaagatttcatatgtttagaatttattttgacaacaaagtcaatgtgtagttctgcccaagaatatacctatttccaaagcaaggatgccgagctgatatgctgatgttgacagtgtgtatattatgctgagacttagcatcatcaggcagcaaaaaatatccctgttgaaactatattaataagaaactgaacttctatagatactgaaacaaaagaagcccaccataagcacatccaaatacaagttacaaagccaaagccacttgcaagaataattcttttcaagactaaagaaaaggggagaagggggtgggggggaattactaaaagactaccctctccacaatcttaaatataaatttgatacgataaggtaattaccttttccatagtgtataaatatgttggctcaaatgttttgctgtgtttctcaagcaactgaactgagattgacaataacaaatataatcaacaatgataataaagctgaagataagacagaagatagtggacattacggtgaattctggtaggtatacttttgcatcttaattagatgaattaggttctcctagtcgtgggattcatacacatgcttagggaatgctagaccacttgggcaaaagcattgtataaactttcaaatcagactagtcaaacaagaaattgatttcaccaacaacatttcagagagtttaagattcttaaaaaacagagatgaaatgatgatgcctgctacacaactattgaagatcacttcagctttaagtagtatgtagcattcattcttttaccaatcccatatatgttaaacattaagcatggtttatataacttttataagtcaatacggtcagtaattcatgtagagtcaaggttgggtggaccaatttattaattgcacctcagtatattcaatccaaacacaaaaacattacaaaaaaattatcaagaaatagcatataaaatagaggtctgaagtatttgtccaggtttgtatgaaaatcatgcagaatctggagctattgtagctaacttcccaatcagagtttcaaattaaatccagggaaccaacaaagttacattgtgataaggctgtcatagacatgtgcaaacactctactatctagttaaagttctttcttacaaaatattcagcgagccattattatatacataatatattcatatatattgcttcaaaaaaataacctatcaagaaacatagatgggggtgagggtggggcaaccatttttacctgcatataatttaaccttctctaaatgaagtaaacgcagccactttgaaatatcgagatctaaaggtatacctgcaatattctgcatttcaatttaaaactcagtgaaggacatatttaaagcaacataaagactttatgttcgtaccaaacaaaacgagcaaccatgataacatacataacctattgaaagtgtgaacatggttgataagaaataatattacgcacaaactaaatctaaatatttaaataagatagaagtctaataaaatcctaaaacacaagaagaagaaagaaaactattatcccttacaaaatttacaaatacaaaattgaaaatgaacatgagagattttgaaaatctaaggggaagaaaagtattcatgcagcagacctgtataagcaaaagaccatagccaatgaattttcatgtttaaaacaaatcctataatccacttaatcaaaaccttacaatttttggtgagtatggaacttgttaccattcagaagtagaaaatattgagaaacaaaatcccattctatattgtggtatacagtagaccttatggtagagtataaataagagtgacattgataaataggtgagattaaaatagctacaaacaaaaaacacagcacaatacaaccaaccatctaactcaataatcaagcaattagaaaacacggagaatggtaagcatatacacatatatagatatctatacatattatagaagtgcaaatatttttaaaaagattatttgagaaaaaatatgccccaacctactcaccgacagcttcaagatacttccaaggattttagtcaggtgcttccaaaggaatgatatccgtctataccacttttttccaaagtgaataactgctgctttaaatgtctccctggctgatagaggaaatctactccgcggttcctctttatcagattttacaacatcatcaatgataagatcagagctatggctattgacagagccatcagcttgatgttcatgaagttcattatcagttttcaaaaactttggtgtcaattttcccctcctagcaccggattttacagctgcatatgttaacccatcttcatccatgtttgtatcatctagtttattcgatccagatttcatgtcaggaatatctgtcatgctagatacaaactcatcttgtgaccacaacccagcactagttatctaaaccaccaaaagcaaaaattaatgtcttagataggaaagtgccatcataaagaagaagaagaaaaaaaagagctcagcatacaaaatacattgaggttttcttataatttggctatgccattttggggtgctctatcagaattatgttctaaatttgtttctcatttaaacatcaaagtaattccttattcatgaataactacaattaccaaaacagcccggtccaaaaaagttttttaaaagaaaaacaattacagcacatttttttccttcaagaataaaatctatgaggtaataatcatcaatatgttgtaaagaaaatatatccaaatttaaatgaaacaatatacaaacatatatatatataacgtggacatcataagataccttaatttggatgagttgagcttctgttgttttaactccagacagctcgcttgaacagccaggcttcaaatccaaagaattaaattagatgacaggcacaaagcccacataatacaagtaagcattacactgtaacaacatacatgaaaatgatcatcagacgaactaagaaaaggtagaggccaatagactttttatatagagccattgaagtcatgaaaaagaattgatacaaatataaaataaaatagcaaaaaattgtgttaccaagagtgctttttacaattacttgctgcataactgaaaactgtaaattaaatcctctttcgtccattataagtacaacaacaaagaatttcttttgaaaaagaaaccactatttcaaacacagagtagagatatgttatattgatacatgcttaagaagaaatttgatcaacattccaatcatgtcaaccatcaatcgcctgggtccaaattgaacaaggccgaaacatcaacaaccaaatctaatcatgcaagttaagtcaaattctagaaattgataactggaaccctaaagcaacttgcataaattcccctccacactgcaaaaatacataaagacagaaattaatatatcgtaaaagcttacttgttgaacgtaattggcgtgcataacaacaagaacacaaaacaaggtgatggcgataaataggcagagatactccaaagcagctctgacttttggggtaagtatctgggagaagcgctcttggactcgaataaaagtttgctctggatccatggtgtggaaattaaacaagtgtattgggggaattaggatatgaagatgttgcctagaaagtgagggacaatccgaattacattttccaggtttatgggttggggttttgagtttttggggtccgtccgccggagtctgagagtggacctttctgtcttgtgttctgaattttctttttgtagtaaaaaggttgaacacgttttatggtggtgaggaaaacgaagtactgttttgagtgatcggttcaatacaatcactacgattttcatttaaaaagaaaaaaaaaaaaaaaaacttattaggatttttatcctgtgaatttaatgttgacatgtactcaatcgtgttactgaatttttaatgttattaaaaatgctctttgaattattgagatgattgtatttaaaaactttagtccaattttagtaaaaaagtcaaacatggatgaaagttttgggagcataatttaatacatgtcaaagttcgagagatgatttggtatatatcaaagtctaggagcatggtttagtacataaacaatcattgaaatagtaagattgaatgaaattaggcaaaagtccttcaatctaaccatctcaatagttcaggggcatttttaacgaccttaaaagttcatgggcatgatttaatacatgtcaaagttcagggggcaaaaatctagtttttttttttttttatgaaatgggtagttttatttgcctctcataaagttataagtagggtttttcatctaattaaatttgtattattttattcatagtgcatgtagagaaaaaaattgtatttgatctatttaattttaaaatatatttgtattatatgtattagatttttcaattactaattttttacattgaaatagtaattgtatatatatttttttaaaattttatacaaatatgtgtggattggattggattggattgattacttttacaaattaatcaacatctaattcgcaagtgcgaatttgagattttacaatctgatcttatctgcataagtgcggatatccacactttctgaattagattggattgtacagattggaatagattgactattttatgaacacccctggttataagttcactcaatattaaaaaattcagtttttatattttttttaaaaaaatctttttcacattattttctcttaatatcaataatttttaattttatttttacattttttaaatcatgtattattttttattttaattttatgactctgggattctatcaaaggttctggaaaattgctggtcgcgatgtggttcagatggtgagaaatttctttgagcaatggttgtttttagaagggctcaaaaaaaaaagagagaaaggggtctttgtctaagactaacccctcccccgttatatatagataacctcacttgtggcggaggaataccatgattacaagtgctatatcaaaaatatttaaaacatttgaaacaaaaccaatccaacgagacataaacaaattaggtaccaattaagcaacattacagctgtccgaatctgactttttcccataaatcttcaactgaggcttcaatcccttcaaatattttgttattcctttcgagccaaataacccaaatgattgctagaacagttgtcctccataggtatgatatacccttactaccccccaccttgctcacaatcattagagggactgatccggggaagtacccattggatctcaaaggcgttcagtaactttatccaaagtctttgggcaagacaataccccaactaatatagtgttaattttaaagaagaagaacccattgaatgtgagagatcttagacctattttttgtgcaatgttctttagaaatttacgtctaaggttttggctaatatgatgaagggatttcttgatcacgtggtttgtgatacccaaaatacttttattcttgggaggctaatcaatgataacattcgagtttcttttaaggtgatgcactatctaaagcagaagtggcgagggaagaatgagtttattgaagcttgacatgagtaaagcttattgttattccaaaattcgcaccaatgacctggcactcaacaaggtgacatgtggctgacataattgaacttgggcggagtatatctcccaattatttcgaccaggccagaatgatgttgaattagtcaaagtctaaccctcaacaacaatcatctgagtagagccgagatctcgtaaaatgtcgagtagacctagcgtgctgaacaattctaattggcgaccagaggcactcattgagtagagatattccacagatcttttcctaaactgtttcctcaaatgtagctcaattaaatccttatttttgcgggattcacttaccaagttgagataatagtgggatttcaaacttaactcattcctcaattttttccctttaatatcgagaattatatttaatatctcctatagtttagaaacttatgtaatttcacttctcctataaatagtgaagctatttcactattcaggggatccttttttttgcattctaaaagagcaacactctgcagaaatatttttacacttttcaagagctattgagaaactcagctggccagacctagtgatcttaatggttcttcatagtaatataactaaaaggggagtagactattgtcataatcatgggatgaacctctgtaaacactgtgtgaagtttattgttcttattttattattaattactctacatatattttcacttaaaagactctatgtcgttgactaaaagtgaagtcaatattttggtgctttcattaagagcataaatttctagtttactctcatcattttttgattctcaatcttcttttgaatcaacaaacgatggtcttaacaagaagagccacttctaccgagccacaagatctaatagttgcggatcctaatgttcaagttcccttgaacactatgaaccccaatcctgatgtgcaacttgctccccgtggtaatccacttgtgggaataaagcccgaagttccatctcccacaaggcccactgcgagaagcactactggggtctaagagactggaaacaccaacactcaatatgctagagaaaccagacccgacattggtcgaccatccgaaggataaccccacgtggatctaggggacaactctgagctagaaaacttaagggaggcactgggacaagtccaaggtcacaccaataccctccaccacagccatgaggaaacacatgtcatggtgaaccatgcgtttgaaactttgaacagcaaaggcatgaattctaagagtggatggactgacaatctgagtccatgcgtgcttagcaagcagaaattaaccgtcaatccagggaggctaccaacctgatcaggcaattccatagaggactggagcaagagcaagaggaccagccgcttggggaagaacctaactagggaaaggcaccctacatcctaagtgaagggtaagggtacaagctgaaagagcgaccagtcaattatgggcagccatccagaccaaatggacccttcaactccaggtcccggagattgtatagtgtgaaatctataattacagaatttgggcaccagcaacttgtcaagaaaaaagacagagacaaaagttcaattagaagagccggtggggtgtcagccaaagggactccaatacttaaattagtacgattgtaataaaaaataacaataacggaaaataaatgaaacataaatggtagtcggatggatgagtggataagcagacgaacagactcaaggaataactatggtggtgaggcttaagagaaaagttaagaaaggacgattgtctgcttaaccaagtagtgtgagtatcgattgttcgatgtcctgtgtctgccatatggtttcttttatcatgttccctcagcaccattgccctccatccatgttatccattagactcgttcaagttagttactttcctaattttatgggaatggtaattatctttctaattggttcaatatctacttggttctatccatttggctgattggtcggactcagacccggttgcggggtgaaccaacttatggcccataggctcaccagtttgtccatttcaaggcctagggagttcgtttggctgccttattgtgcataataatgttggattcattattgatggacccgtctaacttgcatattggatttctcaaatatgttgtaaatattaagtaaattcttacctctacagtttgtccctcactctctaactagaattcattctagctggagagttaatgataccaaattaggtgatattgttgaataacatgggtgttggccaagaggtctatctgcctaagtcaggcgatgtatgcgcatctaactgtttgagacaaaaaagttgcttgaatggtttgagcagggtggttaagtctccttgctacatgtgtgtatgtgaccgtcttagctgagtaatgtttgtgtgaataattagtttttcaagagggctcttatctagactaagtcgtcttattggtctaatcagttaggcagacacttagatataaattgcttataaaagtcataggttgggccaaataaaattatttggtcgtctatctcgaaatacgatatgaaaggactagatagacatacatatatatgaagtgtaaggaaatagacatttagttgcgtaaggagatagatatagatatgttgtaaggaaatagatatatatattgtaaggagatagacatatatatatattgtaagaagataaatatatacatatatatgttgtaaagagatagacatatatgcatgtatatataatgtatataaatatatatagtaaaggaaggtagacatttatataaataatagaagaagatagacgtacacacattatatataaatggtgtgaggaggtagacatacacacattatatacaaatagtgtaaggagatagacacacatattatatataaataatgtgaggagatagacatatattaattgggatgagaagatgtaattattgtttcatgttttgtctctctaacacacgaatgtgatgtagactagtatacagctccttttatgttttggtgtttcttgtttggctgacaccttagtcaaggttaggggtgaaattcggtcggttacgggcagtttttacctgctaccaaatcgaccaggcggttacggtgtgattgttcacaaaactgtaaccgaccgttaacatcaaaaaaccgaccgtaaccgaccacggttataaacggttttgaaaccgtttgaaacggtttgggctttacaaggcccattaaattggatttaatggtttttttttaccgtttttgacagtttgaccacttatt

SEQ ID NO: 112303 - DNA, 4501 bp, Cannabis sativa
ggctgcagcagcagcagctgcagcggccgcagctgctgcagccgatgcagctgcattgggagctgaaggtggcactggattagactgtgagctactcttcgcagaaattacttgtggctgctcttgctgctgctctttggagttcaatttggcgagcagggcgtttatctgacttccggttagagtttcgtgctcgagcaaggcattagccagtgcatggagctcgtggaaatgagcggtgagaatggcttttgcgttattgtaagctgtatccaacatagacttcacttccttttcgataagcagccttgtttcggtgctcatgctctttccatggtcgtcataattgtgggtgacaaccccgacctctttgctcataccatactgagtaaccattgctcttgcaatagaagttgccttctcaaggtcagaagatgcacccgaagtaacttcattttcaccaaatatcaactcttcagcaacccgtccacccatgcaaacatcaagtcgtgcaagcatctgtttgcgagagattttcgtctcatccttgtcgggcaattgggcaaccatgccaagagccattcctctaggaactattgttgccttgtgaacttgaagagcaccctcggtatggatagccacaagggcatgcccactctcgtggaaagcagttaacttgcgtgaatcatcagatatgacagctgatttccgctcacttcccatcataatcctgtcttttgcaaactcgagatcagccatactgactgctttagcaccatccattgcggccttgagagcagcgacattaaccaagtttgcaagatctgcacccgaaaacccaggggtccccctagcaatgatcatcaaatccacatcatctgctttaagaacctgtaaaattgacactcatagccttagaataaatccagttcaggtaagtttctactcgatcaaatcttcccaatacacacacacagcacaaaatgcagaaaacagtttgaatgcactaatgaatagtttttcagcattaatttgttcgtacaggtttaatatcaataatcatgtattgttcgacaaaaatcaacaatcaagcattaagtttttcagctaaagacgattaaattaaacacctggggaggtcgacataaagtgataaaagaaacattgagatacatcacataacatatcaaggaaaacctatgatgatgagaatataagacataagcatcttgaataagaaacatttgtggaaacacaagtgtagccccaaaaaagcttcatctaaaataaatacaagattacctttgccatgtgggattccataatctgccttcgtccttcaacatcgggattaggaacaacaatatgtctatcaaaccgtccaggcctcactagtgccttgtctagtgactcggggaaattagttgcagcaattactataattccttcattttgtttgaaaccatccagttcaacaagcagctgattcaacgtcatcttcatgtactgttggtccttggggttgcggctaccacctatggcatctatctcgtcaatgaagattatacaaggtgatcgtttctttgcagctgagaaaagatctctcactctccgggccccgacaccaacaaacatctcttcaaactcacttccactgcaagagaagaaagggacccctgcttcgccagcaatagctcttgctaacattgtttttccagtgccaggtggaccaacaagcaaaacacctttcggtagttttccacctaaacgagtaaagcgctgcaataaagaaaattttcaaaacgccaattcttaagaaaaagaaatggaggaaatgacaagaacaacaccaaatatataccttaggatcacgaagataatgaacaatttcttctagctctgcctttgcctcatcaactccctttacatcattaaattttgtgttcgattccatgctaggttgtacctcttcattcaggcctagccctaacaaatggaaagccaggtatgagaatattcttgaatttcaagatgggcaaagtaagttttttacttcatgcatataaagaaattacctttgctaattcctttatcctcaatcagtgcccctacaccagagatgagaagaaaagcaagtgcaatagttcgaatggtacgccacagctgctctttgaaattacccccttctgcagataccatatgaataggagcacttgcagttccaagaagaccatcttttgtagattttctaacattcttaaaagcagcaaggccacctacattttcttcctccctagcagacatagaaacccctgcaaaatgcagatacaatttacatctcaagaaaagaataaggaatcaataaccataaatacagaactcggtcaagctaagcctgatctcacatccgacgcccataatttgattttgtcaatcgagcaaagctttacacacgaaaatgaaaaaggaaatattgcttgttggcaaaacatgtgccaatccatacagtgactcgagcaccaaatagaatcaatagttgatacgaacaaaagattaaacagataaaataagggaagtttttactttctacccacctctctgaagcactttgagcaattcacttccatccagcctatcaactttaactaatgcttttacatactctaaaagtgcttcaggattagagtacattgacggttgactttcaaataaccttatcacagcttcaggatcaccacgacggtatagatcttttaaatgggaaacttcacttgtttcatctgcatcccgagctctgcgagctaaactaccaacataggtagattgatacctcttttgaggatttaaaagcctgttcactgcacaaaggataaaaaaagaaattgcttcatttattggcatttaaccttaaagcagcttaaaagttaagaaccaaactgaaactgatgatagcaataataaagacttgaaaagaaagctatttcacatgaactttaaagcaataaatttgtcatggaaatggaaaacaaacaaatgaccaaaaaaagttatgaatgataatagtagttgcggctgtttgagccgctgcgttttgagcaaaaggtttttatgattccttaggtgaataatttgattagaagtgatcatagagcgagattattacttgttaatagaaggaatctctctaagagaaaccaacagatttttgattatgtttgtaacatgtaagtatgttgtgtgttgttttgtggatgctgatctttgtagcatttgctctggtttgattaataaattttctcctttaatcaaaagcaaaataataatagtacacatacctcccccaagttgaaacttctgagtggaaatagaacttcttgaaaacaaaagtttacatctctccaaatgcggttgatgccttgaaacctgttgcacataacatgaaagtgaacacaagagatatacttcccatttcttttcattgccaaacggtgtatcactaaacagcaacatggaacaatgaatcaattatctatagttaagctgaactaacccttctttcaatttaaaaaatccataacaaacataacaagatgaagttcttaataccaatttcaaaatccattcctaatatcttcaaagcccaaacctttcataaaatttctacccagccccaaatcacacagttcgatttccaagaaaagaacccaagaattcaaaccaaagaactgaaattagggttcccacaaatcgataaaacgaaattaaatcttactacttctcaaccaaaaacaaaatccctaacaatgcatcgaaatcctaaaaataaaaaacgaatctttatcaatattgaacttacctctgtgatcaggcgccttaaagccatctcttttcagagacccaaataggtctttgttcgttaattccctccaatccaacacctcttctcttccctttttctctctacggatatatatgtatagttgtatgtatatatagcaaaattcttgaggaaggtgaatggcggtgggtgtgcttggatgatgagaaaatgggagagaaagtgggctagagttcgcggaagaggagagagacaagaaagtaatagagagatagagagagaaagtgtgatgtaataatatgtgtttaaccaaacgcggtcttaattgagtttgattgttatctctccggttctagtttctacacgttaatttctatgaaattaatattttgctttatttattattaattaataatttatttatttatttatttggacaacaatatattataaaacaatttattttatttttatttttgtctaaatatatataatataatatgggtgactatttaatgattacatttttatcgtaaccagttacatttttctttgacttgtaatagcagattactaataggtaaacattcctttttttagaattaattaattataattaactattttcttaaaataaactattaaatatttaacaagacctct

SEQ ID NO: 112304 - DNA, 3810 bp, Cannabis sativa
aaaaactaagcggtctttacattgcagaaaccttgaacttattaagattgatcaacatgattcctccacctgaccctttgttattcaatgctccatcgacatatagggtccaacttgcaccctgtggtatatttggatcaactcgctcttcggttatgatagccacctgctcatgagggaattcaaggataaaattagcaagggcttagccttaaatagctgatcgcagttcataccttatatcgaactgacttaatttaattgaccacttaagcaaacatgcagatgtgtcaggcttggccaatacttgatgaaggagatagttggttaataccttgatggtgtgagcttgaaaataaaagcaaaggccaagcgttccatctgcagatagcgtgcctcggcatctagtaagtgtttcctcacgtaagagagaatgttgcctaccttggtcttcatagattagcactaagctaatcgcgtattcggacaccgctaggtagattgagagtacttctccaggcagcaacttggagagtattaggggttgccctaggtacattttcagagcctaaaacgcctcttcgcatttgtcagtccattgaaatttttattacctttttagatttgaaagaattctttgcatttattagaggagcgtgaaacaaagcggtttaaagcagcaacattacctatgagactttgtacttccttgggcttagtaggagatcacatctctactaaggctttgattttggtaggattggcttcaatttcttgctggtttaccatgaaaccaagaatttttcctgatcttacaccaaagacgcacttcaatggattgagtcgcatcttatagtggcataggactttgaacattgaatctagacgggcgacatgctccgttgcatgttaacattttacgagcatatcatcaacatacacttcaattgtttttcttggcaaatatgtgaacatcacgttaactaaactttaatctgtcgcacctgcatttatcaacccaaatggcatcactttataataatataaacctcgatctgtgataaaggaggtgtgctcctggtctggtttgtacatcaggatctgattgtatcccgagtacatgtccatgaagttaaggagctccttagaacaagctttattcaaatctgtaaagtcgacgcatgtgtgccatgagccattcggctttggtactaagacagtattagctaaccagtttgggtaaaatgactcctttatgaagctgcatgctagtaggtattctactttttctttacgcgcttggtacctcgcgaagtccattttatggcacttctattgtactcctcgcatgtcggagtctatgtttaagctgtgacacatgacctcgggtgaaattctaaccatgtctgaatgcctcaaagtgaaaacatccaaattctgtttgagaaaggttactaacctttctcactgctatagagttagtttaaaacaaattttttacactttagaattgtcaaatgaatcgattggtacctcaattgttattttgcaacttgtgcggtgtttgtatagttgaggactctagggtctagatcgggcttttccacatgtggtacttcgttaattttgaacaactcatgtcaaggtagaggtgcctcgagcaaataaatcacattcactatttcttcttctctgtaattttcaatgtagtattgtaacattccgtctagtcggccggaacacctcttactgatcctacaccagcaggtgtagggaatttcatattaagatgataaattaaggttactatcttcatctccttcataattgggacaacctatacggcgttatatgtggaatgttgatcaattatagcaaagtctgccatagactttgaggcagtaggtgttgtccccaatgttattggcaacttaatcattcccttcaattcgatcatatctccattgaaaccatagataattgaagttactagccttaaatctttctcatgtaaccccatctacttaaaggcttctaaattcaagaggttaattgagctaccattatcaacaagtactcaatgaacattattgccaccaatgttagtgaccattgccaatgcatcgatgtgagggtgatgtacccatctcgtatcactttccatgaaagtgatatcatcacattccttcttcaaaagtttctctaggctttcacttaaattgtttacatttgtcaatggtttctctttgtcttcctttgcgtaatgttcatgtgctttcttgaaatccccgcagacaagcgatcctccaatgatggtcaagatgttgcaaggggctttggaaccacttgcatcttctgtattgtttgccccatccgctcgaggattgacttttccatttttcttaaactggccaaacttttcttgtttgattaactcttcaatttcgtcttacaagaacaagcatttgagtgtggtatgaccaatatccttatgatacttgcaaaaaaattttggatcccttttgtcgcaatttcctcttattggaggaggttttttgaagacacaattatgttcctcagtcacataaatatggtcacgagggacagaaagctcggtatagctcacaaaatgtggatctcctttcctttttggggaagtatctttcctagttggcaatttggcaggctttgggctctgtcgccttattggactgcatcttttaagactactccctctaaaattctttgatatagacttcgggatcgtgatcctggcactgtgaacctttgcttgtcttttcttctttcaagttctgccaacgagtttttaatccttttgtgaggttcggccataagaaaaaactcaactagtgattctggttgctgcacctgcaattccttccaaaaatccatccttggcaagacacctgtgattagcatacgaacaatcgattgggagccttctccaccttagttacttaagtattaaaacacttaaaatagtcttgtaatgactcacctacgtcttgcttaatgtttctatgattgtgtatgacggtttgtacgtcatcgttgcttgaaagtgggttaaaaatagatccataaatgtctcccatattgagatggaagattctggtaattggctaaaccaatcatgcgcattatcctctaaagtcccagtgagtatccgacatttttccagttggtacctgatcagcttccataatcgtattgaatttatcaagataatcgattagattagtggtacctttatatttgagctattcaaagagcctgaagccttttaagagtctagcttgtcgcacttcttcagtgaagggtgatgtccaatgaagtttgtaaacgggctttctctgttgctcgatcattcttaatgcttgtaagaggttttctttatcaatcccccctggtagtatgggattttaagcaagggtagtttggtttcttgcaggtgtagtggctactgtcgctatgttcgtggggactaccacttcttcgagtgcagctagtgcgattggcaggtttaacgaattcgttgcattatttaagtttaggatacattgatcgaccaaatggggatcacgcggttcctcttcattattgcaatttctcaaagttttttaccgtgctcagaatagttcattgaggcaatcatgcatatatcccctatgaacacggtaccttcctcctaaccttgtaaatactaggcttgtatgtcggtcggtttggacggtttatcatatatattttctaacccaatctaaagttcgggttgctaaaatttaagtg

SEQ ID NO: 112305 - DNA, 2953 bp, Cannabis sativa
tattatatatttgaaatgaataaaatataataagatttttaaaaagataaaattttgtgatgtatattaaaaaagattaatgtatagtgtaatgtaagaattatgttataaattagaaaaaaaaaattaaaatttgaatgatatatgttaaaggatagatgtgaggaggagtgttgtaaggaaaaacaatacagaaagattctctcttatcaacattttattattatgcagtgtggttgcaaccctagggcccaatcttatggagataatttattagccatacgattaatatataacggatgttgtgatgttaaatgatatattgaccattgattttctatatgagaaagttaaaaaaaaatggtgagtgagtgctttaacataattaagaattcgaggcctttatagtcacatgaacctcatgaccttatagagatcattatggcctttatttttctatgatatgcatttcccccttaccttgtacccactataaaaaggtcctcccctatacatacaatacacttcaagaacaagagaattctttgaatacaagtatattctccggtaagtcttctctcaatgtttttactctttttttttagtacatatatatatgtatatctttttttattttactttctaaggttagggttttaattattgtaagatcctccactaattctagtatgtgctagctttaatatggttcatcttgaacttgaaagctttacaaaacagtaatgtttatttgctctttttttgtagagcgaaattgatatattttttatttaaagaataatactttttcctttctcaaaagacggtactatttcgtacaatactgaatatcaaaggatcacaaatgagtgagatatatagaagcagtctatttttttgttggcataaataatatcttttactcattttttaaccatctctatgtgagactatcttatttttctatgagcacgatttgatttttcgtgagctttattttacaggatgtctttattgtacattattatatgaaaaaattattattatcaaaattatttagatatcaaaaaataaaaaaaagaatgtatatgtatatattgttgcaccataaaatttccaacattgaatatatatgattttatttgcttgtaatatcgatcattacaatagacaaagttttgacacttatattttgtgataaaataaggcagatctatagtccatttataatcgtagctacacatattggtgaggtgacattgaataatattagacagggaaatttcaaatggtgaaaaaagaaatggatatgggtttctataacccttatcatagcaaagaagacattaatggctttgtggacctcactcttcgattaggattacctgtttatcacaagaaccaaaataatcccaatataatctcccaaacccagatgcttcatcctcataatcaactacaaccgcaaccacaacaacaagccccatattttaattatatcgaatatgcctatcgtttaaaccattttcatcaggtatgtactcttttcccaatgttttaaataatttatgttttcagttttgtatatgtaaaaacatcagtgtgtggcaaacaatgcaatttttttattgaaaataattttttttttttcatttacatatattaacaaataaagtcagtcaaatggcggtttttattttttttttcttttaatgtattttattttttttattccaatttccattttaggtatttattggttcaatttctctataaatgagaaatattcttgtcaatttttgttgggaattaattatgggcagatatatttatatatatacaaacaaaataaagtcagtcaaaatataacataaagttagtatacgcacgtacgttttagaaatatatttagtaaatgaaaacaaaatagcgtatatttgagtttctatatatataaaaatgaaataataatattataaatattgtcatgtaaacaaaggaaaaccttactaagatgctacttgaatgaacagggcattttaattaataatgattatatgtttatatgtatatataggaacaagtcatgtcatataagagtggtggcaatataaacttgatcatgaatgaagatgtcaataacagcagtggttcgaatttgaaagttgaacaaaacaataatgtatacttaacaagtaacggaagctacaacaacagtactacttattatgatgcactactggaagaagatcaagtaacattagctcctcttccttacagttataataacagtaatgactcaatcttcttttcttgttggagtcagaacatcatgtaataccctttgataatgatacaatcttaataataatacaatattcttagggataggagagtcacagtacaacaatagtggtgtaagtgatcaaagtgttcttgttatgggggaggtggatcctgatgatgatttcaactggtgttccaactgtaattgttctactggatttagatcatatacccctatctggtgcaataatgctcctctgggctccaaggttcgtatattaattattatattattttaatataacttgactatttattgccactgcgtcgaatgtacttgtaatttattgttataaattattgttgtctattataattgttcaaaagattttatgtttcaggttgcttgtggaatcatgtatcggaaagtagaagagaagagagcaaaggaggagagtagcattacttattaagtagtggcttattgttccatacccttagcattacttattaattattacaataagaaacttttataaattatatgtggattcattttattaagactatatgttaattgcaatgatattttacaagttcttcacaaaagtacatggataatgatgaatatacattacaaaaattctttttactttttttttttttt

SEQ ID NO: 112306 - DNA, 6707 bp, Cannabis sativa
agcaaaactccaagttggggctttgaaggaatggatattgtcaatgagaaccttacaattcgaaaccagatgaaaatcactgtagcaccgaaacaggttcaaactgacaaccttagaaagagcaagggtttcaacttccaaagtgtcacttgccttaagctgagccacatagcctcccaccaaatggcatgagtccttaataacaatacttgctgtagctcaaaaattcctacaagctgcatctaaaaagacacattttgtcactcaaaacactccctttcgaattagtccactacaccacatggttattcgaactaggaagagacacccttcatcacaagtaacaaagagagagtagtctcgaccttagataaaacaccttgcacaatagggacaacatgatcacatctaatgttatgattactcatgtcaaacataatgccaatgtgactcttcaaggtttggctcggtatgttttagagttgaataaaaattattgttggttggagatcattcctccgcctatatacatttttactgtaaatgactttttttttttttgaagaatattgtaaatgacttttaatttatgataacacaatatttttttttttacggatgaaaaatcattacacaatatcacttcatcataatgtaagacactattacaaaatatgcatatattaaataatggagcattgaaaacataattccacatcaattatatgtaaaagtattgagctataaaatatgaattacctcaccaatcaccaattaattttaaaatataatcttataattctcaacatgagctgagattggttagtaatatttgagtgctactttttatcaattctccaaataatgacatcataacaaattccatttaatttatttaagacatcattaataattaatacgattttacgttttaatgtgagaaaacgacgtcatctagtttccgtgaaaatctcaatcccaaacccatgcgacataaaacgacatccacttacacgtcgctcgatactggtttgagtctatgatgagaatagtttttagtttgacttgtcaataatttattgctcgataattctacaatggggcctaactgtacaacccataaaaaggcgggagcaggacgaagtggacagagtcagtaggctcaggaagctcatgcttctagtaacgaatgaaaactcgacacgcgtcccaaatggctaccatgagaaacacccaatcacagccctcattacttcatctgggccgcaagtatattactctattctcacgaatattccaatccaagaacccttagcagccaataaaatagtgccaggtcacttttgacagccacgtcatccatatcatcacccgcaatcttaatatcacgtgttttatcctacgtggatgctcacgtgtattacggggttccagagaacatgagaacccgaatcctaaccgttaattcctcagcctaagcccctaatgctttctccttacgaattttcttttcttagctttgattctcattttcggccgggaaagggaaactctttcaacatttccattttctcgggaaaattgtacaaaaccctagcttggtctactgtttcttcatgccatggttaacgaaggtgaagcaacgtcgtcttctagcgctttctcgtttatatcaaaaggctggaacgaagtgaaacactcggcggacgcggatcttcagttgatgaaagagcgtgcaaactcgttcaagaaccttgctacttcgtttgaccgtgagctggagaattttattaattcggcctcgactttttcggtccctgcaatccggtcgccgccggcggagatcgatttcgtgaagaaactacagcctaatctgtcggaaattcgaagggcctattcgtcaccggattttagtaagaaggttcttgagaagtgggggccgaggtcgagaattcggatcgatttgtctgccataaggaatgcaattgtttcagaggcggatggagatggggttattgattttaatagggttaggagatctaaaaagctgaatttcagagagttttggggtgagtggaagggggaggcggatgctgaggaaggacaattcaaggattgggagccaattcgagtgttgaagacgcggctgaaagagtttgaaaagagaagctcgtccacggagatttttagcgggttcaagaatagtgaatttgtagagaaagtgaaatccagtctggtatgttttctttgttcacttaacatattttgctcaaattatggttcttcagactcatgtctttcagtattttgaattggtaatgaacaattggatgctttatctgtcgtgatgaaatggatttcaatttttgttaccaatttttagattattatattctataaaaagtacagtaatagagtaatatgcgaaaactttatagatcgtgaaatctgatgtttaaataatattatcgctactcaacttgattttgctcgacccaaatcctgattaaagcttggaaacgttcgctttagtttgaaaatcttgttttctcactcatattgtcgtatcatattttttattgcatacaaatgttagtgagcggtgaagtagattctataatatatgataaggaagcctaattctaattatgaggaaaaaaaggcttcatatagaacaatctacatctacttctgcagtgcaaatgattatggatttaatgagactttttttctttaccagatttataacattatatagtcttagcaacagttgtacattatatagtcatttgttatttttatgtttgtaattaatattgttgtgaactcagattgcctcgtaatgtagttttttggttcgagacttttgctatttggatatagagatgtctgattgtatttgaataagctaatattaagtactaatctacatattcttatgattttcaaatttcttgctttcagaaatcaatatacaaggagcctcaagagtcaaaggtttgtctttcagctcagtttccccatctgtttttcaggttttataattgaaaattgttttctttggcagatttttttatataacttgtgtttttttattacttttaattcctgttatgttttttattagaggttgtgtggtgtgaaaaaaagtggtcttattactttgtttcaaacattgttttttgggtgcttctgatgaaggcttgtgatggaatactatttgaattttattttttcccattttatcttttgccttctcatacatctacaatgttcgaacttgccaaggttttgtaacctccattttttcctggtcttctttctctcattttctttttcttatcacagtgtatattttgtttctgggttgaatacttgtccctttctcttatagaactaaccttttcaatttaaatagttattcagtatgtctttggcataaaaatgaatggatacggtttcccccattcacttcatagacagggatggtgttacaagtagtgttgcagttgaaggcatatagaaagtgatattttctaatctttctcattaatatctggtttaggaagttccgccgttggatgtgcctgaactcttggcatctctggttaggcaatctgggcccttcttggatcaacttggagttaggaagggtaagtaattcttaattgctccttacagataaatgggcatacttcattttgtttcttgttgtacaactgaagcttaaaacttttttttttattttactgttattattaaacattttagctttctatgaaagacatttatacctttttatttgtcactttttttgggggggcttctcgctgttaaatgcatcctatcaattagacatacaaaacccacgttgatttttactaaatgcatttcaaatgactgttttttgcttgttttgttttgtatgagcacgtggttcaaattttgtactatcaattagacatttataagaggatgtatgtgggactgctactcctttagagttttaattgtgttcccaaaatgattacagatttgtgtgataagatagtggagaacttatgcagcagacgcaaaaatcaattacttttgggctctatatcttcagaagaatcctcaatggtagagaatgaaaatataaatgatgaattggatttaaggatagctagtgtccttcaaagtacagggcatcattatgaaggtgggttttggacagaccattcaaagcatgatccacctgatggaaaaaggcatgttgctattgtcacaactgctagtcttccttggatgactggaacagctgtgaatccactgtttcgtgctgcttatcttgcagagtcagcaaaacaaaatgttactctactggttccgtggctttgtaaatcagatcaagagttagtgtaccccagcagtctcacttttagttcacctgaagagcaagaaatgtatatacgcaattggcttgaggaaagggttggttttagagctgatttcaagatctctttttatcctggaaaggtacatctttcacaaagtacataagctactttctatttattcatatagtatgaatctatgacggatactgatatgtgatgttgttgtttcttaagttttcgaaagagaggagaagcataataccagctggagatacttctcaatttatcccattcaaggatgccgacattgctatactggaagagccagaacatctgaattggtatcatcatggtaagcgttggactgataagttcaaccatgttgttggcgttgttcacacaaattatttggaatatatcaagagggagaagaatggggctcttcaagcattccttgtaaaacatataaacaattgggtgacaagagcttattgtcacaaggtatgtaataatttattaagcatacagtagctactagcttacccaacattatatttattggtcaacataacttaatcctctgccatctttatcctaggttcttcgcctttcagctgctacacaggatttacccaagtctgtgatttgtaatgtccatggcgtaaatcccaagtttttgagaatcggggagaaggttgctgccgagagggaacttggacaacaggcattttccgaaggagcttatttcttaggcaagatggtctgggcaaagggatacagggagttgatagagttactggcaaagcataaaagtgatcttagtggctttaagttggatgtgtttgggaatggagaagatgcccatgaagttaagagtgcagctcaaaggctagatttgaatctcaattttatgaaaggaagagatcatgcagatgattcccttcacaggtaaagattattggaaagctgcattacttatttagttgtacattggcgtatgtattttaactcatataaagttaatcatgcatcttgtatttgcttgaaggtacaaagtcttcataaacccgagtgttagtgatgtactctgcactgcaacggccgaggcacttgcaatgggaaagtttgtagtatgtgcagaccacccatcaaatgagtttttccgttccttcccgaattgtttgacttacaaaacttctgaggacttcgtggccaaagtgaaggaagcactagaaaacgaaccccttcctcttactcctgagcaaagatataatctgtcatgggaggctgccacccaaagattcatggactactccgagcttaacaagattttgaacaatagtgaagaagttaaaaaattgagcagcagcaagcacatgactaaatcagtgtcattgcccaatctgtcagaaatggtcgacggaggattggcatttgcccactactgtctcaccggcaatgagctactcagactttgcaccggagcaataccagggacacgtgactatgacaaacagcactgtaaagacctgcatctcttgcctccgcatgtggaaaatccaatctatggctggtaagaagatgagaaatctattagtttcagttgtattattttttacttaggtataggagctatgtttttagccagaaagtcgtctttgtgttaattaaaatgatgtatttattattacctaagcatctgaacttagttaaattcaaattttgttggcttgatatggctagtaagttgatcagtccagtcggtctcagtaagaccttgtgtatactacttaggcgtgtaggtatatataaatatatgtgctctgtataagcctgccaggtttgggaatccgtaggtttcttctaattctctctttgttgtaggtatttgtttttgtagtatatgaatcttgatagtgaattccagtcgttttgttcatgacaattaactgtctttcttaccacggtttcctcattcgtgtaaagacatgtttctaaataagtaatgagaatcaaaaggtattaaggtagtcatttctttacctttgttgaggaaaaattttgttaaatatgcaataaaagaaatacttctcttactaatttttttttgaaagaatgtcatttagggtaatgatttttattcatttatttttttatattaaatgtacattgacaattttattctttaaaatgtcttacaaaataactgttatatattatagtttaactataaatgacagtttaatcaatttagaattttgattacgttttttaataaagtaaacaagataaatcattatgattttatttctaaacaattttagtaaa

SEQ ID NO: 112307 - DNA, 1826 bp, Cannabis sativa
gcatatatacattgaaagcgactccagtgagaaaaaattactctgtgggattcttttacctcggagcatatttcggtgagcataaaattattgttgatctacccaacaaaaaagaattcaaggaccaattcttatagagtactggcctttattcgtgtgcttacacgacctttcaaaaacctttttgtccttttgttgttatctttattctatattttttttataacttgatgttgttgttactcgtataaccaattatgtcaaaacgagcagatgtatcaaggttgtggcaaagagacatcatcagttgtttaatttgccatttaggatgaggactgttggcttccttatttacgaaccacacctaagaaattgtggtctgctaatggatgtaaaagttggtaagtatttgagttggaactcagttgcagttcttagagaaaaagaagagcaagactgcatttccctagctgcatatatcaaggaaattgttacttgggaagttgcctaaactcccgatggggctccctgaggtaaaataatccatttttatgggttgtcacccactgtccttagggtcaagcgaacctgtttcttagagttcagaggtaaccagtataatttttacatttcgaattatgtagaatttatcgcccataagtttgatagttggtatcctcaattttacgtccaattaaatgaccatcaataacaatgaacttttttttacttattttatattttgtgcattcgagcacaattaggagtgcacaacaggtgggtttgatcgggtttaattttttggattgtaagttttgggttattgaaaagtgcaaacttaacccacccatttgggagtacaggtttctgaaggttcaggtggggtggggccaggtttcgggttgggcttggccaaaaaaaatgttttgtgtttttttactagtccatgaaaccatgcccagagataagactcattagttaaatttcaacaagtacaaagtaattaacttaaacaaaacatagactccctctaataattttgtcacaaacttgatgttactcatctttgctgaatgaatctccttaagacaccaagatttaaactcccttcaagttatatgatgaatgcttgtttcctctcaaagcaagacttataggtatcttctcttaaaaatagcagtcctttcttcctcccgatgcaagacttgtagaaatattctcgcgaagatagtagtacttactttctcccaaagcaagacttataaccttctcccgaaggtagtagtgtttgctttctcccaaacctctttatcactcttatcaatacccttttaattactaaagtaaaaaataaaaccattcaaaaacccagcataaaaaaaagacttgaatttttatggatgacaatggtggccttttttgtttctcttcaaaatacccataattaatatcctaaatgatagttcgccataatcagctttgatcatctgtgaaaaagtcatcacttctaacttaacaatataatatttctattagaaaaaaaaaacactaaatgatatatctttataagtatgaggagataattttctcacctgtaagtgttttaggtggtggcttacggcttcgaaagcttttggaagaataagtttgaaaatctgagcattgtttgcagccttgaacaggctgagctctcattcgtgtaacaaacttgtatatagtgaaaaagaaaacaattacttattattcccttaaaacaaacctgtaacgctccaatattttaccttattttacaaagtgctaattttgatgcattaattaaaaagatt

SEQ ID NO: 112308 - DNA, 4804 bp, Cannabis sativa
tttattttctctatgtaggtcataaatgtaaattttttccattttcagtttattatagaaaaaatcccttaaaactttgctataacaacgttgtacgcttgcaaattaaatatcagtaaattatttggagtatctcaaaacttaacataatgtctaaaataactacaatatacactattatatacaataaataaataattactctattatgatatcaaaaaaatgcatcactaagccaataattacaccttacattttattactgttaaatctaattaattatctaaaccaaataataatattggacattaaattgtattgcttttttaaaagccaagtcgaacaaccaaatcaatccaattattataattggatatataatgtaattgcatctaattaatttatacactgccctaaattgtcatattttcttaatttgttgaggaaacttgaatcaaaaataaaatgcgcaacctttgcaaccatttttctttatttatttatcacaatttgaatttgtaagaacaaaaagaattttttttttcacatttttgatgaatcttacacatttttagtgcttactttacaaataacatttttttttctttttcatttgaatgggaaaatctattcatattccggctcgagtactgaaaagtctggctcttcaggcttctgaaacttgggcaactcagcatcgtgatcgtcgtccttgactttctgggctcctcttctcgtgttcgccgcgaatctggaagccaggatcgtaactcccaaatggggtttcccctgcgacttcgaactcggagaatatccactgccactctcttctcttcctttctctttatattctccatcatcatcgcccactaactgttcgctaaaatgattcgacgagtaagattccgccatgcttaggttatggaccagcttacgtttcttgtatcgccgccacgcagcctgaatgaagcaagccgcccatgttcgccaatggtaggagtagaaacggaaggtgtgctgaagcttcttgctgtggagccttctgaactggttggcaacgaatttgaggttttctgctcgaagagcaaatgcctctacttcgtctagagctctcactgtccttgttgatgaaggtaagttgagtgtagattttggaagcaatgcccaggcaagtagctcttcgccgcagaagtctccggggtttaaggttattgagttaaagaaaccggttctgccaccatttgtagttgagctctcaagctttcctcgaataatgaagagcatttcagtaactggatcaccttcacgtactatgtaagttccttgagtacttaagcaggagaccaagcgctcacatatggcatctagtagctgatcgtccatctgggcgaaaaagggtacctgaagagaaagaagagaagagaattttgtactctttttctttgttaaatggaatcaattagcttcaagaacagaacaaaaggaaggaaggaaggaaggaacttacacgtctaaccaggtccaagcaaagatggcgttggatatctcgacggagatctgttggtaggccattcaagattgattcttcatctactccacgagttgccaaccacttatactgaacgaatctcctaacacgcacttgaagatttttagggagttgacgatgtttcatccactcttcagtatctctacgctttagcctccattcttcaagcctcactgtgatcgattgcaaatatgtctgcacaaaccaaatctttcttataaaggaacttttctagtttaccaaggaaggttggttgtttggtttggtacagtacttgagtttgatacattatttaggcacaaaagaactttagacataatgaaatgaagccaaaaaggtttgaaagttcgactctttgggtgtattgcatacatacctgcatgtttccgatcaagtgtgcaaacagaaccagacccaagatggcaataagaatggcaaaacaagtctcacctacaaatgtggttgtgctcagactttggccgtaggagctgagaagtttcaaagcgacagcaaatttaatcaagattttcaaatgaacaaacaagcctttttgacattgtccaaggctagttttccattgcagatataaaaacctgagtcaaataatgaattgtatagtgcacacattacatatatgagcatacctcaagttttgtaaaccccaccaaagacaatataaatacttctcgagaaactgtgaggacagaacgttattagttactgcattttcaaatattccatatttgaaagtatttatttcagggtcgcaggtgttgaaaaccatagtgctgttcatccaattctggcgattatcatcgtccaaagcatcacaatccaagtacttgagaaggcatctaactgggacaatttcgtttttgcaggatgatttccagcacattgcatacctttcaaacgacaacaaataccatgatgctcctaagatctacaacaatagaaatttgatagaattgagtcaatcccatgatgtatcaaccaacaagtgtaatgagttttagatttaaaaaaagtaagttacatgactagctagcatatagagaaggagattgtatgcagcccctgcccaagctgtctttgtaacaacgccagtcgttttgataatctgagcacttagtggaaatatcagatacaatctaggaacatattggaggagaacaatcagtacaaccgcattgttggtatgatcagaatgagagcttctgcttgctggtatgataaaccatatcacaatctgccaaaaacaagtaaaaacaatttcaagcatttatttatccgaacacaaaatctgcactgtctgagttacacaataaaaaggtacctgaggaagaggcaaggcagctatgagatctatgaagaaatcaagtttcagatacctccttgcaatcatctttggatccataacaagttcacctttcccaaaaactcttgaacttggagaaacataggctgtcctaaactttaagatcatttgcagcaagtagaatacatcggcgagggtgcgaaaaaaggtaagaacaattcctaaattcaaatcagtggccatacatgaagagttaccatgaattagaaccgtgggaaggtagaagaagagtggatcaacaaaaagtgctaccaagcaaaagaagagaaaaactctgttccattgcaggaaaatatcacttccagggtcaagaatcttcttcctccatggattctcattttctgggaaaactttaaaccttccaaattttggaatataaattctgtttctactactactacttctacctccttctgcctcaaacaaaggttctgctgctgctactttgaacactggtaacggcttctctaagttactatctttattgttttcttcatggtaaaatctacaattggagaaaataaaaaaccccagttaagcatgcatgattgtaaaagaaagataatgaagtaaaggagttcacctgacaaacttgtctttcttcaactccatttccttggtttggtgcacaaacagcagttgaagaagcaagtatagtaaaaagactaagagttcgtgtatgaattgagctcaaacattagaagggaatagttgaatttcccatttttattttcctgaggtgcaatggaaacagtggttgaaagggtatgcaggaaaagaagaaaagaaagcaaagaacagaacagtttctcgaagaaaaagaggaaaaatgagtgagtgaggcttgaaagttgaaacttgggtgataattgaattgaaacaacgtgacttgtctttgtgtttttgacttttcattaaaaaagctcactcacctcattcctcaacctcaactaaatttattttcaaggaaagtaagaaagaaacacagctcagatggtcggttatatttttatgaggtgaatttaagaaagcaatgaaaaaataaacgtggagaccatgtaggagggaaggaaactattaaaaggtgtggttcgtttttttgggatacaccaaatttaatgttatttattttgttttgttaggagggagggaggcacgtcgtttgggtccgtggaactgggaatgggacccaaatcacacatacatacacctaccaccacaattaagtaattgggcaatgtcttgtccaccaaagatatacactagaataacatcactaaatcatatccacacatttggatttcgatgaaaatttggctaatttttcttattattattaatcatgaataatttttttaataataacattgttactaatttgactagatctttttttttttatttttgatatatgtataaatgttattgtatttgtagttatgtttggaatttggatacgtttttaaacaaaaaattaaaaagtaagaactatatgcaatatggtgtaaatctaactaaaaatgacaattttcggtcttcatctacatgttcttaattagtcactcaagagtttactcatgactctcacctcttttaatttacataataccaaaagaaaatacaagagggattgtgagtaaatgtataaatattatacttggtgggattatatatatatatatagtcgaacaattgctattaacaattaattatgttacttttctatttttttatttctaagtagtgttataaatatgggatgggctctttgatacgacacggaaaaaaaggtttgggcacatacaacatgatgctataaattgacacggtacgatataaaaaatagggctatttacaaaaatatgggaaaataaaga

SEQ ID NO: 112309 - DNA, 5188 bp, Cannabis sativa
ttactctgggcatgccagcgaggcatcctgctcggactatgcttcccgagcagatgttccaagtggattccacgtgtccccattcatgtgatgccgcgtcagagtgtaaaaattaggataacaataagaattagtttagtctgcattatattatttaatgattaaaatatatggtttcgtgtaatatgttttccaaaatgtataagtttttaaaataatttttttttgcacattttttataattattttattttttttttgtacatttatgaaaaattccttttatttatctatttatttctcccatcattgctagttttattaattaatttattgataattatttcatcagctagttaatttatttcctatcttcagttttgccataaatcttttgactgatatacattatttaatatctttcattttttttggtaagcaagaaaattttattgctatctcaaccaattacacaaccatttggcaaaactatacaagttaagcatccattgctaaaactctcttttggccaagccaatcactatctataaaacttatttgctatgtattaaagagaaaatttatctacaattgatcttttaattctttttacaactataggttttcttatttctatatacaatttgtttctacaaaacttgattctgaacttcctagatatggtacacagaaacattgattgctaaacatacataacccttttcagctttgaatgattgaacctctgtatccactttaacatttcttccaatttaaaatgttgagagccaatatcaatctagctaagcacttgagcaacgactactttattgtagtggcaagtgaaaaatagatgagattgtgtctcactctctcttccacagaccaaacaatgatcttcttgaataaatttaaatcgatggagtctatctctagtttgaagcctcccccatgttgctaaccaagcaataaactggtgtttaggaaggctcattcttccacaacattgcctatcaaactttctactgagtatttgacaatattttcttgtacaaactagcaacattaaaattcaaataccataaatcagccctttcaatcttagtcttgattaaatctttgactagaactaattactcgagaatccttgattccaaggtcacgatatcttggcatccgtattcatgtgagatgattcttggttttcaggttgtacattcccacagttttatttcctagagaagttcttggatcgttgggtcaagtttccctatttccagtgtttcttggattttgggggttttcttcattcactgggatatccctcgtgttcccaggttgatcatcctgagtatccatgggatttccaggattattccctcttggggtatccccatgtcttatagcctttaggtcttccctgtggtcatctatttggtgtgttaggtaggtttggaggagcgtcaccgtgtgcagcccttttagtcaatgcctcacgctctagttctgcagttcttcaatttgactcagccagtcactatcaaagttgcctattttctagttccactaatggaacatgtctagtgacataggcgtcctcatttcatctctctgggattttatcccgatttcgctcaaattctccaccatttcctctcccagagcgaggattctcagttgtgttcatcctatgaggattctaatgctctttccatagacgctgcgtggtttccccaggttgattctcttcatttggaggagtatcgtctgccataaatggaaagtttgaataagttttcaaggcagatatttttgcaatttttattacaaggctctcaatgaaatcacctgttaacgcataatgttgttaactaataaataagtctttttataattaacacacttaggaattaaatgaacaatgagaataataatagtaaaaaatgacaagagaatttttaacatggttttgaagttaactcttcatagtctacgagtccatcttatttagggactgacaaattgtataccaaacacaataaattatatatagaatgaaggattggtataatcttctctctttcataaattggtcgtcccttgttcactagattctgtgcctatttatagaagttaaggatgacacttattcccttaggatattatcacttgtaaccattcgtgaaatgtaaacaaatcccacgtttcacatttacacacatgggatactgacaaataaattttcataaccactcttttaacattatccataggcaattatgttgactatgcttcatccttctcgcaatgtaacaattctcctataagtgctttattatatataattgtctaagtatatgtcaagtaatacttcttgcgttcttctattaatgttgagtgagacatacgcgagatatttgtcacaacatgacaattgcgaggtgaaccatgctaatatactcatgagtatgtgggtcaatgaactgtgagatccttggataattcatactgttgtgtattatgtgtgtctcgagatagactttttttgttcgtctcactggtctcattagtcagtatttattattcatagctcacaattatctctaagagagtgagttcgaatatttataccaattgtgcttctcgaggcgagttgtctgaatatatttattattatataattctagttggttcattttctagctttaatgcacgtgtcgaaaacatattgttgctcgaaatatgggtataactaaaataatagcacataatctgcaaagcagagatgggtcagtgtacggtcttaacatctaggatgaaatttgaaattaggattccaagcaatgtttacaagaagtttagagagatattaatccatgcttatgacaaagggtaggagagacattgggcctccttctctaagacctctgtttgaatcaaaataacaattcatacttccattgactagtaaggagaattttggggaagtgacacataccataatcagtttgatgacttttgctccattgcaatcagcatatcttcgatgaagtactattccaacgtatggtaagctttttcaaatccatcttaatcatacaaaatggggcattacaacttctttcataagaacacactagatcttcacagatcataatgttgtgtggaatcaatctccattgaacaaatttcttttgattttctacaattaaacatggaagaatatgtttaagtctatttgatataacttttgtgatagtcttgtaggtcacattatagcatgcaatgagcctaaagttactaacatgagtggggcaattaaccttagggataaaagttaaaatagttaacttagctaaagtaatttctcagaattgagaatagacagacattgcaacaatagtgaagtcctcccccactatattctaagcttttttttttttttttttttttggaaaaaaaccactattgaaactattaggtctaggtgctttagtgtcttagatggaaaaaagagtagtcttaatttcctcatctgtgtatagttgacaaaaaaattgtttctacttattagtaagaactgcccttcttgcatcaattttctcataacttttctcttgtcactcaatttagaacacaataaattcttataaaagtctgaacaattgcctttacctccaactgcatgcgttatctttccaatctttttagtcatttgttaatgcataaacagtgattttcttttttttttttgagctttaagatgtagtgaaaaagccttcagttagcatccccatcttgatttcaagctactagttttgacttctgctttcataatggaatgtaatcatttaggtagtgtttggttagaaataatgaaatgaaaaagaaacaatttttatttcattcacttgtttgtttgcatattaaagtattagaatattattctaatggaatagtcttttttgtattttagtgggatgactattctattttgaaatgaaaaaaaaaaaaaactatttcaatatataataaaaaaaatgtaataatttttttatcaattttttttttatatattttagattttattccattgtattcttatttctattcccactctcattcctattctcataatttcattcctcattaccataatatcttctgatattcttccctggcattaatttctagttgaattaaagtagagtttaagggatcctgctgaggctttacttgacaatcttgcaacttcagttcaactttaactgcaccatcttcaatatcccaaaatttttctttatcaatctcctttaatacatttttaagtcaatgtagtttcttacatagttaaaacatggggtaccttggagaacccaataagcttttactctgtccagaaaatcagaatgattatgccatatattgaagtagctaaaaggttttgctccatcgttcttaggataaaaaggataatagtgcaggggagtgatcaaaatcaccaatagaaaaaaaattcactgaagcagtagagaaattatcaagccaactcttaatatctgcgttgctgttgcaattatattatggtttttttgtctcttagtttttttagatgtaaaatattcgcacagtacaattgacggggaattacagtgattcataattttaagagcaataagggccaaaaaggttttggttcataatttgaacacagttattcgctctgactatactagacaaagagaagatttggatattagcagccgaacacgtggtgggttggccattatgagagctgacgcgatacgaaaccgtggtatatagctaaaaccagggatttatttaaatattcaatattcatcaatcatctctaaatcgatactatactatacttccaagtagtatttatatatataattatttaataataatgattcaaaatgcaaacaaatttattcattacatattgatacattatgagttgttataacatttggataccacatcaagttctccaaacatatatgtttcttattttaacaattttcctctccctaacttagaatctacgacattaccaccatataccgaagtataaagaattaattatcgttgtattatgctgcactaattagtataaatcttatatattgaaaaaccgtgtttttgcaaatgtcagttgtatata

SEQ ID NO: 112310 - DNA, 1986 bp, Cannabis sativa
ttttttgactttttggctcttggatcaatttttttgaatttttggtggctctttttttttttttggctctacttcgattggtttattttttttgttggggttggatagtcattagagggtttgttttgtttgtttttgctctgataacatgttagaatttgaaaataaggtgaatgaggttccatctcaaaaccaattagcaatgggaggagtagcctattcctcttatatattctattatctttccagacattaacaatgtgagactctctaacaatagtttacaccaatttttctttcgtattatcttcgggaagttttcttaagtgctttcactggaattatagagaatcccttctcaagaagatgaagaaagttattttgtgttgttgtaatccagggaacccaaaatgcaacgatgtaaaaaagattatatttaaataataagaataatgaaaaaaaaaaaaatcttcttattgtttttgattcactataatatctcccacaacatcaaccaaaatagataggcaatgcgatccataagattgacacgtacaccctttgcttttatttgttttcctctcgtcaccatctacaatatctctctgtactactatataaaccttggcttaccataatgtttgttatatatatgtaaaaaaaaaatacaactacacccatcccatctatacagttgcattttcagagttgtagttttttttccttatccttatttgtggtcattttcttctacattttccaagttaagctaaacatcatgaacaaaaatcagctacaacgtcaggttgctctaatgaggagctctctcattgaacaggttttgtgccttaaaatcttcctaagtgaacatttgtatagtagtatatatatatataaggttattataattataattatttgaactttcataagatgatcatgaatgagatgtcacgtctttttaattaattattattacacttatttttagtcaaatcactaagtaagtagcaatgattggtttggtatatatagctagacaacgattaatatagttttgcacacatttataaaagagttcttgtcctaggacaatattgggaataactttctttcctactttaatgcttttgggttgggacaacgatgtggaacaaatttgagtgagccacaacgaataaaactatcgcattaagtttggaacattatcatcatatgtcttcgtgtctaaaaactaagaataatagtataaattcatatattttttaatgaaatcataatcatataaaataagcaaactagaagattattatactaaaaagtaaacttgtcttatttcatgatggggctatatatatatatatttatggatatagggccggggatttcaggtttaaaaacagttatatatagctagctaaaaagataactgcgaaagacaatatatgtatattggtactgcatcaaacaatacacaatatgttattaaatgtactacgtacaggggtacctggatgagcagcaatttcttcaactggaggatttgcaagacgacgctaacccaaattttgtagaggaaattgtgacactcttctacaaagactcacacagacttttccacaacatagaacaagcactgtgagttgtagtaactaataagacctttattattattattattattattattattatccttacattaatttatttgtctattaaatcgatgccctaaaatatatgctttaattaactaatattatttttcttaatcaatgtaggaaaagcaaacctatcgacttcactaagctggataattatatgcaccaattcaggggtagtaactccaggtactttttagttttaaaaaatttaaaaataattgaaaaatgtttttttttaaaaaaaaaatgaaaattggataatatattcttataacatatatatatatatataaactaatttttttcataaaaatgtagttat

SEQ ID NO: 112311 - DNA, 8574 bp, Cannabis sativa
aaaaaaaagtaaagcacaaatttatgcccgaatatgaaaatgagttggcttgtttaagaaatacaggtcggcacgaacaaaatacaacacaaatctgagcacgacacgaaaatatcgggcctaccctttaaaaatgttggcacgacacgacccgttttttaaaaaatacgaataaatacgagtcggaccaacacgacacgcacaaacttacaacactaaataagtattattacagtgtaaactaaactaattcttacacaaattgaataataatacacatttgtacacatcatatgaatggtcttttggtaatgtttcccttaaattatttggttgctttcatattgaaatttccagccttgttgctgatggaactcttaacaaagttattattgaatgataattcattgtgggaacatgtcataaataatggacacatatttatgtacctatttattaattgatacagaagcaaatttatataattattattattatatattattcattttttttttttttggataaagattgagagaggagcaagaatcacaaacacaagaaattggtggtttcttttaaggccagccagtcagtcaagtctctacactcaattaattttttagctaaaaaagtgtgaattccatctgttgtggactgtacatttcattttcttcttattcaactttgaaatcccagagacaattcaacctttctggggacaaaatacaaaaaagaaagagaaaaaaataaacaaataaatatctgaaattgaatacaaaatgaatcacatcagagagagaggttcattctttctggggaaagaaaaaaaactcatttacaattttttttagacaaacatggttttgacttttgagtgggctctggctatgactttgatctatactttcactagaacatgtcatatacatatatatatttatatataactgtaactatagattaaaaaacaatgatgatgagaaagaaaaaaaattaaaaaagatgcaaaatccgaaactgctgaagcattgtactcctggcaacgatatttcgatttgcagtggctgtgttaaggaccaaaatggatgaagcttcctgctgaataactatacatgaatggccagcaactgctgctgctgctaaggttaatagttttggggtcaagatatggtacctttcatgtgtcttctacaaaaattctgaagatgaaatcacgaaagcgtttggcatattgttttggatcaacggcagagattgaagttggatcatattggaatgatttgtatgcatgctcaagcttcttgctaatatcatagtcttgtagtatgtctattataccgaaaaacaggatgatgtcgtataattctcctgttggttctccaaccagttgagtctcgtaatcggttcttctcgctgtcctttcagctcgtgctggcatgctaatacctaacctaaccgaagccaacctaaagatcaacgagaaaaagagcaataataggtgagatataagactgacattatgtgttcctgtgctaatgtgagttttggattggaacttttagttttaactattgttaaatcacgaaatataccgagtagggtctgaaataagctgatcaatatcggctctggacgtgcaagggttagcttgattgtcaaggtctccaaaccctgcaaggaaagttcacacatatttcatatcttgagaaaagtttcatattgaaaaacaaagaaaaaaaaaatggaaagagatttactagatgccaagaaataaccaggaggagtattgattccagcagcttgctcttcgggtgtgagcggttcctgatatgaagcttcttgaaagtgaagtccaaccaataagctgtaatccataatcctttcttgctcaagaaaatcacaatctttatctacttgcctgcatcaagaaatattaaatttacaaactacttgattatgaactatggatcaatgagagtgcataatgctgaaaaagaattgaaagagaagctcaccgacaaaagtcttgaaaccaaacattgtgtaggcggaatatgtaattgagatcaagatctttgagagttgttgttgcatcaatttctgcctctggtttatcggtcaagcgtccgtgagaagaaccttttaaatcaaagcgcctatgaatgtgatactcagagcaaaagagattccccattatgacaaatcgcacctggaatttcagtaagttcatgaattagatgaatttttacttaagtgccaccaattagactttccatgcctcaaacaaattaccttcttctgagtagctccggttaattttacacaatgaaggccataaaatttggtgacaagagtattctcgaaagcacggacatgtttatagtaagcaggaagcatccgtaagagaacctgagagcagcatttagcaaatttgtattagaagtatgaagctgtgataattcaaatcaaatatgttcaaagagaattcgaagaagcatgaaagtaaactcacttttacttctgctttcttcatcgtctttatcatgtagcgatcatcgttagttaggtaaaagaagctgccactttttccaggagacgaaagctctcgaagggcatcatttccacatatagatagcatgtaatcagctggatccaccttgaacagtttcctcagagacctgaaagcatataatggcaccattaacatctctgtattttcattatatgcaaatatgttctgctagtctgattaagtcaaagctaaaaggttcatcaaaaggacaaaaaaagatgattttgcagttgtgggacatgtttaagctgacctgaaaaccacaggacaataatctttccatctgaagtcacatgattggtgtggtggagtgtatttggatccttctggtggaaatttggtccacactttttccttaggatcgaatgcggaagaccgcagatcaagggatgttgttggagcaggccttccaactgaatgcctgtactatggcactaaaatcaattacatgtgatgaagactttgctgaagtatacacagacaggttcaaacaacatattctctatggaaaccaatctaatcctacttagttaaatgttgttaaaatgtatgacttgatatgagaaaacattacataattccttagtacctgattcccaactgaagattgagcatgagttcataattcttgtggcctttagctatagtcaacccttgtttcttcactggctgtaagctgaatggcttctgcttgtagcctctgcaactctgcagctcagaatttccatacccttcaattccatcagagctatcagttggggattctctacaatagttactcactctcccatcaactgaggtcctcctaggcttcccacttgaatcatttcctctcctgaaaatgggctgtttttgcaagaaatcactttcatttgcagaccaaggaatcactttctgtgaagggaaaactgggattttttcacaagaacttatcttaaaatcattcaaatactccatgtaaacctcatttggatcaaaatcagattcccctgaagatccagattggtaataatatgttccattctgttcttttgggtccttactccaagtgcccacatagaaattcccatcagcccacttgaatgttccattccctttaggcaaattctcttcccaagacccatcatacctatctccattactccaaaccattgtaccacaaccatcaatcaaaccattcctccattgtccaacataatgagtcccattcttccattgatatctcccatgaccatcttgtaaccctctattccaatcaccctcataataatccccattagaataactcttaatcccttgaccttgtttgaaattcctaacccaataacctctataagtatcacctaaggaacctgtataagtccctttaccatccataaaaccattcttgaattcaccttcataggtggcaccagaaggccaactaaacttgcctttcccagtagtttttcctttataccactcaccaacatacatacacccatctgtccacaaatacttaccatgaccatgaggaaggttatcagcccactgacctgtataaaagtcaccattggagataaccttctcagcatggaaaatttcacctggatcatcatcagctggagctacagacattgttgtgaacaaactatttgtcctcttctttgctacaaccgcttgttgtgacttacggacttttgattcccaggccttcacaatgccgtactgttctttgctcattctatttttcaacattcattcctctctctctcttcattattcaccttcctccatgaaaacccagatcaaataacaaaaacccatttctcaaacaatgcagaatcttcaccagaaccaaaaaaataacaaaaccccatttctgaaacaaacccagaagcctggaaaagaaaaataaaaggaaaaatctatgcttcgttgttttgtgtgttgttttttttttgggtaagtttctttagttttgtgaaatggggtatttcagattttggaaggaatggagaaaagaaaagaagaaaaaggaaaaggaagtgtatgaatgaaactgttggattgatggggaaaggagagaaaaggttatttagtaccaatgtctctctaataagctttttcttttgttctattcttctttctttctttctttcttctgtgtgtgtaatttttattttttgtttttatttttttaatgtttggttaggtttgaacaaaggattcaacacaatgttcctcgattccggatttggctccttaaagcgctagcagaccaaacatttggaaggaagaaactaaagacacaaatggtggtgttaattgttaaatgttaaattaaatgctagtggtggtggatgatatgttcaattcaataccaatctaatcacttttccatttttagtctcttcttttattttaattattattaataataataatattaatacctcaaaactccaaatccaaatcccaaattactattatacttctaaactctaattttagtcttttttttaaagggtcttgttttctttctttaaatacaatagaattttgactcattacaataactacccttaatgtttttctcatttgtgtgtcttttttttcaaatgtaaattgtgaatattcctaaccatattattaattatatatgtgaaaagattaattatatatgtgagaagatcattatgaagggcatttatgaaatgagacagaggaatttgggtaataaatgaaaagaaaaaaagaacgtgacaggcaaaacataacagagaaaatgataaaagacagctcaaagatcaaggaaaaaaaaaatgaatatttcaaataagtgtcataataattaatttaatttaattaaagggtctttaatttaattaattttaagttataacgcgtcctatggtctctgccaatcgtgcagcctgctctctctctctctctcgataagaagacaatgtcaaaccctaaccctaaataggatggacccacttaagcttattttatgttttgtttaatgggaaagttgacacttgtcactattatctacaactcactcattagtacatgattaagatgggtcatcttatatctctctaatctatctatgtttatgtaaattgtgaatataatctatctatgtttatgtaaattgtgaatataatctatttatgtttacgggatgctgcgggtgtagtttggatggcgtcgtcatctggtatagtagatgatttatctattaatataacagaactgcttgttattcgtctaggtcaaactctcgcatattaatatagatttagtatctctattattaataattattctacaatgagttgattcgattgaattaataaactttatataaatttagttttcaatctattttattaaatatttattttttattagttgttgttaatagtagttcttgcaacgttatttctcgatcagcaaatggtgttgcacacacactatcaacctctattattaatttagaagattatgttagacgaatatttattaacgatttttaaatttatctgtaacaacaaatctatcttaatgaatcatgttttgttaaaaaagaattatattgttagttttaaatttaatcaagtgggatctttttctagctttatgttctctccactttttaattttccaatattattgttgattttagtagtttctttcttttattattgctttaaaacataaaagattaaagaaattttgttttgtttgactacaaaggcatgtgactatacttttctccatacatacttttgggatgtttttctataaatatgattaataataaagactactagatagctagtcatatttttacatataagacaacatttaatgtaaattaatatccaagaattatttctttaactacttcaaaagaggccatactatattgtattttagtttatattattgtgtgttaacccgggtgtaatgataaaacaaataaacatcatgttgtcatagaaaacgatataataataactctactagttatatctttgtcacaaatgttgacttcatatatacataatatgtatatgtatatatatataacatatgagtagaatttgagccaagatgccttttacatgattcctatatatgaaaggtgatatgaatccactacaatgtgatatcttgtcaaaaaaattcttgtatgtaaattatcaaactcactcatttattttccctctttttcttttataatgatctagttcaatatcatatcttcccctctttttataaagagatatatacctggcatctatatgtttttaataatacgtatacgttatcttataatttcaaatcatacatacttttaaagtgtattatattttagtaccttatcactagtttgatattagagatactcataattgttaaaatatattattagtgtttagtatttttctcgttgttatattattattggtataaatatatattaggttgtatataaggtatagaaaatattgaacactagtttctatttaagatgtagctttgaaattaatcatgtttttttaagtgaaaattcatcaattaaccattaaagagcccaaaaaggccaataaagagtaggattaggaatcagacacaaacaaaatagaatcttctaaagaaataatcaatctagccatctaggtagggaatggacagtagcattagatgctctgttacaacgacaaattgagaaactagagaaggatttcttaggattttatgagtacctctgtcatcagtaatatataaaaaaccatttgtatatatggtagacaaattacttttgtttttttttttttcagtgcaaacgtttttatttttagtatataaagaaattacaatttagttttttttataacaatgtattatacttataccccaccacacatgttactagtttaatttttgaaaaaaaaaataaaataaaagaataatttgttttttgaaacataggaacatttccattaaaaaaaatacaaacccaacaaatcaaaagatcaatatgaaattcaaaattaaaagctagagaagagaatcgggcaccaaactttagtagtatccgaaaaaaaacaatacgaacaagatcaatattgaattttagaacacaagtcggttgccataaaagctgtcgaggagtcattgcttggagccctcctccagtgtcttgggtgtcttgtaatagtgacatttcctctactgttagggccacaatgcttgttgcagtcataagtaacgaatgaggtgaagtgctaaagattaaaacatgtctgagtgtgattacaaagctaaagttgggggaagctctagctgtttgtatggcagctgaggggatggcggagcaaggttttgaacgggtcctattctagtgtgataatgatgtggtggttaaggcttttgaagcttctagtgatcatgaggtggacttcaacctgctgcacgctcgacaaaagtttcgtaaatgttgttacaggttcactgaatgggaaattatacacatctctaggaaatgcaactttgtaacaacattgcaaagtgggcgactgtgaacaaagtcctaggagatgtcagtccgaaagatttggattcaggtgtgcttgatgatgttattaaatggaatcttgggtgctaacctgatgtgttttcgaattttggttggtttcttttagtgttcttgttaatttgtcttttgctttgcttttccgttggtgtgttttagtgtttgttgtagtttttgcccaatgttattgtaacgcccgtattttatctttaataaacttaaaaattaattttaacaatttatagcttaataatcatatgggtcgggatcccgagtatcaaaatacaagttaaaagtactttactattgtgtacatatattttttttaaaaaaactaactcgctaaaatgcaactccaaaatacagactccaaaatattaagagatcgaaaccctccaggttgcac

SEQ ID NO: 112312 - DNA, 5593 bp, Cannabis sativa
ctctctctctctctctctccaataatatttttccaaccctctctttttttctgaaactgatctttagattcaacgaattaaattatttgtacatattgctttttgggcatattaattgttaattaaatcttaaatatatgaccaaagttgcttttcctttatgattgacttacttttcattttgacaactgttcttgaaaattaatattcatttcttaaaattgaccaactaattgaatatggtggccaaaccatactcctttatatatagtcagccagtatttcttcttattatgaatgaattaatgtttttttttttttttgaattatgaattaatgttttaattaccatatatatatatatagttacatacttacagttttattctttttatttttgaaaaaaaaaaaaaccttacacctagcttctagatgtatatatatacacattagttaatttcttactatcccattgcatcgaaatttactctcagggtagacccgtattaaaattgattaattaaatcaccataataattgatcagctttttatataaatatatatattttgtgtatatatacatatccaatatgtgaaactagaattaaggacacataaataaagtagtatatatgaattattaatttattactataatataaagactcgatctctttaattatcactcaggtagcattttctagagttcatcttaattataataaacatgacataagtatgcacttaattggttttaataatgcaatctaaaaattcggtgacttttttaaaaaaaatattggatccatgaaaaacacatatatttcttttttccaatactactctcttgtacactatatatatatataaagatatatatttacttataagttgagaggtacaaacatatataatagtacttcttatgatcagttaagcacagatcgaaaaaactatacacaacttttgcttggtatgaaagtacattgctggattatatacatgcctttaccaaattattatacattattcctatattgaattaattagagttaatatataatttgttttatatagatactcgaaaccctatgtatatatccaaagtttatatataaaatctaaagcaaaagatatcccagaaatttaggttaatattttattctgtagtggattgtttacattagtattcatagtcacttttaaccttgataaaagtacatgattttctcattgctcttttcatgaacgggactgtaaagccgaaacatattgtctattatttttttttatcaattattaatctatattttgtttcaatatttgcctatatatattattatttgtcttgtttgatcatttgatattattttattttaagttggtattgatcgtgatccacaactgttttccttttccttttcgtttatcttttatcttttatatatttttgtggagagagactatacatcaacattaatttagtatagttactatgatatcttatttgaggtttttgctgagccaactaagattctgtctaaatcaatataatacaaaatattaaggctggtctatatatagcatattcactttccatgaaccaaaaacaaaaagagaaattgctagaatgatattgatacccattatatcttgatgtatatataagcctaattaacacctttcagtaattactcatttaatctgctataaatagctagctaacattaataataagattataaattaaaaaattgtaagacatatttacctgaatggattcaattgtacatttatgatttatcccatatgaataagatagaagcatgagcggctgagacaatgaaatattcttcaataaatctgaaccaaaaaagaaaaaaaaaaaaaatcagcataagtgtgccacctcacatacccattataaatatataaattaattaagcactggtagcaaggcaagctagctacaaaacttcttctctcgtattctagttggaaccaagtgataaaaattgtactatatatatttgtaattaatgtacgccactatatgttatatacatataaatagtagtagtgatcagtaattggttggtcttgtaataaaattaagtaacatatatatatgggtagaaaacaataagaagaaagagccagatttggatgcccttgcttggagtaatgccgaacaagttgcgccaaaaaacgtcaagggcgtgcactttttcgtgaagttttttctgctgcctgcttatttacttatacttatttgggtcgacacatgcaactcagccccatgtgttccatccatttcatcaacacataataataataataatatcatcaaacttatatatatataccaatatatattatatatttaattagattaaaaaaaataaaaactattattacccaactatgactgcactcaaagtatagttgtgcctgaaaaataggaccccggccccccatgcagtgagtgcggaagatcgatcagaaattcagaataagtaaatataccgtttgttatatataatgtatatttatatatatatatttatgtctctctgtgcagtcctattccgaaagccacagtcaccatcaactaaaagctaggaatctcagtatattttgttcagtacattgaatagaaactaaagggaaaaggacataatatagatcgttcagagaaagaaattaattattgatgagtttaattcattgaattaaaaaggaaaaaaggatttaacacataaataataaatacagagacatgaataactgattatctagatcttctaattaatttaaacaatgtgaatttctccccggccgtcccctcctcataacaatttttctccctaattaaagtgctcataaatatatatatatatatatataagctagctagctatgaaagatatcattttatatgtagtaattaacctcacatgcatttacaaataatagtaattataatactaataattaataagaactagtgattattattatcatcattacattcattattggagtgatgatgaagatcgtggaagacatatccataaccagcagaatcttgatgatgatgttgaggattgtagtttccatagtcggaaaccaaagaagggtaattattattgttgttaaccaaggagctaattccactactgtctccagaattagtagtagtactggcagtcccagtagtattgctactgcttccgtctgttctagttaccatttctattgatgacccatacacaccctcatgatcatgatgtaataatgaaatatcatcaactgggtcactactactactgtaaatcaactggcttaactcatcttgaagtttctcaagcccaggatccatactacttggtagtacactacctccaataccaatattattgacatgattatgatcagcagcagcaaactgctggccctggctcccatgaaccataattgggagttgatgatcatataataatgattgatcaaaagggccgtaatactgatgatgaaaatgatctggggtagtggaagcagtggtggtagtagtactactagcactagtactatcagtttgatcagagaatcttcctcccaatttgagtagaaaactctttatagaggctgcagcttcttggtccttgagttgagaaacatcgtagtagctgctgttttgattaggagccataggatgagtcgttgctactgctggtagctctggccagtacggtagtgtctgatgattatgattaccactcatcattaagccgccagttgtaggaagaagaatattgttttgatgatgatgatcaaaagcaatagtggtggtagtagtagagggggtggtggcttctcttttgatttctggcttattcatcatcatcatgagattgttgttgttggctcggcgagcagcctgattagcggcggctgcggctgcatgttcttttcgctgttttcccaacagctttttcttcaatcttgtgttccagtagttctttatatcattatcagttcgtcctggtaactgagctgctatgatagaccacctgtatgtatgtacaaacaaaaattgtaattaaaagattgtattaataaattaagaagggatttaatctgttaattgcaatcaatatatatatatatataattgaaccaatataagtagtgattaattacctgcttcctatgcttagataaaggctgcaaataatgttatcttcttcttcagagaaacccccatgttttatgtgtggcctcagataattcagccatctcagacggcagctcttcccacatctcttaagccctgaaaagtaaaacaaaatcaaagaataatgaattaactctcaaattaaagttaattcatgtatcattctcatatatatatatatatatacctatcttctggggcaaagcaatccagttgccaccggtgccgttttgctcaatataagccttaagagtggcatcttcttcaggtgaccaagggccttttttcacattggctttgtcacagcaaggagctcttcccatggttttctaccctcttcttcttcttcttgatctgttttgattggttggtgtggataaattttgtttctggggtcaataattaagtaagctctagagagagctatgaattgagctaaaattagctatactgtagttcttctctttctccctctctctctctctagctctcctggttgttgttaccaattgatgataacgataatgataacgtttaattatatatatatttatataaagagaagagaagagaagagagagaaagtagtagtataatagctggagaaggagagacatacatggaaggaaggggaatagagtcacagaatttcaaaaaggtgatatggagaaaaagatgagagagagagaaaacacctttatgaatttaataatgcataaatttaaatttaattatatgccacaacagtataatagggcttttctcatttgtctttcttacttaagaatcaacattaatattaaccatccaccttgattgactctctctctctccctctctctctctctcatgtatgggtgcatgaagttgtggatgatgatgatggccatgcatgcatgatctaaataaaataaattaaaaaagttatatattggggtgggcccaaaataatatcaaagaaatgcataaagggctcttaattaatgataaacgtcttgcacagttggttgaatagttcttcattttatggttttactcagtatttatatatctctttgattacgcttgatatgtagagaccatgatgatagcatgcatcaatttgaagtagccatctttatttggaaaatttctttcttctttcaaataattaattcatgatattaagaaaggaacaaatcaattaacttgtcatactttgtatactacttcaaaaaaaaaaaatggaatcaagtacaaatgtttcaattttaatataggaataattacataaaatattaatttttataaaaattttacatttttaggtttaaagtttttttttttttacaatattctataaaaatacaagaaaa

SEQ ID NO: 112313 - DNA, 3601 bp, Cannabis sativa
  modified_base (383)..(384): a, c, t, g, unknown or other
tctacacatgcaataatgagaagatgataaagaagtttaaagaagacatgatgaagagttttgaaatgatcgatctgggattaatgcagtacttccttatgatcgaaataactcaaaaagaagatgggatcttcatcccactaaagaagtatacaaaaacactcttgacaaaattcaaaatggaaggatgcaagactgtcttaactccactagaccacaataaatcacttaagaaaaaagatggctcaccaaaagtagattaatcaaaatttcaaagtctaatcggtaacttactctatctaactgttatgagatcaaaataatgtacgcaattagtcttctatcaagattcatgcatgatccaagtcaagttcactacggannagccaagcgaatcctcaaatacttgcgaggaacaatactctagaaatatggtacggagttacaaatgagtcaaaactgttggctacacaaatagtgactgggcaagattcatggacgacatgaagagcacatcaagatatgccttcacacttggatctggaatatttttttgggcatcaaagaagcaagcaatatttgcacaatcatcagtagaagtagaatatattgtagcagcaatgactacaagccaagctatatagcttaaaagaatacttaaagatatgggagaatcacaagtggaagctatagagatctactgcgacagcaaattacttatggcaatggaaaaaaaaatctagtattttacaacaaaactaagtttataagcatcaagtaccccttcattagggaaagagaaacaaataatgaaattgagctcaagcattgtaggactgaagaatagttactaaagcactaccaagaggcaagttcgagctactacgagacatgattagagttaccgaaatatgtatcaagaagtactattagaaaaagtgatacacatttctacatttctctaaaaaatgcttagaaatcttaaaactcatcacatgaagaaaagaatatataaattagaaaagtctagaatatttaaaaaactagaagtaattaatcaagaagaatctagaagaatgtatactaatggaaatcaattagaaaggtctagaaaaattataaatcatatagagctagaataatctagataaaattaaatgtaaagggtaagcaactataaataccccatcaagcttcttaaattgtaactatgcttgaatagccaaatcaagtcattattactactaacttactataccttgtctcctctttttctacacacataaaaattaaaacataactcttctatcttgtcccaccaattatccaactcataactcatcaacatcatcatactacactagctacctaatatctatcctatacatcctccacacatttatactaatttaaacaattcaaatacaaataacaacattttactctattctaatttctcaaaaccatcaatttcttacaattctgcaagccataaagttgttgaagctaaggcttgtctactagcttctttttcccttttaatttcattgaaagatttgattttggtgagtttatgggagtgttagttacttttaagaagttatgagtttgacactagttttttcatgttctaagctagaaattatgtttgaattggagtttttgagcaattgtattagtctaaagaaaagtttgagttttataactcaaatcttggagcttcaatggtgatttgtgattctttagattaaaatatgttttaagctttgagttatgttatattaatattatttaattgctctcagaagtttggtaacaattagagaagtttggaacaagttttgtgagcttaaaacttaaatttattttgagttcattttacccagtaacaagtcggtcagccggtaaagggccataccaattggaagtccagttggactgtttcaagaaaagccgatttttgtattttggctataacttttcacttaagtgtctgttttggacgttctatatatcatttgaaagctcctgaaaaactctacaatatggtacataaattagagccaaaatatatgatttattttaaggtatttttaccacatagttcggtagaaaaacctctagaatttatatacgagtattagagtgttttagaataggtacttaccagtttaccgctaatgtgatgacttaggacctccgatcatcaatcagttttctactcaagttgactagcataccagaatttaaatttaaggtaagattagtagagagatgaacatatgcacatgttttatgataccatttatctggtatactaaaaatagcagtatagatgtacataaagttgaatttagatactgatatcaagtgatagtagtgggtatcgaatagtaagttttgccaattagataacatatcagtactcacggtattggtatacattgagttgcacttggataccgacagtatatatgtttggaaatatattaaagtacgattaatgctaccaacactagtacgactagagtacggagtgcagtttggtattattgttaattatacttatagtattgattaatgctaccatattagtacgactagagtgctgagtataggttggtattatggtgagtcatagttaagaacgttcgagactcgttgtacgggttgcatgctagtagtagacttatgataattgagtgtatgggagcctacttataggtcatatatattgtatgttttatacttttcttattgagtttgtcgactcacagatatgtttccatgtgtaggtaaagacagggctaagattgaacagcagtgagtgtggaggttaggtgaagattctacgtacatatctggatgattagtcctggagggcttgatcttcgggttagcatagacttaattttggctgtcgctaggcaacacttttgatattatgaactttatgtatgttttgaaaaatagattttgagatcccaaatttgtaaacactttgtaaatatgatacagtttagtaaagttatattattatgaaaattttattaaacaaactttttggttaaaactcttttgattagcaaagattagcacaataattaagaaatcactataaaatgtcttagctagtggggcattatagatatccataagagagattcaagtgaagaaaatcaacaccaatgacaatccaactgatgttacgataaagtatgtcactcaagcaaagttcatacattgtttgaacttgctcaatatcacaatcagttggtagcttttcaaggaagcatattcttttctcctgtcattttctttcttctcactagttgcttgaaactaaaaggtaagttttgttatgtttagttacaagtaaccggtcactacttatagaaagtgactattttgttagtcggtccaactgacaactcacctttctttgtgagtttagcatttaagtatgaccaatagctatcattacaaaaaatcttatttttaaccacaacaaaatttgtgattgaagataaaaaatttgtgactaattataaattatcattattatcttgtgactaaaaagtctgtggctaaaagtattagt

SEQ ID NO: 112314 - DNA, 2150 bp, Cannabis sativa
  modified_base (32)..(33): a, c, t, g, unknown or other
tattaagtttacttaaaaaaaactaaattatnntaaaaaaaaatttatttaaaaaaaaaaaaaaaaagcttcctctcaattttcttctttttaatttgggtagcacaaacctcattttgggtagccattggttggactcgttgaggggtgactaacatcattttaaaaacacgttttatgaaatttactatgggtaatactttgtacaaggtgatttggaattacatcaaagtttgatttgttgatggcaagatgagttgagcaccgctgaacatgacgggcatgggatgattatttgttttttgatctggtgacataaatggtgtacttagatgtaagttctaagacgattaacaagtattgatctgtatgacaatgttgtctaatttcgatcattgatgaactctttcaatgaattacactgttgcaactatctgttcaaagatcaaccttaagtcatcaccaaatctaagtcaaacataaagttgatctcttggatgagttacttggttatgccctttggctcaccaacacttcacccacattcccaacccttatgacaattagtcttggtactctttgactatattttggtgtataaacaccggctaaatgatcattcttgacatttatccatcaccctttggcttttgtgtaagcataagctatttgccaacctcaagaagtgtatgtctatgagggatagcatttggaccgcacaatctcaagtgatgggatggcgtggatcaatccaagtgcaagtcatataagttggctagagcctaagaacatttgagaaatgtgtggaatcctgagagttcctaggtactactgcaagtttgttcgaagttattgtgagattgcttaaacacaactaaagaatgatagaaccacaaatgtggtttttgaaactctcaaatgagccatcatcatagtttaagtgttatcactacctaattttgaccacaattttcatatcatgttggagaagttttggtgcagaggcatcactcgtggcttcatatagccaggctaggccaacaagtaaagagccatgatcacaattccagtgttgatggtgcctaattttgaccgcaatttcagtatataatgttggggcagttttgatgcaaaaacagtgactcatggctttctgtagccaagtctaaggccaacaagcaaagtatgtgcggaggaaatgatggtcacggttttgctatccaaaaatggtgccctttcctacttgaccaacaatttgtggtgcacacatgccaacgcttaaagttcctaataaaacaaacacactgtaattccaaaatatcaacgttgaatggaaaaacttatgggttgcaatgtaagtcaggcactggtaaaaaggttgttgatgcctaccatgtatcaaccagccaattggatatcaaaacctacttgtctctaagttgattgggattcttcgaagcaagagttgaaaaatgataaattttggccttgaatatttccatgtatctcaaatttggcgtgctcgtggcatgattaattcatcccattactgcccccttaactgagccaagatttggagttggtaattgactcaaaaaaggtgattgtcatacgaaacacccactcatatgtgttgggaaaagtatggttgttgatcaaatggaaggacttgccttttttttaatcaacttggcagagctacaacaacttacagcagcaattgcctcattttcaccttaaggataaggtgaaagtttgaatgaaggcaatgataggcctccattatgatacaccttttctcatagaaaatcatagaagtgagattttgaaaaacaaaatcataccaaactttagatgtcatataatcagtttgattgtttttagatttccaaggattgggtttgtttttgttagaatttaggataagatgcatggtgttccatctcaaaaccaattggcaatgggaggagtaacctattcatcttatatatggtattttatttccacacattgtcaatgtgagactaactctaatacaccctccttatgtttgggcctaaaaagcgtgagtataatgtacgaccttgtggagtgccaaaaaagtggtgtattgctatattttagcacacctaaaaaaaactatactccaa

SEQ ID NO: 112315 - DNA, 1359 bp, Cannabis sativa
ttttgaacagtgaaagcctatatatatatatatatattttttttttttgaatcaaattggaattttattaattcactaaatctgtaatgcaatagggacatcccttttattgaaaactaaatcagaaaaagaacatgacgctcttgtaaagttatgggcgactatattagccgaccgtttaatgaaaaacaaaagaacattgttaagcaaaagaagaagcttatgacaatcatgtatgactaccccaagagctgacaccaaggaaattttgctacgaattgcttgaatgatcaacgaacaattagattcaagttccaccgaatgatagtcagattcaaacttttttgtcttttgattgtatgaaaagactaacttgttaagatgtgggacctttattgcaaaaagtgagttagatttagcatctttgatacagtcttagcttcagtattcctgataggtagtgcaatattataaatatatatacatattttggtaaaaaaatactagtgtgacgtatactaaaagtaaaagtatactaaatttgttttaaaatataatattatgccaaatttaacttataattaatatttttttttatttttattatcatcatttagtattaattaatttaatacatttttttaattgtaatattgtcattattttttaaaaagtatatttaatttatttatgtgattttttttttgagaaaacttgaatactttacttaagaaaagaaaagagtacaaagtgtttgggctaaaatggaaggtaaaaattcattccaaaaacatttattgtttaattttaaacctgctctagcataattatgagctattttgttatactctcttgaaacataaattataagcaggttcggagtgaacaacaatgagtttttaatacatatgataatatcactaagaacagaattattacaataaaagttacagattttctccacaacactcttgcaatctgattcaataatagagactgggagcttgactgcttggatcgagtaaagagcagcaaggattgctttaggttcagcgacttcaggaggaatcacacctgcaactggaatgactaatccagccttaatgttgccacaatcatccttagtcacaacattatcattctcccccacacttattttcttacatccattcaactttttctcatttagacataactccttaagaatattagcacaatgaggctcttctttgatttcctcaagacatagaatttttgccccaatttttgaaagagttttagggatctccttcatgggctcctctttcttaaattttttcaatctacttggaaaaggtggaggagtgacataagttggta

SEQ ID NO: 112316 - DNA, 2000 bp, Cannabis sativa
attaaaatacactaattggtgttgatgtatcaagtaatagtgttggacaccatttatcagtatgtcattgttggttgaatttaaaatagaccccacttactagagaaatactaaaaagtattactcgtgtttagtatcttcttcggtgtcatattactattggtataattaagtatcgggtctcatataactcgacactactggagctcggtagcaatgctccactcttactataaaacatcctaaaccacacaaaacatgacacctacttatgttgggaaacttaaggtacggcagaagtacatctaagtcagtcaaaaccagatatcccttaccttctaagatcaaaattgcggttcatcagagtcttaagtttggtgtagtcctttttaagcaatgccgtccttccctcctcagctacatttgcaacttctttcattgttgatattataaactcatcaccatcaagccacctttgccgaactgtgctgtgtacctgacatgtatgttaattctacagttacagttccacactcacttttaatctaatttgcccaaatgaaaaccacaaaaaatatctcctaaccttgccagaatcacttggattttcagcatagatgagatatagaggtgggaggagactggtgtccatgggtgtataaataccatgacccaacttatccaaatgttccttactaaaatcctaacaaaaacaaaaccatggaaatttatacgtaggatacaaagtcattcaactcagaaatcattttaattttttgaaatttctgataagataaatatataccatgtaaacaagtcctccataaacctgggcaaccctatcttgaagaccagcaacaattccaagctctttctcagcattgagaataagctgaggcctaatttccactctgattaactgcctaacattgtagaaatcaagaagacagcttaaggcagcacatacaatagcacttgaacctgaaagtcctgtctgaaaatgtgcaaattataaattttctctctctctatatatatatatataagattccaatacatagtggcaagttcatcaaaaaatgcagcttctaaagaaagaagtgggtgttaattacctgtcgagggatattagtttcatatgaaagagtgaatttttcggcatgaagatcaattttctcctctttacaataattacgaaaaactttacaaatcgccataagaagtctcacaccaccatagtaaccttcattctccagccgatcaacctataaaataatataacaaaaaactttacataggaatatgatcgaacacgtacgtagcatcacaaaacagagtataataataccaagtggtcgagagatctaaagttgacgagatcgtgaatcgggtgaggtgagatgatcaattcatcagaaggttccaatctgaccgaagcccagaaatttccgagagagaaagagatagctttaccgtagtagacatcgctggggttccccagaaaaccaactctggcgaaggccttgtgctcgatcgttgactgagaacccattttgaattgccgctcaaatctatactgaatattgaatattgtaatgtaaagagtaagtttatggctttgttattggtttggtttcttccgagttaagagagatattaactcagtgagtcgtggagtttccgagtcgaggttataaatagataaaaagaatttatcatcaaaaacaaaatagagagaagacaacgtaatgcgtttcaggtctatatttattgttatcgccacgtcagcataagcacgtgaccattacacttcattgttggatggtacttgcttgctaatctaaatctaggctgtcggtgaggccgttgcacttcaacaaaataaatattaactcaaaactaataaaaataatgataaatgtattttttaaattttcatcttcaacaaaataaaataatactattgacaaaaataaaataaaatattatcaatggtatta

SEQ ID NO: 112317 - DNA, 2626 bp, Cannabis sativa
aaaaaaaaaagagagagaaagaaaaatgttgatcatggcgcctatgtatgaataggagatgcaaaataagagagaaggacattacaaaaggaaaagaaaataaaacaacagggatggaaaatatgtttatggtggtactcaattagcttattgtgaaatagctttattgtttttaaattactattataaaactgtgtgtaaaagtcacttatttgtaattttatttctacttgtttttatttttttagaaaaaatgtggagatttggtgggcagtttgaaggtaataaatatttttttaatatatttgttttaactacattcggtgataaataatagtctttttcgagacaggatgaatctcctaaaatacattttttgagtcagtgtcaaactccaaatgaaccaaaattctattatctcattccatgtatcagaatatgaagttcacgaaaaacagagtaaacgaaaaacaaaagagaaatacagagaagatgaaagaaagtaaaacgagaacttgaaatctttattgaatagacaagtgtatttatatacatcttagacacacacaacagaattagttacaagatatttgtgtcagacggaagttgaaaaaacagttacaaaactaactgaaaataccaacttaaacagagtctattcaactatattaacatcccccctcaaactaaatggtgttggaaccatttttagtttgaattttaagtacaaaaacctatcagttgagagagctttggttaaaacagctgcagcttgatcaacggatggaacatagcgaacagcaagttgattatccagaatttggtccttacaaaatggagatcgatttcaatgagttttgagcgtgcgtggaagactggatttgctgcaactgccaaggcactttgattgtcaacctaggtgacaggaatttgatgaatagagacttgaagctcctgtaacagagatcgaatccatttgagttcaacagttgtatttgcgagagctctgaactcactctcagtgctggaacgtgctactacatgttgtttcttggcaaaccagctgatcaagttgtcaccaagaaagacaaggtacccaccagaggatcgacggtcatctatactgctggcccagtcagcatctgagtaagcatgaagagtcatgacagaagaaggtcgtatccataatccatatttgattgtgcctttcaaatacctgagtaatttcttgcaagcttcccagtgaacagatgtatgagcatgcaagaactgacttaatttgttggtgatgaaagccacttcgggccttgttaaagacaaatactgaagtgcaccaagtgtgcttctgtataaagtaacatcaggaaatggttctccttcagtgagagaaagtttgacagtagaactcattggatttggacttgccttggcaccctccatatgtaacttgactaataggtctgtaatgtactttgtctgagacaagtacatgccggttttgtctctgtatatttccacacttaagaaataatgaacttggccaagatctttcagagaaaaggatttgttgagatcagtaatgagacttgaaataagagaagcattggggcctgtgattaatatgtcatcgacatatactagaagtattaccagatttgtgccttttccataaataaagagtgaactatcggctttggaatcatgaaatccccatgaccttagagtcattctcaatttatcattccatgctcgaggggcttgttttaggccatagatagccttgtgtagcttgcacacatgagttggattattggtgtcttcaaaccctggaggttggcacatattgacagtctcattgagagggccattcaaaaaagcattacttacatctaacagagggacatcccagttgtgagatacagccaaggagagtactgttcgaactatagtaggttttacaaatggaccaaaggtctcttgaaaatcaattcctgcctcttggagatatcctttagctactaaccttgacttgtacctgttgagagacccatctttattgagtttcaccctatggatccatttacaccatatgacattcatggaggaatcatatggaactagagtccatgtgttagctttcttaagagaaaatagttcactgttcatagcaccattccactttggattagatagagcatcttttaatgatttaggttcagtaggtaagagtgactctggtaaagggtgctttgtggctatatatgactttggtttgaatatgccactttgagacctagtgcacatattatgggaccgagatggacaagtggcagttggttgttcatttgtaggtgcttgaggggtaggattaggtatattggtttgactggtaggtatttgtgttgtgtcagggagtggtgaggggacaacagtggtgatactagggtgttgaaccgggtttatgatgggaggtgatgaaggggctatttgtgtaggaactatggaaggtgtctgttgtggaatgcagtgatcacggggggccatattgctatttgaggaaatagagtgtaataccctggaattaagaaatgaattagcaaaaccctaattagataattatgaataa

SEQ ID NO: 112318 - DNA, 1110 bp, Cannabis sativa
gcataaaacccaacaacatcttccacccacgcaacaataagacacgtggcaaatagagtttagcaaataaaaaggacatgcgtcaaggatacatcaaaaggaaggacatgtcacacatgcactaaaaggatgtacaaaataaataagaaaaaactacgtaaaatagggggtgacaaattatgaactgaaaaagaggaacccacattaaaaatttctgacggtttttggtcaaaacaatgcccgcctcctcaagacttgctcaaactgaactgcgatgtcaaagtaggctcagatcacatgtgcattgcagtggtcgctcgaaatcacctgggtgaggtgatttgggtgacctcaacaaatttggagtgctctgacgctctttgcggtgaggcgacgactgtttgtttggctttagaggcggcgttggaacaaaattggaaatttattattgtcgagagtgactccaaggcagtggtcaattccattactagggtggatcctaggttggaaattgaaaattactcctcattttgtattagagtcatgtcctctgttgccaattcccttttttgtaatatttctagaacatgtaattttatggcccataatgtggctaagtgggtgtttacccataatcggtttggttgtcttcctatgtctgccattcctaaaaatattttatgtaatgacccggaggtctaatttttccttataatgaacgatcacatttttagaaaaaaaaaggagagagttcaaaagtagactcccttaacaactatgtctaacagaggagcagaacatactcttgctcttaactgattcatccgctgtcatatggtgtttggtatgaagatactctcagaaattctagcacgtttatgggagcacatctatcaactaaccgtttttttgaccatttttgttttttgataccagctccatatctttcctgtttcgaaacagatcccttattatacctggttaaggtatattttaatacttagagcaatcccaacaatttctctactctattctttaaaatacctcactaaaattctactttttttttcttttacttttacctcacacatttgttggaaattattttac

SEQ ID NO: 112319 - DNA, 4329 bp, Cannabis sativa
tagtatgaaatatttgtttaggaaaaaaaaatatttttctgcattctttgctattgattattatttttattttctcattcttttgttgtgtgacaaacttgttaaacttcttgcaggaacatcaaagctgagtatgtttggtcgaataggtattgcagcaggtaggataaaccatctctttcacaaagtatagtttttaatttataggctattggttttttattattattaataatagatcgtggatgtgtaattgctcttattttctccaatgctcatttgcaattgcaggtgcttctgctgctgttggattgtggagacttggtacatctttagattcgtccattgatcagattcttactttgcaagaaagttctatgcagagagagttagcatctatgtaagtagattcattcattcacccttttttctaaaacttcatgagtttttctagcttgtgcatggttaatgaaatcagatttcatatggggttcagttagtagcatggcagtttcgttgtctggcattcaaggaattgctgatatgatttcttggagtttttatttttatttgaaatgttatcttcttttcaatatattcttctcccgccttttcctctagatattcctaaacaatcagtgtgtaattggaagattcccggcacttaaactttttagacattcaaacagttcttactctgttttctgtgagttgtgataaaatactggactaattaggtgttctagtacccgataaattttgatatagtactttaaatttcgagttgtggaaaagtatcagaaccagatactttactttaattgaattacttacccaccaattaagattctaatgacagagtggtaaaaaagtattggaatgatccttggagaatgcagctcatcagtaagcacttttactcagagagagtttttgatgactcaaatgtggatcttccaaaagtaaggtggcggttccgtaatttctttagcgatgatggtagtcttagccaaactacacatggtagtgactctcatggtgaatcccagagtgcttctcgtggtgattataatagcaatactcagagagatcccagtggcattcgaactgactctcgcagggactttgaaggaaaatttaagtacgagtccaagcaagctcctgtaagtacctaatcatgttttctttgttcattgtagtattcacaaaacacatgtaaaaactttttgataaataattaaggaaaaaattgactcaattacctaatatattatgtttattgacagaagtacacagtagtaacttagttatgggaaaacatctttttgagtctttctagaatgctatgtttttgtaatgcacttgcacccaataaaattttgtcacatatgaattaaaaaatacgacaaccccactttttgcaacaatcttttcattttttagttattattttattatttaaattttaaattcttgtaatcatcaatttgttcagtatttccatttatcagaatgtctacacacatatttgtatctatgcttttatgttttaaagaagttgtatttgcctgcatctaaacgcatgtaatcaattaaccaaagttctcctgattgcacctatggtaatggtaccttatactgcaaagtcaaatatatggctacagtgaaccaaaatttcagcttcctgattaaaagtaacgaaacaataacaacagtaggaggggtttgtttataaatcctcttgaaagagggtttcttatttcatttttgcaagcatactagagatcttgcttttgtttccatgggatgcagaataaagttccattctttctgactttactttcatatcacagatgaacacagctcttgattcaatggatccctttgattgcttttttggttatccatcaatggaggagattcctcaccctagtaacccctcaaccacatcccctagaacgcacactcgtaaccatagaagagctcaacgtaggcgtcgaatgcgtcaccaggatgccttattgaactcccagcatgcataattgtgatttgtatctaaataaaacattttggagaagaacaaggaaggtacagagtggaaatgttgatatgatttcaggtacatctgttatcttacactttgcaatggttaataccgtagtgtcaatatggactcttcgaatgctttctactaggctcttctaaatgctgggaaataatgttcagtttgttatagtgatgctaagatgttggaaattcagtacattggctttattagcaacataatattaatcacaattattatgttgttaaaagtcttgacgccagcatgaggcagctgatgatgataagaggaaggcatttacgtgggagaactcataatgagagtggtattttattcatagaagctattattgcgtggaattaatagcagaatttcaccttaattgtttatgtattgcttcttaaaacaattttacctcattgaggtctttcccctggaacaaaaatattttatatgatgtgaaataaataagaaacaaggacttgaatgttccttccaatttcctcacatggtttttttcttttttccctttggcccattttcacatctgcaaatcaaagatcaactttgtaagaagccatagaggaagaaagaaacatcaattctctaatgttctagctaaatctattatatatttatgaagtattaagctttgctgggcttggaaagctttagcaaagcaaagaaagataaaagaaaaagcaccaaatgcaatatcaacaacacaaagattcttggattgttatatatggtgtatttagttattattgtgtgtgacttgtaaagcgactttcatatacatccaaaccaaagccagtggttggccatttaccttatataattaagttcatgatacatgatgtttagccaatttgtgggcctttttcccttttgggtgtagtggtgggagaacctatctatgtaaggactgaaatcaatcacaccatgcaccatgcatttggaattgcaatgagagaaaagggtgtggggtttggggcctaccacacgcgtcaaggcctcagctaaaataagacaaaagattacccaaatcaaaacctcttttttgttatatatttattatatggtagagatggattaaggatgattaggttattgtctaacactttgcttactcaccctttcctggaaagaccagggaaccttcattcctttgtctttgcttggtgaaaatggaaataaaaattataaactattttgcattaaaaatacatatttttatatatacgtgtatagtgttatatgtatacaatgattttgaattgtacctaaaatttagttacatgtagtcatcatcaatctatagtataattaaagctatttttcttgaacttatggtaagaatgacaaaattggctcacgaaaattaagaatgtatcatatcatttgatcagaaaatcaaatgatatgaaatttgatcacaaagtaaatttatatattccattgaatgtaatagaaagaaagcataaattgagcaatcacccaatcctagataataaaataaaactacgttatatattcttgtagagattgatgctccttcactattgaatagtggagtattgttctaatttttattttacaaataaactaagtattaaacttcatggaatcttttctttattgatgtacataattttaaaaatcaaccaatataagaaaaatatggtttcaaacctacgtacagatatttgattttggggtttagattgtagttttgccattattagctaaagtttttctttgctcttagtagaattttgcatgtaaccttcctatagcgcgtagtagaattttgctaaagtattagtaaaattacccactttaatgttaagtttttggagtatttttgtaaagttctcttttttggcaatttagataccaaaatatttttttatttatggtgtgatttcttggtatttataaaaccgattttctcaccttaataatatgtttttaatgttcttttctatcataggaaagaatctttattcagccgtcttttttttttttttggaaacttcttgtaagagaagaaattctcttatgaaaagtttgctttttatggaaactttctttgactatggttaattttttttctttctcctttaactttgacatgtaccaaatcatgtatgaaaagtttgctttttattgagaaagattcaataaataatcatataatttaaaatagtttaaaaactaattttaattagtgtgtggggttatttgaaaatcaatagtga

SEQ ID NO: 112320 - DNA, 3398 bp, Cannabis sativa
  modified_base (3198)..(3211): a, c, t, g, unknown or other
  modified_base (3371)..(3372): a, c, t, g, unknown or other
tcagccttgtatgcggatgttattagcccatcccagattagggatggtttcttcatgcttcttgaatctgttgacgatcttgtagtggacatactggatgcagttgacattcttgctttgtttcttgctcgtgcggtggttgatgatattctacctccagctttcctcacaagagcaaagaaagcacttgtagaatcttccaagggatttcaggttattcagactgctgagaagagctatctttcagctccacaccatgcagaactcgtagagaggaagtggggtggtagcactcacattactgttgaggaggtgaagaaaaagattgctgatttgttaaaggaatatgtggaaagtaaggatgctttcgaggcctgtaggtgcataagggagttgggagtgtccttcttccatcatgaggttgtgaagcgggcgttggttctagctatggagaatcaaaccgcagaaccattaatattcaagctattaaaggaaacagctgatgaaggtctgattagttccagtcaaatggcaaaaggattttctcggttggcagagagccttgatgatctagcacttgatattccatcggcaaaaaccttgtaccaatcactacttcccaaggcaataactgaaggatggcttgatgctacatttgttacgtccatgggtgaagatggagaggtacaaaaggataatgaaaatgttaggcggtataaggaagaggctgtgaccataattcgtgaatattttctctcagatgacattcctgaactcattcgaagccttgaagaccttggtgcaccagagtacaatccaatattcttgaagaagcttatcacacttgcattggaccggaagaaccgtgaaaaggaaatggcatctgttctgctttctgctcttcacattgagatcttttcaactgaagacattgtcaatggttttgtcatgctcttggaatctgctgaagatacggccttggacattctggatgcttcaaacgagcttgctctgtttctcgccagagcagtgatcgatgacgtcttagctcccctaaatcttgaagaaatttcaagcaagttaccatctgactgcagtgggacggagactgtgagagtggctcgaaccttggttggtgcccgtcatgctggggaaaggcttctcaggtgctggggaggtggcactgggtgggctgtggaggatgccaaggacaagattatgaaactcttggaggaatacgaaagcgggggtgtagtgaacgaagcttgccagtgtattcgtgatctagggatgcccttcttcaaccatgaggtagtgaagaagacgctgatcatggccatggagaagaagaatgacagtatgctaaatctcctccaggaatgcttcggcgaaggcctaattacaatcaaccagatgaccaagggctacacccgaatcaaggacagtctcgacgatctagctcttgacattcctaacgccagggagaagttcactttctatgtggaacaagctcagaagaatggttggctcttgccgtcgttcgagtccttgacccccttagacgtttcactgactcaggctgcagcttcttgaggagaacacacatattttcgattgtttctctcatctgcgttgttgcccataacctatattgtactgtgttttctctctctttttttttttccctttcaaatgctgttgttgcacactcttttttagaggtggatataggtatggggatgtaatgggctcttggtttttttcttttttaaaaaatcttcaagtggatcggtcatcttatggagattcgttaaatcacctcaaccaatgtataaagttggttttttttacttcgttgatttgctttgtagactccaaattgttgcatcatcctcattatgctctttttagtgctgataatattccatgcaatgaatagatagatgttttttttttcttgctatatttggaaagtctccgttatgcatgaatacattacttgttttattattgctttaagagcttttttgtctgactttattcgggggaatctgattcttttaagtgtcaacttgctacttttctccaaattatttgctttttttttaaaaaaaaattatttaaaaataacgtcactgacattaaaaaaagttagatcgattagtcgttagaaatcaaggttatagtgaaaatctcaatattactagtgatatctaagctcaaagtccatttcgcaatgtgtttttctagaggccatttcacaatgttatgagcaacaattttaagactactaccaatatatcttttacggtttttgtactttttatggtttttgtgccatttattatgatttgtccttacttgtttagagtagtttcgtgtgatatggtcaatgccaatgggtaagagaattgattctttttgtgttcatgatttctacttaaacgattttttcacttttaaaagataagtatttcaagtctttaagcccttatatttaatatagattgatttactatcgttattttacattactttttttcattatgtcatgtggtaatagagttttattttttgttattttgtggagggcctacaatcacagagaatttaccaataagttcaattttaaaataatctgtttgatattgattttcagcagttttaaattagggtgctagtttgttgttactagtcaaagggtaatacctttagctagttatagccataaattttgttggttttttagtttttagtaatgttgagccagtgttatgagttgtgtattaaattctaagtttgtatattaattttattttgaagattgtcattataatataactgtattttttggtttggtgttgtgatattttttttagttttgctagctctggtggcaaccatttataatgggaaggtatttttttcaatgtgagggagtgctgtttgaaaacgttatagttttattgtctaattttttagaagcagttttgtcccatgtggctctcgattagaattctatagctcatggtttggcaaaacatgctcttcgattagacggtgagctatcctggtctgaggagattccaccgccgattgtgatttgttattcatgtgtgactctgttcaccacgttaaaaaaaaaaactttgattattttttattctcatattttttagggataattacaccacatannnnnnnnnnnnnnttttttacttttatactgtggagcagaattttttttcaaaaatactgtgtaagttttatactatgtaccgtgttaagtttttactgttgttctagtgttcttttttagttgttccactgttgttttcagttgttctgttttgtgttctactggtgttttnnaaaaacacagtatttttgaaaagatt

SEQ ID NO: 112321 - DNA, 2015 bp, Cannabis sativa
ataaaagtgtatgagaaaatgataataagtttttttgcacatattttgtaattaattaaaataatgtatacaaaattgtaaaatgcccatatatagtaattagtatcacacatttttgtttaataattattatgaaaaaatggtcaacacccgccaaacttaactttgtaaagtgttggatattagtagttttaatttgtacaaattatatatctaatataacatgttttttttagggtatttatggttacccaatagaaatacaagcattatttttcatggcattaagatgtgctcaagttttgcttaagcaagacgatgatcatgtagtagtggggaataaagagtttgtgaaactaataggtgatcgtctccaagcattgagttaccatataaggagttacttttggttggaccttaagcaacttaacgatatatatcgatacaaaacagaggagtactcccacacagctgtaaacaaattcaatgtgatgcccgattctcttcctgactgggtttttgatttcatgcctacacgtggtggttacttcattgggaatgtaagccctgctagaatggattttcgttggttttgtttaggcaattgtgttgctattatttcttctttggctactcttcaccaagcttcagctattatggatcttattgaagcccgttgggaagagttggttggagaaatgccacttaaaatatgttatcctgctattgaaggtcatgaatggcaaatagtaactggttgtgatcctaagaacacaagatggagttatcacaatgccggttcttggccaggtaacattattattattattatgtagtattgtggtttaagaaatttagtaacaataaaaaacaagaaaaaaatagcgagtactcttaatacaatactcaagtaaaactattccattaagtgggtagggtgttgttgtagacgaatattaagtgggaaagtgttaaagcgaatttaaaagggaaaatgaaactttttgtagactagagtttgatcaatgcctcaccaagtttactatcttcatacttttccaaaaacaaacaccccttttagctcgattttacctttactttagaaagagtattcttcctttcagttattgatttatggtgctaaattaatgaagtgataggataatcttattgtcatcaaccattaataataaatgatatataggaagagaaaagagttgatgatcatgcgctccatctgtaattgtgtaaagtcctttttggtaaatttattttgacaaatatttttataattcttgaatttaattgccattaattaagctttttttattatccgtaataacacaataacaataatatactactcttttgagtactgtacacagtgcttatatggctgttaacggccgcgagtataaagaccggtcgtcctcagatagcaaggcgtgcaattgaattagccgaaagccgattgtcgaaggaccagtggccggagtactacgacggtaaggctgggaggtacgtgggaaaacaggctcgtaagttccaaacatggtctattgcaagctatttggtggctaaaatgatgcttgaagacccttctcatttgggaatgatatcactcgaagaagacaagcaaattaaacctggccttaaaagatcagcatcctggacatgttgatacacacatatatatatatacaccctagctttcttgtttaactagtatatgaaaattttatggtgcactgtgtatccaagtacttctttcatcttatttatatttagatgattttagttttaatatttttatatcacagtgtatatcccgtaattatatataacatcgtttaaatttataagaaattttaaataatttaacgcacttaaataaaacttaagagtttattcggaacatcgtattaggtcgtattgtattgtattatattgaattatattttatgtaatatttttatataaaactatatgtggtattaacttttatgtacacctaa

SEQ ID NO: 112322 - DNA, 12714 bp, Cannabis sativa
  modified_base (175)..(176): a, c, t, g, unknown or other
  modified_base (207)..(208): a, c, t, g, unknown or other
  modified_base (12106)..(12121): a, c, t, g, unknown or other
attataatatgcttttataatgcatccctctaaataaaagagtcacgtgagagaaagtttgaattttattttcggtgtgttaaatttttctaaattttttaaaattttgcagaatgacttaaataactttaatgcacacgaccataaaaaaagactaaaaaagtctctcgaatgnntaaaaaagtctctcgaatgctaaaacaggtnngagtatatcagtgcgccacttttaaagaagtgcattgtttttggcgtgttaaatttttctaaatttttcaaaattttgtaaaatttcttaaataattataatatacacgactatataaaaaatagactaaataaatttttcgggtgccgaaacaaataggaatagatttatacatcacttctaaaaatatgtattgtaaaaattttcaaaaaataattcttaattttataaatataataatataaatatatataaatattaattaaattatatataatatatatgcagtgtctacagtgcacgacatatataccgtgcactgtagacaaaacttcaaaatgctgcgtgaaatgcagcttctttggaccaatattcacgacatatatggaaatatactgtttctttgcacatgctctaatacaaaaatttattgcgcttaatagtaatttcacactaatattagttttagtcacaaacttacagctagtattatgactaaatgaaatttaattacaataaaatgtaactaactcaactaaggtttcaataataataatatagacttaagctatgttaggaattcgaatttttcatggagaaaaaaaggtaaggaaaagtaaaagttatgcatttaattggtttttatataatttgtgcaaatataaatatatatatttatatatatattttaaaaaaaagtgatttgggagaaattaaaaaaatatatggtaagttaactgattaccactcttgttatcttagatttttttttccatattttctgaagtgttttttttttttttcaaacataaaatattgatttttttttttgttttgtttttttttttaattttctatttttttttccaacattttccttactttttccttctttactaaaatttaattgacaaacatagccttcatgatagcattttagtgatgataatattaccttttaagcacaaattcatgttgtaactaaaaacaaaatattttaagtaggtaattttataatatacacctctaaaaaggttgttaggtacgcctcatatatttgtttgagtattcaaaagtgattttttatatattttttttcttcatgattgtgtacattgtagctctttacgactagttgcaactattcaaaaaaattctaatagtttacagtgtaaaaataaagtataaatattttgttgcacgagtgactgttattttttttatacatactttgaactttatttttgacactataaactatttgaagtttttgaaagtttgtaagtggtcctaaataaatacaatacatacaagatcacgaaaagaaaaaagatagattaaaaatctcttttcaatgccaaaacagataatatttgtatcagaacaactctcttaagggtgtactttagattttcaaaatatattttgtagtgtaaatatgtcacgaaattcgtaccctctagaattactaattaatatatacatatatatgagcattgttaaaaagtattagtggtgcttagttagtaccacctagaggtatgtaacatcttgtgattggttagtggtattccataaaagttattactataaattatatgagaactaataccatttttttttttgaagaaaagtcatcaactttattaattgcaatcattcatgattacatgaagcaactcagtagacacattattgcttgaaaaagtactatcagcaatataataggaagctcgagcaaacgagtgagcgacactattagcagaccgtttaacaaaattaacagaaacaccacacaattattttagaaactctttacaatccgatataatactcccaaaataagaaagtaagggaagattactccgaattgcttggacaacagttagacaatcggtttcaacaattgttccaatccagcccttctttttgatccagctgagggcctctcgaactcccatggcctctgccagttcaggctgcactatccctgcacgacagcttgttaaagcttccagcatctcccctgctgcatttcttgccacacacacgaagctgtaaacaccattgctgtcaaaaattgcagcgtctgtgttaattttaatggtgggagcagtcggcttttgccatttatccaagccatctgcctcagtaaaaaagccgggggtaggaactaaagccttatcctgtgcttgagaccaattagcaagagttgtttgtgcaagaaaagttacattagcagctgtagaactcttatcagaccaaaccaaatcatttctagttttccataaggcccaacaagtcacgacaatgctcaatctagtggcctcctccactctgttgaacaatttttccaaccaaccagcaaaagaaacaacaccttgaacattccaatcaatacttgcatgctcctagcagctttgagcaaacacacagtcaaccaagcaatgaaagggagattcaggtgctgcaacacacctaggacagaggttgtcaacttgcacatgtctagattgcaatctagttttagtcgggagacattctgaagccgcacgccataaaagatctttgaccttgggaggaacacgaagtttccaaataccattccaaactggagagctattcggttgagaactcgtctctttacgaacttgaagggacttgtacgttgattttactgtgaaatgcccagttttttccaaacaccaataccaagtgtcatctattcgacttgaagataaaggaatactaagtattaaaatagcatcccggttattaaacagatcaagaaccaagtcaacatcccatgaacattccccagaaaccatcaacgaattaacacattgacccaacaaggccgggtgagtagaggttacttttggattatcatcatccggcagccaagcatcaagaagaacactcaccgaagacccattaccaattcgacgtctaaccccttctcaaaccacatcttgagcttcaagaatactacgccagacaaaacttgggttacctcctagttcagccgagagaaagtcactagacttgtagtaacgggctttgaaaattctgcccaccaaagaatgtggctgacacaagagacgccacccttgtttgctcagcaaactgatattaaaatcacgaaggttacgaaagcccattcctcctttggacttatgctcagttaatctatcccaactcttccaatggattcctttgttatttttggtggaggcttgccaccaaaatttacacattaattgctccatctcttgacaagtttcaattggtaataagaagacattcatggcataacttgggagagattgtgccacggttttgataagcaattctttacccgccttagacagaaatcttccctcccaactctggattttcttcctcatcttgttttcaagaacccaagcaaagctttcttgtttcgccccaaagtattaggaagacccaaataagaactattttctccagcctcattaatccccataatggtacaaattctgtgtttatctcctggagttgtattcggactgaagaacaaagaagacttctgaagattcacttgttggcccgaagccatttggaaaaaatccaataattccatcatactcaaagcaccttcctcagaagcctgacaatagatataactatcatccgtgaaaagcatgtgggaaaccataggagctcccctaaaaactttgcaaccatgaagtctacctctcttctcaaagtctcgtaacagagcagaaaatccttcagtgcaaagaataaaaagataaagtgatagagggtcaccttgtcttaatcctctactaggaataatcggccccacttcttgtccccctgccacaaagttatagctaactgtgccaacacatttcataatcaaatgaatcacctgctcctggaaccccaattttctcaacacggcttctaaaaatctccattccactctgtcatacgctttgatcatatccagtttaatagccatgaagcccttttttcctttttgcttccgtttaagatagtgcattatctcatacgaaaccaaaatattatccgtaattagacgccccggtagaaaagcactttgtgtctctgaaataacttttgaaagaacccctttgagtctattcgccaacactttggaaacaatcttgtagataacattacatcaagcaatcggccgcaaatcattcatacttactggttgagattttttcggtataagcactatgttggtctcggctagatactcagggaactcaccagaagtgaacaaacgctggaccatatcaactatatccttttccacaatgtcccagtgtttttggtaaaaatcgggattaaaaccatccggaccgggggacttgtcggggtgcatctgaaagagagccttacgaacctcagtatcctcaacttgaagaagtaactcttgattttgatcagcagtaactttgactgggatacagtcaataacccactgcccattcgaacccgaagcagtgaaaagatcagtaaagtgagttaccataacctcccgaaggccactatcccaatcgacccacactccattgctattcttaagtttaacaatctggttgtttcgccgtcgattactagcacaagcatgaaaatacttggtattttggtctccgacttgtaaccacaattgcttcgaccgttgtctccaaaaaatctctttcttcgttaaagcctcacaaagctgagattgagtctccttgtatttcgagacagccagttggtcactcctacctttcaacttcttcaaaatcttgttgcaaactttatttctttattaaaagagccagtgatatcactaccccattcggccaaagacacactgcaggagtgaagctttacgttgagagaactattaggaatactatcccaattggcttgaacaatttgtctacacataggctcccgagaccacgcattttcatactgaaacttcttcttgaaaacaatgggtttatacattgcaagattaacccaaattaggcaatgatcagacactgtaatttctagattttccagagaggccaaagggaataacaattgccaatcatgattaattaatgccctatcaagtctgacttcaacccattgagaagtgcccctccctttttcccaagtaaaaggatacccccttaactccatgtcaataagatggcattcagaaaccacatcttggaacccatttagaagccaattcgggtaggctctaccccctcttttatcactatgactcaaagtattattcatatccccaaacaaacaccaaggcaaagaatagtgacatgaaagttggtgaattaatcgccaagtattgcctcttaaacttcgctggggctctccataaatcccagtcgcacgaaacaacgggcacccttcaattcgaacctccaagtcaatatggttgttgctgaaaccaaggagctgaccttcttcttctttcttccatagcattgctaagcccccactatgacccctagcctaaccaacataactcccttcaaagcccaacaatctcttgacataactaatcttgtcatttttgcaaatagtttcacacaaaaaaatcacattgggtttcttttggaaaacgatttcctcaaggaattgaatagccctcgggttcccaagccctcgacaattccatcttagtaaactcataatggtaggcgggccccaatttgagaacccgccaaaaggtcgttttttggaaaaatgccattattggtaattgaactttcctccaaggcctccttacctggcccattgttttccatttggtcaatacctttcccactaccctcttttacaagaatatcattttttcttacatccccacttagaaatgggcctctgaatccttcctcactaactcgaattgggcccccatcttcaccatttaaataattcaatcccctcccttcatttacgcgcctcctctttaaatcagcaataagaagaccatcttgttgaatatctacattatttccctcctccaaatcaacatttatgataccatgattttctccatgattattgctcccagccgatttcaaaccaaccccccttaaaatcccagaattatctccattaaccacgccctctaccattattgcgtccccagaatcacagtcaggatcgaccacccctgtcctctgatttcctgatgaaatttggccggcaccagcctccacagtttgtcccatgttgtcccttaaccaccgagctctgatctgtcgagattgtcgtctatcaggcgctttcatgaatagaccataaggttttgcaatagctccgatctggcgagattggttagtggtattccataaaagttattactataaattatatgagacctaatacttaattgtaccaatagtgatatatcatgttggagagtgctagacactattagtgtcttttagcatttcttaatatatataggctatttaggatttttaccctgaactatgatttatgtatcattgtgccccttaaacttttcaaccctctaaaaatagtgcctaaactattcacaatattgtaaattagtcattctatcaagttttgtcacacgtaaaaaataaaataatgatatgactgcttagccagttgccatgctagtgccatgtcaacgccacatatgtaattaatttgaaaaagataatttaatttttttaatttagttttatgtaattttcttaatcattaattaatttagtttaatatttttcaaaaatatatcattttattttttaattttaaacatggtgctgacgtattattttatttaccacatttgacaaaacttcatagaaggattaatttatgacactatgaatagttcaaggaccatttgtaacgggctaaaaagttaagagagcacaataatgcataggtcatcgttcgggtgatgaaaattctaaatagccacatatatatgtgcgtagatattatatataaaatatttattcacttttaggcaagtaaggcttgcagcttctcactagaccaggctctttagttttcagatattcaaagctagatactttccaaacaataatttttgaatgctcaacttggttctaatcccaattttatttggaaaagtatttgggagtcccaatatttagtgcgaaaaggaattaaatggtgtgttagtgatggctatggcatttcagtggttggtaaccatggctttccgatgaagagaatcctttgattatttctaatcatccaagtctttctaatgccttggtttgttatttaatgaatttaagggaaaatagttgggatgaggacattttaaatgacctaattttagagcgagatcaaagtttgataagaagtatccctttacaaatttctttgactagggatcactatgtttggtcaaacgaaaactcgtttatatactcagttatgagtgcttatgcattgctatagaaatgtactgggcaatagttattcttctttttggcatactctatggagtttaaaactaccatcaaagatcataaatttgctttggcgtgcttgaacaacatttttaccaacagagttacaatgacaaatcaccaagcatgttgatgttagttgtacttgcccattatgttgtgaggaagataaatccattctacacatcttggtcgcttgctgtgtgattaaaaagtattaggatcttgttgaaattggtattgcagtatcgtcgggtagtacttcttccaccggtgcgctgtcgtgttcagcagagggactattggtctaaattgtaaggtggcagcaatgtgttgggaaatttagggagcaagacatgacttggtatggaaatggaaagcggtgaaggatgaggatattactgtattttcaaactactatcttgatcaatggacacgtgctcaaaattccaaaagggattcgtcatggtccatctttcagacggatgatgttgatgagcattggcctttgcctcaagaaaattaaatcaaaatcaatattgctgtaactttgtttgataatggtatgagttatggtttaggtcttgtttcacgtaatgcctcaggtctactcatagaaggttgtactaagctctctcttggtttagtggaaccagttttagcaaaagttattggagtctgggagactgtttgttggataaaagatcaaaaccggtaccatgtgtatgtcgcaactaattatctgtgtggtgcaagcttttcaaagttcattgaatatgattttcctatttagacttgtcattaagaattttaagaatttacttttagatttatataatgtttatattttttttttgttaaaaaatcaactaatgtagtggcccataccttcactaacgctattattttatatcttgattctcgtttcaatttggagtttgttccaagtgatttgttaccttgtttagtagcagaagttggtggttaaataaatattaagttttcattaaaaaatacatataaaatatttattgggaattatattaatgtttctctaaacattaaatcttcgataacttcaatttatttaaagagaaataaataaaaattgttcgtacttgcatataacattcttatttattctattttgtaattttttttaaaagaaatcatttttatattataataatggcattttttttatttacttctgtaagtaccatatttcttgtgtggaaaattatgtgctagtattatttattgacttgtcagatgaatcaaggatttatagatttatttcattactttgcctgatcaacatttggggattaaaaatatatctgcgagtttttataagttggaattcattttattttggttgttagggagtcggtctatatatatttgattctaataattttttaactaactctcatctttgatagaatcttctagtggattcttaatctgttagggaaaattctccttctactttcttttttgaaggtttttcatggggattacagcttcagggatgaagatacattaaggtctggttagtctgaagagattttagattcaatgctgaatgtatttcggcaagagtgaagcaaggggatcttgactttatacatctaaggggactcaaattaagatcttaattttgtgatctagatcttacggtaaattttttgtaagaatcattgtttgtatgctttaagttccgatgagtttagaactggtttttgtaacttgaatttgattcttagtgaaggttacttacattggttctgtagaacccaaacactagttgactatagatcttaaaagaaaatttctaaatgagtctcatacgactccttactcagttcacccaggaacaacgaagatgtcccaagatcttaaggctatattttggtagcttggaatgagaaatgatatagctaaatatgtttcgaagtgtttaatttgtcagcaagtgaatgttgaacaccaaaggcctgcaggtttgctgcagccactgaatcttccagaatggaaatgggaaaatattgtcatggacttcgtggttggattacctagaactacgggacagtacgactctgtgtgggtcataattgatagatttacaaagtcagcgcactttttacctgttcggacaaatttctccattgatcagtatgcagaactatatgttagagaaatagtttgatttcacggtgtcccaaagtccattattttttatagggatccgaagttcacatcgagattctgggatagtctacattgaagtatgggtactgaattgaaatttagcatgacaatccatcttcagatggatggacaattcgaaaggaccattcaaattttagaggacatctacgggtatgtgtgcttgactttgaaggatcatgtgtaaagtaccttcccctgatcgagttctcctacaacaacaactatcaggtaacaatcgggatgactccctatgaactattatatggaaggaagtgctgatcacctattcactgggatgaagtaggtgagagaaagttcttaggccccgaagctgttcagagaaaaagtgaggcagttgataaaatcagagcgcaaatgctcacagctcagagcagacagaagagttctacagatccaaagcgccgggatattaatttttagattggagacatggtatttcttcgagtatcgcttatgaaaggcattaaatgctttggtaagaaaagaaaacttagcccgaggtttattggacctctcgagatcctcgagaggatagggaaaatagcgtacaggttggctatgcccccagtgctggcagctgtacatgatatgttccatgtatcgatgcttcacaaatatgtctcagacccgacgtcccatattctgagttatgaagcattggaacttcagccagatctttcatatgaggaacaaccagtgcaagtgctagacagaagagaaaaagtcttgagaaacaggaaaattatactgatcaaagtattatgaaagaaaaataaagtagaagaggcaacctgggaactcgagacggatatgcagcagaaatattcagagttgttcaggtaaatttcgggattttctataaggagaggatacttgtaataccctaagattaaagaatcggattagcaaaccctaactagttaaatgtgtaataatgtggaattatattattatataatttaatatgtgaaactgtactaataaattgcattttgagacctcgttggtgtactgggggtatttttgtaattttgacccaagaagggtaaaattataatttttatgatacatcgtgcttgtgggctatatcattatatagtatgtttattctgtctatctgcaggtattttctgacaagtcggcgcgatataatcataatcaggtatttttggtcgaactgagttcagggcccaaaatacattttcaagatttatttatggaattatcttgataaatggaaaatctgaattattttattatttatgtgtgattgagatgacaattctagccttgagtatatatatgattatatttgtctatgggggtattttggtgatttaaccacttatgcattattcaacaaataatattgaggaaattagaaaagtcattttctgaatttgctaagccctagttatcctctctctcccttattctcatcttctttacaaagttaattaattttggaatcaaagcttgaattggaggtgaatttgggtgattgttgtacttacagcttgagaattgtggtaaagctctctaattcctcattgataatgttaaattatgttattgaatgctctttgaatttattcttgatgttcttataaattattgatgcatgttgaagacttgaagtgatatcttgatgagtttagtgtgtttgaatcattggaagtatgagaattgcatctagtatgttttgggggattttagggctgagtagtagggtttaatttctgggttttgactctaattttctgggcaaatattattagtttgaatattttgaagattggagtttaagcttgattataaagaagttatgtggaacgtccaatttgtgtatcattagtgttgttttgagcttggtttgatgctcaaaattattaccaaatttagtttggtttgttttgatttaaaatttgagtttatggatggttttgtttgagttttgggtatattttggttgaggttcaaaaatatagaaaagttggtatttttagactttaaaatctgctttttgggtttttttgatcccagtggccgcggccggattttcggtcgccgctgccaaaacctagcagagagccatcccattttcctgattttgttttggccataactnnnnnnnnnnnnnnnngttttggacgttctttatatcattagaaagctagttttgagctctttatgttaatctataaatgaaattctaattttgtgattattgaaagtgaattttgggattaaccttaattgtaaaattttggaaatgtgtgactaggactattgacgcttgctcagaaacacacagggatttggaatctccatatacttgggataccaagtaagatagtagttagcacgtagagttaagcgtggtggcgctcatgtttgatattatgattgtgattaaatgagaaccatgattagggttattaccctaaaaacaacggttatatggcctggggttattaccctagtgattaaatgattttgaatgttatgtcatgctatatatgttgaaataaagaattatgtgttcaaggcataattaagttacactcgattaaattagtacccttataagggcccgtttggtacgcatgactcgattggattagacaagataatttgtccaatccagtgtttgggcatagcagaagtttggataactaatccagctaatctcctctgtttgggattatttatcccatccagcagggtgggataaat

SEQ ID NO: 112323 - DNA, 8618 bp, Cannabis sativa
tttcaattgcttatatgctttcttaattctgatcttttgatattaatattattaggttagattagattaaatctaattgttgggatttgagtgcataatcatgacgggtgcatatactgttattggtatgttttcttttgataattagttgatatattatattttggagaaaaagaaaatactatttttaggatttgggtggataatgctgacaattgcatatctaatttttttttattataattttggattttgagttgggtatattggtaaagtgtctttcaagttgttggtagtaatgaagaaaagcatcacttataatgcggacattctctcctgtggtagtggtactaaagaaaaatatatatatatatatatatataaatatttttagatggcaaaacgtgtcatcgtattgtgttcgtattatattttatgtgatctgtttttatatttcgtatcaagcgtgtcgatctattttttgactcgtgtctaattatttcaatcttaacccaacccgtaaaaaatcgtatcgtattcatgtcgacccactgtgacccgttttgctattattgaagctggaattttaaagaaaaataatagatttaagttccataacttatatatatttatatatatatatagtttgttatatatataataaaaattaaaaaaaaattaaaatatttataatttcatgaaaattaaatttaattttttttaacttaatgaatcactaaatatatatttttatataattatattattattatatttaaaaaaaatcgtattaaacgcgttatatttgtgttaagcgagtcgtgtcgtgtttgatctgttttcatttcgtgttaagtcgtgtcgaccagttttcgactcacgtttaattttttcgaccctaacccataaaattcgtatcgtgttcgtgtgcgtatcaaaacccttttctccacccttaattgctattctagtaacttttctaccttcttttctacgagagattagactaataacaagaaaaaaacaaatatttattaaaataattagtcaagcagcaaattaagaagaatataagtacgaccaaccaagagacctcttttttattttatgttttctcatatgacccattcagcccaggcttggtatgaactttgagaatattcgtcgtgacacgtgaatgtggagccaaaattgagcctttgagacaatatataatataatggcctcaattattgttagattatgagtttacaaaatagaaaaataaattagtatccaggggtattgacaagtaaaataatgcatttggtgaaaaaaagaaaagaaaaagattagtaaaatgatgattttaaaagtttgaagctttcgaattttccaaaaatgaatttattatattagattagatatattctgttgatgtgctaacaatacaatattgaagctataccaaactttataataacaataattaatcaaaggaaaaatgattggtttagttcgacttttggtttaattgaacgaagcgatcccattttacatcgtcatcatatcaaccagctatatttgttgtttttggaagatcattcatgaacaagctttatgtgtaaaagataggaaatagtttatagtagtaattaatgaaaaaaaaaactacagtacataatgatttgtttactactggatcatagtatttaattggtaggaaaaaaaaatgagaaagggaataagaataaaaataataataggattaaatttaaaatatataaaaaaatggataaaaaattattaattttgtttttcatcttttattggaatggacattttttcaattttaaaataaaataatcattctaccaaaataatggaaaaatcattccattagaatgacattccgatactttaaaatacaaccaaataaaagaatggaattaaagttgttttctttcaattccattctattttattatcttcaaccaaacaccacctaagtgttattagatgaatttttcatactatcacttaactgttagtatattatgttagttaatacgtagttagttactgaagttagttaagttcgtttctttattttactactatgtaattgtaagtttggtttggacttcataaataaagatgctctcactaattgtgacttatctttttcaataattttctttgtcttttctatcaaattgcgctatatgcaccactttcgttccttatatggtatcagaagtccctaactcacgtctatgctgtcttcaaccttagatcctggtactaccactgcacccatggctattgccacatcaaaccctgctccaaacccaactccatggaaccccttctctcattccctcacgtcatctctaacactcaaattagatcggctcaatttcctttcttggaaatcacaagtggtgcctacgatcattagtaatgacctagatgagattctattcactggcatttccccttgtaagctcatggttgctggtgctcccaatccagagtatcgtcaatggcatcacaaagaccagcttttgctctcttggctctgatcgtctatgacagagagtcttcttgctttcgttgccaactacaccacctctttcactatgtggcgtgctcttgagcaaaagttttcctcacaaaccaaggctcgcagtctgcagttgaagggtcgattctcccttgttcaaaatgcaaatctcaccatatttgagtatgttgataaggtccagacgatctttgatgctcttgcagctgcagggtctctaggtagcgatcaagatcttgttctgcaactccttaatggtctttgtcttgactttgacttcgttgtctttggaatcacttcaagaagtgatacattatcaatcaaagaagttcagacattgcttctttctcataaaagtcgtctcaaacatcacaacgccgtgaatgatctgaatgtcaagcttcaagccaatcttgctgtaacgtcctattctatagggataccacgtgtgtgattttatgaactagtttaatactgatagattaattaatctaacgtgttccggggatggctgttaaacttgatatggccaaagcttttgacagagtggagtggattttcctaagcaagattatgcaaaagtttggctttccaatcaagttttcttccctaattatgaaatgtctgactactgctactttcaagtttaacataaatggtcatgcccttggacatgttgttccttcgagggggcttagacaagaggatcccctttcaccctaccttttcctactctgttttgagggtctctcttccattttaaagcattctgagctcactgaaaatgcttttggtcttaaaattgctcggactgccccaaaaatttctcatctcctctttgctgatgacggtatcctgttctgtcgtttgaatatctaagtttgcaatgctattaaagaggctctgatcacgtatgagaacatcttaggaaaattggttaatttttagaagtcctccatctttttttcccccaataccagcctaagataccagactctcatccagaactactagtagattccttctactaatcaccttgataaatatcttggattatctcaatgttttggtagatccaagaatcactctttcaaccctttcaaggataaaatatggtcttacctttccaaatggtaaggtaaactcctttctaagggtcggaaagaagttcttctcaaagttgttattcaagccatccctacctatgctatgtcagtttttaaactcctggactccttgtgtagatttgttaagagggagatggctgatttctggtggggagctaaggatggagaacgcaaacttcattggaaaaagtggcgatccctatgtaattctaagagttcagggggtctaggctttagatcccttaaacctttcaaccaagttatgcttgccaaacaagcatggagaatccaaacaaaccaattctctctccttgccaccctttttaagtcaaaatacttcccctggtccacctttttgaatgcctctgggtcacttcccctcctatgtttggcaaagcttgcaccgggggaaatctctcctcaaggccgacctctgtaggagaatcggtaatggtgccaccactcgcatccttgaggatcactggattcctaattgtcgttttctccccatttcccttcctaatcaccttacctacgtctctaactcgctcctccctaacggggattggaacatcccccttcttcaaagacacttcccaaatgacattgtccatgagattctatctcttcctccccttgacagtaaccttagtgattcttttttctggaaacatacttactctggccactactctgtcaaaactggataccatattgccaagactatcgcccaccttgtccaaccttcttcttctagcactgacacccttaagtcttggtggaagtccctttgggctctttgtattttcccaaagataaaatattttatttatcgtctttgtcataacaccattctcactgttgaaaatcttttccatagaaaatgtctcaattcccctatttgtccccgtttgtcacattcatcctgagtgtgtacatcatgctctgtttgattgcaagggtattaagagggtgtggtcaggtacatctttcaaacatgatatgaatagtttcaaaggaatacatattctttatacgcttttatatattcagtcacacttttcaactgatacttttaatcttttcgtatgcattcttcggaagtgttggaatagcaggaactcatttgttttcgggaatcagcaagagcaaccagtgagaatccatcaagaggtagaagaatatttgacattctaccaacaatcccaataatactagaagactcatcccccaattcatagccaagatagacaatcacaatggtccccccagcccctgacaagttgaagctcaatgttgatggtgcaatttcggggaaaaaagggaaaacaagtatgggagctttggtacgaaactcctcggggcaagttgttgctgccatggctatgagccgtcagggacatatgccaccaaaaacagctgaaggatgggcttcgcaagaagctttacgttggtgcagagaaaaacacattgatattcaccaagtgaaagtagactgcctaaatcttattacagatatccaagctcatgacagtattttatctagttttggagcaatcgtcagctctgttcgagaagtgttatcttcttttcctactgtctccttccagcatatctataggcaagggaatacatgcgacataatttagtacaaatggctgttaggctagataacacttgatattggaatgtcaatgatccctgctttcgatgtaaccttttagggtcgttccatctaaaaaaaattgtgaaaacacatgtaataaaataatgatagcagtagagcaaagaagaaaatagtaaagtagatgaggtggataaaataataaatacattttgcatattacacgtgggctgatttttagccgactgttgctgcagtaaggagaaccgcacgtggtgttaacatacagccgaaaccgtacggtattacacagtaaagctgagaagagaagagaagagagagaacaaaatatctacacgagctacaacaactaaacgttcatagctttaataataataataataaagtccttaatttcacatgtaagtattttcaacaaaatgaaaagtctttacctctaaataaaattatattaaataaaaatggcagtagtcttttctcgtgtcccctgctctctctcttctcgatggtccactctctcagttgaagatcgtgagtcatgacactttggtgaacacaaagaaaaaactctctccaccaaaccaaaaacaagggccgaaaaactctctcctttggtaagcttccatttccatttttttctgcttctgtttgtatctggtggtaaatttgttgttttaactttgattactcttacgtgtcgctttttcgcgttctctctctctctctctcgttgaagaatttttggattttatagctttacttgtctcaatttttatacttaatggaatgcatgtaagccagaatagcttggtatggtatttcttaatatacattttcagggtttggttttgtttgccccaaataatatgaaaaatctaaaaagaaaattgcaaactccttaaaataggcagacaaaggatcagttttttctgtctcatgggacctaaatttaagctataattgttatttaatttggtctctttttctgtcccactgaataattcaatagagtatgtgtttactatctgatcttagtttttccttccctcttctgtttttacccaggccattttaatgtggttactgggtttgccatgttttttgtattattgttaaaaaaagacaatatgttgatctatctccttggtgggtaggttggtacataattttgaatctttgactagtattacaaccttaattaggctagtcatattattaaccctgcatcaggatatgtttgacccagagctacccaccttttgaatgttttgaagccattttttaacatgccattcatttaatgtatgtaactgatgttttatagacttagtccatatgtcagttatcaattaactattctttcgttatgatgaccattgtaaattgaagttgagttgttctatggccagatttcagtatgactagcatttttcgtagacggaataatacccatcaagatcaggagaatgatccatcacagcgcgaaataaaggtatcagtgatcagtttcttatgtttaactgattgcccccatcaccatttacacggaaattaataagcatcaaatgaatcttcagagttcagaaactatcttataactctcagatattttttgttacttactactagtctgttaaaaatgtcagcttaatgagctcaagactgcaattggcccacttagtggacgcagtttacaatactgtactgatccatgctttaagaggtacttggaagctcggaattggaatgtagacaaatcaaagaaaatgctggaagagtcacttaaatggagatcagtttttaagcctgaagacatccgttgggtaggctttgtttttctctcttttatgaataacaaaactgtattcactttcatttctgaaagttcatataattttttatgggttatgctgtcaggaggatatagcagttgaaggcgagactggaaaaatctaccgagcaaattttcatgatcgacaaggaaggagtgttctaatattaagaccagcaaagcaggtaagtacccacctggagatctcgcgcattgcaactttgttaattaagcttctgtaatagttgaagactaatggtgtcaagaaatattgcagaacactgcttcactagacaatcagatgcgacatctagtgtatctcatagagaatgctatcctgaaccttccagagggtgaagaacagatggcatggttgatagacttcactggctggacattgagtacaagtgtgccgatcaaatcagctcgcgaaactgtaaatattttacagaaccactatcccgagaggctagctgtggcttttctgtacaaccccccacggatttttgaagcattctggaaggttttatttcaaactctttactatatgaaatttttttgtggttttattgtgtgtgtgtgtgtgtgcttgtttattcctctcttaggtttttcttggacattccgaaatatagtactctattgatatactcatctgataatagaagtagttcaactatgcttaactgttttttttctttccaaatactagtaactgttaatagttttttaaagggcattctttgcttatttactattgatgtagatcgtcaagtatttcttggacgccaagaccttccacaaggtcaagtttgtttacccgaagaacaaagatagcgtggagcttatgaagcagtattttgacgaggagaatcttccgacggactttggtggaaaagccgttttgaattatgactacgaagagttctcaagattaatggctcaagatgatgccaagtatgttgctttacatggttccaaggagaagctcagccaggccaccaatgggctctctggggctgaagtggctcctgaaccagccagttgagtcggtctgtaattttgaccacgatgaggctccctccctaaaactcatggtttggttgagttgatggccttaataacaatcagctcaatgaaaccataaatatattgtaatgataatttaaattgaagcttagctgttggtatgtaagcgagatcaggcttggattttaaggacgttgaaacatgtatactctgcaaacctttcaactctattgtatattgcttctctttttctcagttgtagaaaacgggaaggtggtaacatattttatatacatttctaagtttagtattacgattgagatatgaaaatcaaacacaacagctccatattttggccgaccatctaaatcagttgctgattttgtgtttagcttaggtgccgtttggtaacacttttttaat

SEQ ID NO: 112324 - DNA, 4257 bp, Cannabis sativa
gagagagagagagagagataactaggtttgtagctgagctaaattgttcaaataagagtatattctttgaactagagtattggagggacctgtctctcaaacataatcttgatgtaatgcatattgagaaaaatatgtgcgacagtgtacttggaactcttttaagtattgaggacaagtctaaggataccaacaaagcaagagtacttaatttgcaatacctcaaaatacgttgtgaaatgtggttgtatgaagatagcaatgagaattggaagaaactgcttgctagttacacgtttagtcttcctaaacgacatgaattttgtagatttatcaggtctgtgcagttcccaaatggattttctttaaatttagagaagaatgtgaatgagaatgaagataaaatttctagcttgaagtctcacgactgccatgtgttagaatgcttgatgccggcgggcattcaaaaaaatttgaagaatgaagtccaagatacaataattaaactgtgtgtaaatattgtgctcaaacacattgaatgttgaagacataaagagcatgccaaaaagtattatggacattctttacaaattaggaaccattctcccactgacattttttgacataatggttcacatggtgatgcatttacataaagaagcgatacttcagggacctgtgcactacaggtggatgtacccaattgaacgaaccatgtccgtgtataaataatatgtaaaaaattgttctcggctggaaggatatatttgtgaagcttttgcggttaacgaggcattaagattttgttccatgtacttttggaaatttcaaactcaatttagtcccatatcgaaatagtgatatcctcccaaataagcctgaaagagcatattgggtgacccattggtaagaggaccatcgtgtctttacctatgcaagaaaagcaggcagagtggtacattctgaacaattatactgaagtggataagtatatcaagtaagatactttttgcattcttttacttttcttcactcacgatcttgtcttacaaaaatatatttatgtgtagtgagcatgtgaacgagctaaaacttaggggtgataaaaatcttcacccagttcaagagaatgagtttccaaattagttcaagtctcgagtaagtattgttttctactaatttttatcattcaaatatggtttcttgtactagtattgattacatttttcattcaatgatagatcaatcaactctgagcaaataattctggaaaagtattagatgagttgtatgtcattacaaatatctctaatccaacatgttattgttatcctgatgtattattaacggtgttaaattcctacttgaggatcaagatggcaatcgtaatacccaaaacagttgtttttaaagtctggataaggtggtaaaattttttatggcgtactcaaacaagtctacgagttgacttacttgaaggattgtagtgttatcatttttaggtgcaagtgatgggacacaaacggtaacatgatataaagtgattactagtgtctgcgtcgcccgtcaatagtaccaaaaccattcatacttctatcctaagaaaatttgatatattacattcccaacgtaaaagaatggagttgattgaaaacttattaatatttaccgtagtgtctggaatttcccagatgaggatgatgatcagaccacaactatacaagaaaaaaactcttcaaaaatctagttggtcgtacaactttcacaattaaacgatgtaaaatatgtctgtgatgatgtcgacccaattgaagtgaccaacatgtaccgtgagcagcctgaccgtcaagatttagatgatttcattatttatagtgataatgaagacagtagtgatattgataatgaaaataatgtaactgttaatgatgatgatgattatgatagcttgtagattttaaagtattgtaatattcaaacccaccgttaatcaaataaaatacatgttccttttgttaataggttgattaattaattatttctagcttgtatgtgtagaatgattaatgcaggtgtaagcaacaataagaaaaaaagagttaggagaaagtataaggggaaaaatattgaagaagaactagccaaacagcctgctggatagaagttgaaatttaaatttcataaggggactagggccccgattgacgactatggcaacaagtttaaaaattatatcaagttggttgttcgcaataccatttctatgaataagttcaattttgaggatgttgacaagccgatcatgcagactatctgggacagactagcggtaacttttaaatttttattgtaatagatcaaacaaaactattctacaaaataattacatatgactataattttactttttttagaccaaatttgagttcccaactgacaatcctatgtttgaggactgcgttcttaaatcaaaataaaaaatgaccacgtgactggagagcagacacgcaaaggcatggaaggaaaattgagaaatatggagaggatgaagcaactaggagatcacgtccagatgtggtcacatcagaggagtgggtagaggttaaatcgcacactggaaagattcaaaacaacatatataaaatgaaagttgtaaaattgaatctccaactgcttttttgttcattttgttcacaataaatttactttaaattacaggtaagagccgaataaaatgcaaaaactgagggcaaatgaagattcaaggtgggtgtgggtctaagaccatatagtcggctacattgtcatcgaggtatgatgttgtctgcagatttgtctaaaaattattattttttgaataatatatttctaattttttatgttgtataaaaataggctcattccgagaaagggaaacttctcagtgctatggacacttttcaaaagtttcactacaagaacaataaatggcgcgatgaacacacacaataactacatgtaagtaattttatatctttaataaacccattctatatttaatttctattcaactctaacaatttgtttaaattttttgtaggccaaaatagttgagatttgtgaaactcaaccagcaccaacccatgtcccccagtagtataatgtcgaccctacccagtttcctgcaaacatgtctgttatgacacatgtgatgggtgagcaatcatgccacttgaggggactaggcttgttgccaaggcttagggcgggggccaagtggtcaactccaagaacaggtctctctggccaacctactgtcacctaagaagaatatgaagccctgaagcaacgggtggaaaagcgtaaaacacagaataagtggcaacaacaaatgacgcagaatcataatcaaatcttgaccacgtttcagcaataagtgatgcatatggctgatgtcattttaagattcaacttggctagctcgatgcctccaattccactgattccaccatttcagcctcctagcataggtcttcttcacagactgtccccccgatgacgacgacgatgttgttgacttgtacttttattttttagcttacagtgtaaataatactaatttttataaagtaataatacttttctttagttttagacaatttatatagttttgtaattataatataaattttggttttataatatatttcgtattatatatatttattattatttttaaaaattggttttatttaatttaattttaattttattatatataaatatagtatataaatatagtttttaaatatagttttttttttttaaaaaaaaacatatatttttccggtgagcaagatgcgccaacaaaacttttacaagtaattaaatcgagattacttacggacatcaaaaaactgtactagcaagcgttaattaaaaatttcataactttgatatgttgctgattgttttatttataactagttattttttatttttcatacaatacaagtcacaacctcatatatgaataattttttttcgatatttatatataaatcgcttcgcaagcgcggctatatatttagcttctgttgaatttgcaatactaattttgtaattaaaaagatcttaaattgttcatatcttttattatttatacatataaattgattaatatcaactattgtgacagtcagtagtcccgtgatctgtaaggggaaatatcaggtaagctgtgcaatcctacaccgcttggggaaggtcaagtgggat

SEQ ID NO: 112325 - DNA, 9267 bp, Cannabis sativa
  modified_base (6207)..(6210): a, c, t, g, unknown or other
gctccaaaagacaccaatagacgagaaaatgcttactttttagacccaaaacataggctaaatataacctaacagaaagcccaaggattttttaatatagaggtggcttacacccaagcctttggagtagctccagcactgtcgaaagcagcaagtgtatcaagatacactggacagttctcgactctattaattacaccttctggaatccaatttaccgaccgtacaatctacagactcgctgcctcaaggtatgcacctacataggctacttttcttgggttcaaagcagcatagaccggatgcagtgttgctcccagacaggcacaagcaagtcaacaaacggatgcttcaaaatcgggaataagcagtcccaaaactaaagaaaaaactcaaagcttgagcgagcctctaaaaaaggaaggatgggatatgaagcccagtacccaaaagatatcaatttgatagattcccatgagaacacgtatcgggaaatttgtaacactgttcactaccagaagccacctccactgtacaagggaggtaagcacaagagaaaatctgaacaagaaatgtcaatatcatggtgatgtggggcacaccaccaaagaatgtgattacttgagggacgagatggataacctgataaaaaaatagatatctccatgagtgtgtgttaatccttattatctttttgggacaaaaggtaggccaaggataggtgataattcttagacaacatggagcgaaaaatcctcctcgagggatagtttaccaataagcttcaagaataaaggcctttcagggggccccaaatgtctaggcacctagaaacatgcaagctcccaaaagtggaaacccataccctccgggtatagctctaccacctgttgacggacatgtagcaaccatttctggaggacctcttattattggtagtacaaggaatgcccataagaggtatctcaatgaacgtgaacaagaaggggagatgtgcaccttagtacaaatgcctacacaaaggttgcgtatgatgagcctacccattactttcacgaaagaggatgctagacatgtacattttccccataacaactcgttggtgattaagactcagattgccaataagagaatgtctcaaattttggtggacaataggagttcaatcaatatcctatttaaagtcgcattccaggggatcgggttacttaaaaaaaccttacaccttgcccaatccaaatttagggctttaatgaagactcactgttgcctatggggaagatgcaactcccagttacattgaatgggggtatagctagaagtaacacttcatacgcattaaaatactagacatttgttgtaatatcccaaaaagtgtgattatatttaattggacatattttattaaatatgtagctatgagaatattagggtaagattataatcttactaaagccaattatgagataattagtgacttttgagaaaatgattaaatgagcgtaatttattaattacatagattttattataacatgtgggtattatatatatcatttgaaaataaaatattttcgagttcgatgagcgtaaaaacttgatggtttggctttgaacaaaatacccctaagtcatcagttgagtgttgaaataaaggtaaaataataattttctaggttttaccttttgttttacttgaaattctagttagtcctagctgaataagatttattttatttgatttaatttattggattagttaattaagagataggatcaaattgtatcacacacaaaatactcacctttttctcactctctctcctttggttcaagaaaaaccagaggaaaacccagcttttcatccctaattttagtccatttcttgctgaaaatcaacactaggagctgtccaaaagcttgaggtaaatttcttcacttgttattaatgatttctagggtttagggttgagaattttaagaattttgcatgattttgggtcaatagattgtgttgagttcagagcatgttcttaggcttaattcaaggttgtttaaagctttaattacatgagataaggggttgttatgctttggttgggtgagttgagttcaagaactgaaaaactcactcaaccatggtgtttttgtaattttaagttaaatgttggtttttagtattgagatatgttgtatatatgatattatattaatctagaaaatttgattaggtttggaagagttttgtgttagttttaacacaaaaatcagggtttgtttgtttctgcagtgggaaacggttaactgtttctacaggtactatgaaaacggttaaccttttgacctagtgggaaaccccattttctgaaaacgatgagttgtttgtggtgttcttgcagtacctaggttttcgtattttattgatatttaagttatttttccaagatattattgataggggtttatctcgttttaagtttaggacctattacgggtttgattaagttatttatcaagttgccattgtcatgacatagggcccgagatcgtcgagcaccattccactcaggtcagcccgcacacctgactttggactaaggtaagaaaagtcgattgtaccgcatagcatgtcaaaagtaagatacggtaattaccgttatttagaaagagttattcctctcatttgaaccgctattaagtttcttacttatcggttgcttcattaggccacgatagtgacattagaaactcattggtaatgagggttaagtatgctttataaagtattaggattagcttgtcttattagacaaatagttgattacaatgtgaatagtttcttaaattatatgtttcaatgcatgttcattgttatttagtactttatgttatacatgatgtttgtgttacctacttttctttttgagtctttgtgactcacgggtgctttgtgacttagttgacaggatccgtcttttgtaatgttttgagtatataataattttttgtaataaactattatggtggtattttagtaaaattttataactaagggaatcccccaatctagtaatatatttaacaaggaatctatgttatactttaattaattttccaaagttctaattaatcaactctttcttaaaacattagtttattattataaactaatttataaagcacacacgtgacgccttacgggttagggcatcacattcgatgtagtggactgccctaccgcctacaacactattttaggacgacctatcctagttgaaatcaaagcgatgacttccatctagcatctgtttatgaagtttctgtgtgacaacagaagtgctggaacggtgaggggtgaccaaaagagtacattcaagtggtatagtgtctccgccaaaaacgttttcatgatgagagaagaaactggagaaaaaaatcttgagatacatgtccatctaatactgggggtagtatgggaaaaagatgagttagatctctcagtgggagtggaaagaatgattgaaccactagaggatgtggaagaattttcatcagcgagacggatcccaccaaagtcatcaatgtgggacggaacctgcctctagtagtcaaagaaaaatagtgacaaaaatcaaagccaacttggtttcctagtgtggagccatgcatatacgacgaggatcagtccccatgtaattttccataacctaaacatagattcgaacgcagatccaatccaatagaagcggagatcgttagatccggtatgttcaaaagccgtgaaggtggaggtagagaagttgacatccatagagttcctcagtgaagctctatacctggtgtggcttgctaactcatttttttgtctgaaagctaaatggaacctggaggatgtgtattgactttgcggacctattcaaagtctatccaaaagattgtttctcgctcccctagatagaccagatggtggatgcgatgcccaaatacaaacttctatgcttcatgtatgcatactttggctataatcagatcaaaatgtatgtagcagaccaagagcacactagttttcaaacagaaaaagtaatatactgctaccttgtgatgcccttcgggctcaagaatggtagagtgacctatcaacgcttagtgaggaagatgtttaaggatgccttgggaaaaaaacatggaattgtatgtcgacgatatactggtgaagtaaaagacttttgggggagcatggaagtgatttagaggagggcttcttgataattgggaaatacgaaatgaaactaaacttgaagaaatataccttttgagtttttagggaaattcttaggtttcatcgtcaatttccacggaatttaagcatatccggagaagatagataatcttctagacatgccttccctaagaaaacataacgacgtccaaattttaaccgaaataattgcagcacttagcaagtttgtgtccaaagaaactgacaaatgcatttcgatttttaacatccttcgtggaagaaaaaaaattgaattaactaatgagtgcgaagaggcttaccagccatgtctggacgacacggttgtatcattcagtgatgttgattctacacaagtccattaccctcacaacaacccactgtttatgaaagtgcaattagcaaacatgcttgtagcatgatccatgatcgatgatggggcctcatagtacagcctcttcaaaaccgctacatagtaattatataattagaggtaattgagggctctaattacgctttttaattcttatagtcctatgagaattgataaaataattagtaattaattataataaaaaaaataataaattttattacttaatatttaaaattaaaaaaacttagtaattatattaacttaacttcttagttacttataattacacaactaatttacaaacagacaaaattgtaaaaaccttcaattacacctaattgtgtaatcaccacttatgtaatgacacatttaaccataagacaatatctttaagaagtttgagtaaaaattatataatatataaattagtaattatcaattttttattaggatgttcatataatttgtaatgtatagtttcaaattccaatcaatttgaaccgaatcagactaaatgaattcgacctcaatgatttggttaatccaaactgtttaaaatattcgatcacaattttaaaatttttgtgaactaaatattaatatttagtaacaattttaagtaaaatattaatattgacttaatattgttatgataataattttttatgtacaacaaacttgttaaaagtaaataaaattattaaaaaataaacaattattgtaaaaaaaaaattaaaagtacaacatacaaaccataattttgaaccaaattaatccatgaattaatttagtttgttttgatatttaatttgataatttagttagtactgttatactggtttggtttgaaaaccaataagtgaacactactttttgttctattttcaaatatgacccagcaactttaatatatcgaaggataataaaagaaagagattttttttatttttaatcttcaaacagtttcttttgtatttttacgaaattctacatagaaatccttattgcaacttgtttaaaatactcgatcacaattttaaaatttttgtgaacgaaatattaatatttagtaataattttaagtaaaatattaatattgacttaatattgttatgataataattttttatgtacaacaaactcgttaaaagtaaataaaattattaaagaataaataattattgtaaaaaaaaattaaaagtacaacatacaaaccataattttgaaccaaattaatccatgaattaatttaatttgttttgatatttaatttgataatttagttggtactgttatactggtttggtttgaaaaccaatacgtgaagaccacttttcgttccattttcaaatatgacccagcaactttaatatatcgaaggaaaataaaagaaagggattttttttatttttacacttcaaaacagtttctttcgtatttttacgaaattctgtatagaaacctctattgcaactagcgctgtaacttaaattgcaacaaaaaatcgtacagaaacccctattgcaactagggctggaaccactttaaaaactcaaaccataaatttgaaaannnnaaaattaaaaaaatagtatatgggataatttccctaattaatgcaattaattacttaattattaaataaatcataagcataactttctcaacacaaaatactcaggcataaaacatgtaaaggaatctataaatatgaaaagaaaaagcaaaagataatacacgaccatgcctgttaagtcttacaagagcaaaatttccatcaatacaaattctactacttgtcaaacacaatcccgcaaaattgaacaaactggcttaaatgttcctaatttaatcgaaaagagaaattttgaatttcattatgctccaacgacctcggtgacctcaccctcgaccactgcttcatcagctggtctgtcaaccttcactccaacatcctctgagtaatcaccatgaacctacaccagaaatttaacaaatcaaaatctaaaccccccaaaaaatgagcatgtcctgtatggtagcaatgaggattaaattagaaggggttaagaatggaatccaatgtatacctccatcagcttgccaagatcgaatttgggagctttaaggatcttcactttgcgaatgaaaacattctggagtgggtagatgctagatgttgccttctcaatctctctaccaatcatttcaggaataaacttgttgaccaaatccttaagatcacaggatgtggcctggttgatcataatttccctcatctttctcctaatctgacaaagaggaatttcaaacagcaaacaaagattgttcatacccatttctaaatgtcatcatagcctactagatgaaagaatggagcttttaaaggttcaatcaattgaatcaaacctgacggatttggctggactgggcatagcaggtcctcttgacctggttggcacgtctctttgtgaaagcaatgcagaacatcctgaggaggtagttgtcagtggtcttgacatccacatgagcctcaattagtgtttgccacttgcgcacaagcgacctcagcttatccgtggtgaagtccattccctgtaagttttgcatgattatagttaaatacataaaacaatgatgaaaaatttatattgtaaacataattttgaaagaaaactaatgagtttcatgaagaactttacccagaagtttgtgagaacattcttcccttgaacatcttcagctctcaaacggattttcctgtaagcatgatcttcatccttttggagatcagccaaggaaacctcaaacactctatgtttaagaccttcagaggcaatctgtgagaacataaaaacacaaattaaatataaatgaagctatacagcatgcactcagtcaattatacaatacaaagaaagattacgcaaatcagcccaattagatatatgaaataacataaatgttgagcttataaaattataacaaaagaaacaaccactaactgatgtaaaataggtttttgttcaaaattttcgtcctaatgcccttaaacaccgaagttatcatcataataatacagatagctctcaccattggtagcgtgcataaatgaaaagatgaaaaaatgacttctttagtctagttaggaatcacattctccaccaaagcatccaataatgtaaaatagagccaaaaaaacagtaaaagaaaaaccctttttctattagtctaaaaactgcaaatccatgagcaactaaattaacccttgaagcgactatcccgaaaataataatatgagcaataataataaaaatcataaaagcttgaaatttcaggagataaaccttggttccctgagttctggtgacaagagttttgccaacttgtctttggttgaagagagaaggagctttgatgtcataccaatccttcttggcaaacggatcggctctgcattatattattgatataaaaacttgttagcacaataatttcttcagacactctcattatcaaaaatctaagtaacagtaccaatcttgtttctcaaacataacttctatgaatttttttagaaaaataaatagattaaaatcaaacagaaaagtgcgaattccacttacgccttcttcttccctcccttcttacccttggaaatcctcttgttcttcctgaaaatcaaatcacatgttaaaaaaagaaagagagagataaacagaaccccaatttcagaagaagattaatctccacaataacatccataaagaatatgttagagagaaagagatgagatgtacccgacggccatggttggagagaatagaagagtggagtagaggtgctagggttttttgagtttgagaagcggaggaagtgactgagtaatatgcatccaattacacaagtagactaatctacacatttacatgcataaacccctagggcaccttcctcgtgtttcttaaatctcttcctgggctttgtatacgggccactactttgtgggctcattctccaaagcccgttaaatttttcttttttccgtttcttttctttctcctacttaaaatcgtattattttttgagataattacatcaaatttttaatttttttacttttatattgtggggtggaatttttttaaaatattatatttttgttcaaaaatactgcgtattatattaagttttcactgttgttctactattatttttagttgttttgttttgtgttccactgttgttttataaaaacataatatttttgaaaagatttctgtatgactttatttttgtaaaagttaaccaaaattttaatattttgtaagttttcttaatttttttataaattacggatttttttaaagtttttacattgtagaatgtattttgacattttattacttttatactgtcacacggcagtttttacttttttactatacactttatatactgtcttttttaaaatagtataaaacttgcgtgtatatactgtacactttatttatcttttttatgtgcttttttaaattaaaaagaattagtaaataaatttgatgtgatgttgcttattatattgttggagatccattcttttaatacaatcaatttaaaaaaaaaaaaaaaa

SEQ ID NO: 112326 - DNA, 9240 bp, Cannabis sativa
  modified_base (124)..(124): a, c, t, g, unknown or other
  modified_base (157)..(159): a, c, t, g, unknown or other
aattggaaaatatggtatttgtgaaataatagataaatggttaagaaaaatggcaaaaatgtaactagtgttgggcccacatatggttggccactataatcctatttttgctattattttatcnttttttattccatataattcaatcctaaccctnnntgaattagtataaaaagaaaagaacggtctcataatccaactaatgactcttaacctagttttcatctcgtcagacagctacagagtttgagacttcttcttttttttttctcttctaattcgaaatcctatagtcttcttcacaaaaaaattcgagccttagtgattgagtgcatacccacccatagcaagttagtcttcaatcatagtgtgtaagactgtaaagaatccaaacaaccaaaggagtgtcggccttatatcttgataatactctacaacagaaaggaataaaggttagagatctgagcggagggagtaatttaattccggtgcaaccaatttaaggtttcttttactttatatgtgtaatgaccgcattttagaatatggattaataaaggcaattagcgttaattatgataattctataaatgtttatgaatttatttaattgtaggtcacatttttagaaatgggcattagagttataatttctcaattccaaagattttattaaactctagatgtattatttgtattatatatgaaatatgcaatttttatgatttttgctcggtgacgacggaaaatgcgatggatggccatttaaatcacatgggtaattctagaacctttttcttagtgggataaatattagaaataaatagaataccatgtttgagcggagttataatttttgaccattttacccctagacttaagttggctttagttttaagctaaaagggtattttagtaattttaagagggggattagatggcctttttttctagagcttgacagctccccactattgctgaattttgagattatgttatgcatttttgaagaaataagaaaattaaaagaaaatcaaaattagagaaaactcatttctctttctctttctttgttcgaccaccacaaaacaaggggggaaaccagcagattccatcttgtatttttggaattcagcaagtaatctaagtgtttccaagtggaggtaagctttaacaccctagttctttagtttcttaacttgaagtttagcttgattatgcaattatgaagtatagaggctgttagggtttgtatgagttggaattcgtcttttatgttcaatttaagttagaaattggttcttgcagctgtttttgatgtttagtgtggtagatgcagaagtttgagttgttcatccatggcatgctttgattttgtgtgtatttctggattctgttgattggaatatgttgtgggaggtcaatataggtgttttggaaaatttggtgagatttggacatgttttggaaaggttttggattgtttgaggaaacctggtgcaaaccggttaaccggattgccaggatttgtaaaatcggttaaccggttgtgaacaggttccccgaaaaattcttttcgttgattcgtgtccattttagagccttggttaggtgattccctatttcttagggtattttagtttcagttatcaatagctgaaccttaaattggaggttcgggttttctagattagggttttggtgtgttatttacccgattatgttatgtaattaggacatccatccagcacgagattttccgttcaggtcggccaactcacttgaattcggaaacgaggtaagaatagcgtagaacatgtgatatgatatatatgcgaatgtatatatgtgtaaaatatattatgcatgcttattatggttagtacactaccaacacttgtacggaaatggtacagagtatattggtataatgtatattgtttaaagagtacattacggtgttaccagcacaagtacgggaaagtacatggtgtatgtggtatatcacttagtggtacttagggtacaaaacaaatcctaccaacactcgtacaatgtcggtacatagtgtatgtggtacagtggctgtaccctagtaactcactctttaaaattaattttctgtatataagcttttcatttctttctttattgttttttcacattatcacatttatataatttttctaattattatttttctataataaaacttttaatttcttcatactaactttctctattaataatataattaatcttttcttttttaaaaaatataatgaatcttttataatgacagtaattaattaaaagataaaaagaatataaaaatctaaccgttagaaatattaattataattaaagttattcgacgctattaattaaataaatacaagtagatagttattgataatcttctaatttcataactatatatataatatatgtatatctattattattgttgtgacacttttaatattctcatatttcatatgtaatttattgaagaaaaaaaatgaaaaaattatcatatacttctcatcaaaagatatattaattattattgttgttattattaatagtattttatttatatatatattcgttaattaagttttttttatttcatattatttattaaataaaataacaatatattaatttgtttttcatttttcaactgaaaatggaaaaaaattaaaatttaaaaactgatttaagtttaaatatttataaaaatttgttaaattttaaattttacttatacacttatataattatataatgatactttcacatattctcatatatattttatataaagtatatgtatctttcttcaaccaaaaaaaagtatacatactgttttttttttctttttagaataaaaaaaatttatttagtgtcattcttaaattttatcattaattatttataaaatgcaaacaaaacaaaaaaattgatagaaaaaaaatgagaaattaactataaaaaatatatttatatatatatatattaaattataaagtagaatttatctaataatataaataattcttaactatataatttataaaaagtaactacaaaaattaattattggctatataaatttaaacataaaattaattattatttaagtatatattttctaattattaatatgggatatttgcgacataaatactttatgttttcgattttatacacttaaatactacatctattttttcgacggattaaataccaaatgttacactttttctacttctgttactactagtatattaagtgctgactggacataatagtgttgacacatgttagcatattattagtccacctcatattaatatttatttaataaatagaaaaataaaaatgacttttttttttaaaaaaaatagattttaaatgaataaataagtaataaagaaaaacaaacaattagatcttggttctccctctcactcccgcttcagctttctcctctccctctttcctccggtgagtctttcttcggcgttaatggtggattgtcgtctgccgagaaccaccacaatgttttctctctgttgtatgcccaaatgagcacttaatggtggtcgttctctcttcgagcgtatgcccatatgaaaagcgtctaattctccttccctctcgtcctcttttccgatcatctatctcatcttctcttgacatttttgtgtgagaaaccaccgtgcatctgtccagatcgttggtagtggaggggttgagtgggttacaagatctgggtttcgatacccaaaaggtggggaagaagagatgaagacggcaatgtgcgcgtagggtcgacataaaaattgggttgagcttgttttgaatgtgaatagggtcaggtcaaatctggatttcttttttgacttttttctagaaaaaattattatagagtttatgagtttgtggttttttgagagtcggtgtgtggttggtggctttggttatggttatttagtcattgtactccacttgatttctcagggtttagacaacaaaaatcatattcgatcttctttttcaattcttctcggaaaaacaaatttattttttttttcatcagacctgagttcattctttatctagttggtatatgatttttgggcctttaaatagtgtttattcatatgtatatgtatacgatttgatttttaatatattattatttgttatttttttttgagaaattattattagttaattatacctttactttacatgttttgttattttgaaaaatcttgattggttagagaattgtattttgataacctgttaaagaatagtttatgcccagatattagtgttttttattttttatttattttctaaaataattttttaatgaccttttcaaataaaaatgagatggattaataagagcacgacatgtggcataggaattagtccagtcaacatttaatagattagtagtaacggaagtagaaaaaatgtaacgtttagtatttaatctgtaaaaaaaaaaaaggtgtggtatttaagtgtatgaaatcggaaacataaggtaattatgccacaaatattcctattaatattcacttaataatataataaaacataaaatgtaaaattaatacatatattttatataaggactgtcttgtctcttgacatggttttgtagcttcactggtttggtttcatagtattcttgttgtttgtcattttgctattatttcaacggttatctgatttttttgttgttcttgctgctgttatctggtttttgttgttcttgttgatcttgtctcgatggcctcaagcagctatcacgtatcagaaggggatgaggatggggccaacattagtatcgaaagagaagaggatgccattttatcctatgatgcaagtatcacaagtggaaatgactatgatgattgatggtgtgtcgtgggcagatttttgacagatagatccattgactttgatgcaatgcaacacttgatgacgtcgctttggcagccgggaaaggagatattcgttaaggaattggataccaatcgctacctactccagttttatcacgagttggatatccagagcgtgattgatcgaagtccatggacttttaacaagtttctgttggtatttaaaagattgtaaaagggagaggttccgagattaatacaactaaaggaggctgatttttgggtacaattgcatgatcttcgctcaggttttaagacagtaattgtggctagagatgttgctaattatattggcaaatttgaggttttgtcctagatgctttgatgttcaagatggaaagatcttgaaaccgtacgggtaatggttgagagttaaacctcaacgtaaaaaccattcgattggagccaaatggttgaaacaattcatggcgacaatggatgagaaccatgctgacggagaacaatcagctagtgccccggttcaacgactccaactagctccagtagttgctggttcattaccagttggcaccatcaatgctcctatgattgtggaggatttcatgggtcaacaacctggatagattgtatcttttaatgtcaacactggtttcccaagattaaaggatgatgagaaattgaccaatctaaattaggaaactacagctgatgttattattgaggagcagtgtctcatggtgttagattctaaaagaaggaggactgaattgggcctcactgatggattaatgagaagaatgatgagcttagtccagcccaattgggtaaggattcaaaaaatgccaatatggtgggtgctggtttccaggcccacctctcattatgagtcttttatcttgaaattgccatgggcttggaaacccgtgggccttacaattcctaaaggatgttgtaatccaaaagaagcctaatttaatttttctttgtgaaactcttagtaaccgaacccaatggaaagagtacgggtttctctggggttcgaaggcatgatggtggttgatgtgcaaggtagtagcggtggtttggctctattgtggaggtttgaggaagaggtttctttacttgggttctctaaatcttacattgatgccaaagtttctgttgtaggcatggtggattggaggtttactggcaggggtagacccacgtataagcgaggcggggcagtcggccccctaaaaaaaattgagaaaaaatatacatgcattttagctggttacaacatatatttgtaaacataatattaactttagtgtaatggttaagctacttagcatataggttagaggacatgggttttaatcccaacaaaagtatttttttttctttttaagattacttttgccccctcactttaaattttaggtccgccactatttactggcatttatggggaaccaaatagaggtcgtaggagagccacttggaatcttttgcgtactcttgttgttagttcgaacttactgtggtgtgttatgggtgacttaaataatgttttgtcccatgatgacaagaagggtggtcgacggtattcggagttcttaatttaaggctttcaacaagcgttgaatgatagtggtttacaagatatggagctatgtggctatccatacacttgggaaaggggtcgaggtacctcaaattggtcagaggtttgcttggataggggtcttgtcaatcaagaatggcttgttatttttgcttcagccaaactctataatctggagttgtccacatctgatcactctcccattttaatggtactcacttctacctttgtggagcaaagagtgcgaagattctgttttgagaatgcgtggctgtgggaacctttatgtctccaagctgtcaaaggatagttgggggttatgtattgataatgacattcaatcaaaaattagtcattgtgggcagcaactgcttctttggggcaaggagtacacaggggactttaagaaatgtattgcaagcaggaggttcgtatgtggaaaattagataatgatgagatttctactactaattataaattggctaacaaaacttatctgaagtgtccattcagcgagaagttttttggcgccaaaggtcaaagcaactatggttgcaagagggggtaataacaacaaattcttccatgcttcgactactgctagaagacgaaataatttgatttctaagctgaaagactctatgggtagatgggtagattggaactctggtttatctcagcttatgttggattattatacatatcttttctcgacgacctgcaccaattggagaggggttagcagctgtgtacagaccagtgtaactgaggagcaaaatgttgatctaatgcaatctgtcttggaagaagaggtttgaaaagcattttttcaaatgcatccgcataaggctccgggtccggatggaatgaccctgggttttttttcaacgatgcttgcaaactgtaggccgtgatgttgtccaactagtgcaaaatttcttcattttaggtcagttacctactggtttgaacagtacaaacctggttttaatacaaaaaaaaaagcaaccggttgacatgggagatttaagatcgattgccttttttaatgtggtgtataagattgtgtcaaaagttatcgcaaataggctaaagacagtcctaccgtgggtgattgctgatacgcgaaatgctttttaacaaggttgacttatctctgacaatataatgatctcctatgagattatgctatttgaaacggatagcaaggggtcgtgatggttacatggcccttaagctagacatgggcaaagcctatgataggctcaaatggggttatccccgagccatgcttgaaaggatggggtttgatggtagataaatcaatttagtcatgcattatgtgagcacattgtcatacacgataactcacggagggaaggagatgggttcgattgttgcccagcgaggattacgtcaacgcgatccattgtccctttacttgttcattctctttggggagggtttctcaagtttgcttagaagctatgaacaaagtggcttgatcacgggctgtaagattgcaagatcaagagctcctgtcatttcacacatgttgtttgctgatgacagttacatctattgcaaatccactgaagaggaagcttatagtatcaaaggattgcttcatacttttgaggctgcttctagacagaaaatcaattgttccaaatccttaattttatacaatgctaactctagtactgaaataagggatcgagtttgcgacttcctgggaatttttgaggttgatgagaatgggcattatttaggcttgccttatagtgttggcaagaataaaaatgtgattctcgggttccttaaagataagttgaggaaacgagtacaaggttgggaaggtcgtctgctttctcgggcacgcaaggaaattttgctgaaaaatcgttgcacaagtgctgcctaattatgttatgaatgtcttccttttacctgttgatacttgtaaggagctggagcgactattggcacaggtgtgaatgtgtctatcccccgtgatccttagctccctgacaaggacaatagctttgttatctcagattaccctgttttggccaataaagttgtgaacaatttgttgagattaaaggctagagcttgggatgaggaaattataaaagatttatttgaagaaagggattagcagttaatcctctcaatttagctcagtgactctgcttcaaatgattgttggacctggaagtttaataaacatggacattatactgtccgaagtgcttacaagcatttgtaagtggtcaaagatgcttggtctctagataactctactggttttggaggaagctttggaacttaaaaatccctccaaaggtttgaaatttcctttggagagccatatcaagtactttaccaacttgctatcaattattaaagcaacatgtttcaattagtgcgctctgtccgttgtgtctctcacatgatgaaactatataccatgccttggttggttgtccttttgctcgagccacctagagcaggacaatggtggatgttgacaccagcagtgatgataccagcagtagtactggcagtttctgcaattggttgctgttgctgcaaaataggaaccgagatggcgagttagaggaagtggtgttgggaatattttaccacgatctagatttactaacatgtat

SEQ ID NO: 112327 - DNA, 3626 bp, Cannabis sativa
aaataattttattataatgtagtattaaagggtgttcataaaatagctaatccaatccaatccgcacgatccaatctaatctaatctacaatgtgcggatatccacacttgtgcaaattggattagattggaaaattcaaaatttgtacttgtgcggattggattagattgaaaaattcaaaattcttacttgtgcggattgaatgttgattgacatataaaagtaaccgatcctccaatccacacacatttataaaaaatgtaaaaaattatatatacaattaatattttaatgtaaaaaaaataacagttaaaagtctaatacatattgttatccaagttttctttcgacagacacgtggcacgattaaagtagggacacgacttctatgtagggctttagagaaaattagaagaaataactctcagactcagaaggcaataagaggtaatagcttctggaagctgcctccttcattgagaaacttgaatagcgatgcaagatccagagaccttggacacgtcagctccttgccaaatggcgctcaaaaaacggttatacctttttctgacacaggattagatcatgtcccttgtgccaacccagggtagtgtgcgtacgcaccctcacacatgctttttgtgtaacggcctgggtaattactattttgtaaaggagagacatttagtcgacacgtgtccaaggtcgtacaaagttcctaatcgattgccctacatcacacgatgaagaaggttccctccaatggacagtcagatcatccttttatagtacaagcctttaaatacccgcattcttttgaaggaaaggaggaatggaatatgcgccgtcaccctgcaaaaatacctagttgtgacttctcttatgcaaggctcatttactgtaatacattgaaatcatcgataaagtgaatataatatttcaaattggaatttgagtggtgcaccccatatatctcaaatcaagagcatgtttagctctatctgatgacaatttaaaaaggagtaaataatatttgccaaattgacagccttcacaaagagtttgttgttcattcatggaaatgtttacattggctacattgagaacttgatttaaaattttggtagaaggatggccaagccttctatactagtaatcttttaaagaaactacaaattcatgttgaacagaattagaaattgtagaaaataaaacatgtgttgaactgggaatgttattctttaaacatgagaaggtaagtagagatgttggtgatgaagatctagttgttttcccttcaagttgatacaagtcatctttaagtttctcccatagtaccattccatgtccttaacaagatacacattaacacaaaattcaacaaaaactttattatcagctgtaagttttgaaacactgataagattctttacaatttttgaaacatgaagcaaatcttttagtattaaatcaataccactaatatgacttatgccaatgcttgaaattaattatttctcatcaccattaccaacagtgagtttgtctttacattcatagttggttctagcactgagatcttctacctaagaaatgatatggttgtcgacaccactctaagcataccaattctcattgttaacagtttctggtcttgctatgtaggtactgcgatccttcttatcttgttcagtgtagccatctggtgtactccccataaaattgtcatcatacctgttatagcaataggttgttgaatgaccatacttgccacaaacttggcaggttagtttataaatatgtatacctcctcttcctgcacctcaagaacttggaccacctcggttgttgtttgatctgcttctagagttttgaaatggataattaggttttcacccatgtccccagtgaggagaaccttaatttgaaaggtttgctatggctccactcaaaccaacaggaggaggtaaggtgctcttggatccagatgagacaacactatgtctctcaagagtgttgtcaaaactgagaaaaatttcatgtagttcttgccatgtcatgttagggtggatctaaacaataatagcaataaattctgcatttaggccaaaaatcacattagaaacaagatgactagttgtataaggctcaccagcaagagcaagcatattagcccaagatcttttcattatgaggtaattgtgccttttctaactgtctataacttcaaccttgtatcatcactcttggattttgagtgagctccatagagggtctttaaggctttccaaagatcaactgatgtagaataactcatgacttctgtagcaattgtctttgtcatggattcatagagccaacccatgagtaattggtcacaaacataacatttcactgctcatattccaggttgactatgactccaaaacttgatgacttatcccctgtagtggcttctgctgctatgtactcagtctgacagatcttggttccattgatgaattcttttagtctgtttccctttatgaccatagtcttccatagagtaaaattgttccagtcaagtttcacagcaaaaggttgagttagagtgtttccaaaaggagcattaaagaaagaaggacaagtagagctctaatttagaataggggtgacaacattagtgttttgaggagctaagttttttttttcttctactattgttggattcacatcatctcggatcagggtatgatttgaagatgccattgttgctcaggcgtgggccaaagagctctgataccaagtttaaataggtatggagaatgcagaataaatagaaaacttagttcaaatgatattgagactataattccattaaatatgcaaagccactcattaggtaattgtacagctgaaggaatattcccaataactaatatatatgatgactcacttaattctaaaacattcataacagaaaaagaaaaagccaaataaatctgttaaagcaaaaggacagttagatagagtatttaactaataataaagtaaggagattaaggactaaatcatttctgaacactatcatataaatcaactcctttactttcttaatttttggaagaggatagagatgatagcgcaacttgaatcgtttggtagataattagatgtcattatatcttgttgtaacttttttctgatatatttcttcttctacaataatttataaaacatggccctctctctcaccactaccattgccctctctcacactaccaccaccacaaccataattctagcgttgtcattgtcattaacattagagtcgtcaataatgtcgccactctcatcaaccataattctaatgattcaaaagttattctaaaacttaaatccccatggtaatatattttataattattcactcgggcataagtttgatttatatattatatatatatatatatatatatacatttgttaatctacatgttagaatgtgtagaacctttggaatgtagaacaacaaattttgatatcacaaatatgaagtttgagacttccaatagttaatatttgggttaatttcacaaatgcacaaaaacaataaaaatacggttttacggaattttaaacattt

SEQ ID NO: 112328 - DNA, 3400 bp, Cannabis sativa
tacaaaatttaacttaaatattattggtttagcttggcaaacaagacaaacatacagtagtagcgcgtggtagcacctgaaagcctgacaaagaaggcttgccacctggcctcatttaggctattttatttttgtaagccggagtccgcgtcacatactagtactaccttcttgatcggaagaaataaaaagaaaaaatattatatatattatggaagaaaaaaaaaagagaaggaaccgtgcggtccccaaaaaatccaaaaaggccgtaaattagaaatgaaattccgattctagccctactgtgttcccagggtagaagaattcccgcgcatgagaaaggaaataaaaaaacacaagaaagggctgatgagagattagatgaagacaatcaccatgatgatcatgatgatgcctctgcccttctctctgactcctgggccccactctcacctcctccccagacttcactttaagaatctatctgtcctccattacccgcaatccaatgcccttatgtttttggtttgcaaaattaaaattaaaatttatttttcctaaatcaataactaaacaaaaataataataaaaaaaaaattaaaattaaaattcattttgttattattttcttggtttcaaaccaaattcaaaaatttaagtatccgctatatataggcttaggtgggtttagacagaaacaacactaggaagtgcttcactctcattttcataaaaacaaaaaatactaagatgagccagggttgtgccggccgttctgtggtgttgctcggcctcatcatacttaccctggtcctctttacctctccagtctgtgcgtggcgtccatggccccaaaacagctccaacccactctatggtgattccaagaagttcgaagggtcatccgagttcgtacacttgaaataccatatgggtccagtactcaccgccgatattacagtccataccatctggtacggttcctggcaaagaagccagaaaaagatcatccgcgagttcatcaactcaatctcagccgttaattccagacgtccatccgtagccgggtggtggaaaaccgtacagatgtacacggaccagaccgggaagaacatctcgcgaaccgttcgcctaggctcggagaagaacgatcggttttactcgcacggtaaaaccctgaccagactagacatacagtctgtgatcaaaagcgcggtgacggcgaaatcgaagccgttgccgatcaatccacagagcgggatctacctggttttcacctccgaagacgtgtacgtccaggatttctgcagacaggtctgtggctttcactacttcactttcccttccattgttgggtacactcttccgtacgcgtgggtgggaaactcgggcaaaatgtgccccgacgtctgcgcctacccattttcggtgccgagctacatgacgggactcaaacctctaaagtcacccaacggtgacataggggtggacgggatgataagtgtgattgggcacgaggttgctgagctggcaacgaaccccttggtgaacgcctggtacgcgggtcaggacccgagtttcccggtggagattgctgatctctgcgaaggtatttatggaaccggtggtggcgggtcgtacacaggtcagctaatggacggtcacgatggtgccacgtttaacatgaacgggatcagacggaggtttttggttcagtgggtttggaaccacctgttgaattactgtagtggccccaatgcacttgatcagtaaaattaaaaaaatttgaattttctcagataatttataaatatatataatattattattaatttttttcttttcttcttttgggttatggtttctgagctgatcgggtctccctgggtttggcttttcatcttgtgaagctttgtttgttaatgcgtaattataatcagctgttaaggtagtttaagtttgttaattattgtaataatattatttttcgtatactatttttgttataccaaaagatcatgtcgttctctcttttaaatccaaaacgaattgtcgtatgttcccgccttattcgaagtatgctgtttcctttttaatttacatttacatataacgattaacgaatcggacatttatgtatgccaatcagttaatattgatgttagattataatttataacaataataaataaataattaagaatggttggtgtcactctagctggagtatttagtgatttgctccatataattaattgtcttgttctaagatttaatggttttcatttcattgttggccaatttcttccctttcattgactgatctctcaaataaagtaactaacgaaagagatttttttggttcctaattcaatctttttgtacactatataaaatatatcgttgaattgatttcttgtcttcttaatatatatatagttttgattaaaacttttgttgttagtgaaattgagagactaattaattataaagagcaacagggtgaattctctatgaaaagacagtgtgagtatgagacaacaagtctactaatctaacaactcttggcagcacctttggtagagaatctaggggcccgcttcttctcttttccttcccaatttttctttgcaaactttattgggatttgggtctcgagacttgatgaataattaataattatgttttgttattattattcttattattattttctaattattttatgtagttattttgttttcattttcggtgcactttcttaaaaggggcacgttttgttttgaactcaagacatggggcactaaaacctagttgcttcatactaacccagccaaaaaaagacacgaaaggggcgcaaagtgctctatgtttccacaatcctttgcattgcatctcaagttttatgagatttaaatgctttcataccaattcaatattttttttcttgaaaggggtattgttttttttttctttctaaacttatattatttattttatatgcactcctaacaattcatttttatatcccaacgatagtgtaacattatcaaaattcgaaccttaaatcggtacaatcactgccatttaattagttcatattatgctgtgaacgtaataaccttttagttagaatattactaatgttcactttatatgttcggcaaaaataataatgtttttcttttttaacattaggagattcattatattgtgaaaaaaattccaagtactgtatgatttacattatgtctataattggtattattagaattgaaaaatataagttatataacattatacattaataaagggaaatttgaatttatatgcttaaataattaaaaaattttattattataccaaaaatttacactataaaaaaactatactttttttt

SEQ ID NO: 112329 - DNA, 3729 bp, Cannabis sativa
aaactcctcttataaatagaccctctcccgttccttaaactttcccaccaacaaaatatcaaaccttcttctatctctttttctttttcttattattactctcaaagccaaactaagtacttaaacactcttgttcatactatacatattatatatatgtcatcagctaataataagatgaataatattatgagtgttaataataatcatgaacgtgtagtgatggtagtagtgttgttattgttagtatgttgtttggatgtttcaatgggaggtagagccattccttcaagtgctccaagtacggtggtgaggcctttagcgactgatgatgttcaagcctatgtgacaatgaggccccatttgaatcctgggcagaagcaagttttcagggaaagagatttcaagggttgccttcctaaagggtttcgtcatgcctcggctcctagccgatttgtcaactaccacactcttggtgccacttctggctgctcctccatcaataagcacaccaacccaaagaagccttaattaatttatggctgtgaattagggtctttcctccctaactcactatatttttggtgaaagctgcctctccagccagttggtcattacgacttttttgtatatgcatggatgaaatatatatggggatatatatgtgttttccaagagtgatattatatgtgatcaacttgatcacatatatattatatatatagccttcattacttatgtatttttttttccaaagttttggtaacgaaagtggaagttttttggaccccggagtctgattatatttattttttcattaatggttaagttctataaagtgtgagtttgtatgtatgtatgttctttcatcaggtgccaggcctaaaaaatttaagaaatattgcaaagaaatttgatgaatctgtatggtagaattgctaattaggatgtttcaaaaaaaaaaaaagaattgctaattaggataaacaataactaatagcccattaatatcaatagtttaaccacaaaaagtgacgttttataatctttaatttatttttatttaattaaaatatataattcactattaaattgcggcatatagtaatatgattatattttgcatattttcattctactattttctctttcatatttcatattcattgtatttagtgttctttagaatccaaatccaatatgtctaaataaaattaactaattaaaattctttatattacaagttaatttttttttagaaaatataaacaattgtatttgtatgtgtgaattgtaccagcttataagttataactgtatgctcatagtaaaacttaatcaaaaacgaataaaccatattgaaatcaaagtcatttgataaatagtgttaaatgaataggtcacaaaatggtggtttttataaatgaggcatgaaaaggtgtcacccagcggcccaacataaatttgtagcctatatatgtatactcgtgagtttggggaattttagccgtcctatatataatcataataaatgctacatacaaatacaatatatatagtactcttccaatatttgggaaaattatgccatccattttacgcgccatttacgtgtgaaactttttttttaaaaaaaaaaagcattatctgtcaattctctggctctaatgtccatatagtccatacttcaaaatattgtattgatttgcagcattactcatgttttataagtagcttaatgctaatagtctcagccattattatttaattagatatgtttgtgtattgtattataatgattatattatataatttttgtttttgtatttttttaaagaaaaaaaatggtctccgtgccaaaaaaaatagcaagacaccgcagtgtaatttcatcctttataattattaatggaaaatttgataaaacatgcttatataagacaaaaataacaaattatactaaagttaaattactattgttaatcaatgtaggtttatttttcatatgttcccaaattactcttcttatatcaaaaacatcacccattctcttttttttatggcataaattttaagcaaatatcagatcactatcgaactaccatcgaactactatcaaaccatatcatgcctttataaactatcagaccatatcgtgtctttatcaactatcggacttttatctctaacctccaaattacactactatcgtatctactatcgtaacctattgtaccccattatacccccatcataccatattgtgcgtctgtccgttcaacgatggtgttctggattgtgggtcatttgtcacgcactagatagaaccagagagagagaaggtcgtgggtagtcaatcgatgcaacaaagagaaccagagagaggagggtcgtgtcgtgggtggtggtcacaaatgttcaacggtggtttcagtggtagagtttggtgccaaggaaaggggaagagaaaacgtgctgaagggaaagagagaaaggttgggtggatttttgaaatgggaggagtaatttggggtatataataaagaaattttttcataaatatgagaaaatgtaatatagtttacttttttatggcataaataaataataccatgggttagggatttttttattttttacatttatataggctgttttatgctatatttttgtaagaaaaaatgaaaatttcatatctgtaaaacaataataagtttcgctggagaagtcaccggcgtcggaaaagtcgtcgaaaaagttattgtccccagaaaagtcactgtcgtcagaaatatcgtcggaaaagtcaccgtcgctgaaaaaattattggaaaagtcatcagaagtagatgtcttagatataactaaaaatagaactagttctataacataatgaataaaaacaaataactcaaatcggttataattgaaatataaccgattctataacataatgaataaaaataaataacacaaaataacgcaaacaagttataattaaaataaaatcggttctataacagtgttataatgaataaaaacaaataacacgaaataactcaaatcggttataactaaaggatacttgttcttcacagtcattttgtttaattcccaatagtcaatacacatacataaagatccatctttcttcttaacaaacattaatacatgagctcgccagggtgacacactaggtcgtgaatatcctaggtcaagcaacccctgaagctgaatttttaattcctttaagttctgtcggagccatcctgtaaggtgctttagaaactagttatgctctaggtgctagatcgatgatgaaatcaatttctctgtgcggtggtaaacccggtagttcatcaggaaaaatatctagaaattcctaaaccaccctgacgtcctctggccaaactatctcaggccgtgtggtatccaataccacggccagaaaccctaaacatctgtcttgtagcaaatctctagctgctaatactgaaatcactagaatccgggatccctgaaccaatcccacaaaaacaaactgttcttcgccctcaggttggaagatcaccatcttccgtttatagtcaatactagttgagtacttggataagaaatccattccaagtatattatcgaaatttactaaacccatttctattaagtcagcactcaactccctatcctcaattctgatcagcatagacataatccaccttttggagataa

SEQ ID NO: 112330 - DNA, 9541 bp, Cannabis sativa
atgaaaaaaaattagactaatttttttttttttgaatgtcgaaacaagctaagggtgcatcagtacatctcttttaagggggtgcattgtagaatcacccaaaatataaataagaattagaatagaataaaatttaaaatatataagaaaaatttataaaggaactattaaatttttttgtcatcatgtattgaaatggtatttctttttcattttaaaatggaatagtcattccaccaaaatagtggaaagagcattccatttctaatactttaatgtgcaaccaaacaaataaaatgaagattattttctttttattcaattctattttattacatccaaccaaatgccactttattttttaaattgtttcagtcctttttgtaacacttttttaattatttattttttattttttaattaaaaagtaaaaatatatttaacaaaattattcttactttttaattttttaattaaaattttgagaactaaaaaaattacttaaaatttttcttaattttttttaatcaatattttggactccgaccctaacttggaccttaggaccggtcgcggtcccagtaccgaacctggaccacggcccagccctagacatggacctagactcgacttcaataaaaattaaaaataaaagtagttatagaatacatttttgttttttaaaaacataaattttatttttatttttgtgattaaaaaattaaaaaataaaaatgttaccaaacgtctcatatatttataggatttttttttattttttaaaaatcgactttctttatttctttatttatacgagttttgactggggcttatttaataattttaagctacttaaaatttaatttattagcactaaatatacaaatactatcattaagaatacacaaacatactctcataatttactattagactactatttatatatatatatattttttttgtctagactcttgaactgggctagattaattttatgtaagtgttatcccagcaaattgtttaaataaatgaccagaattgaagtacagggagacatttgcaacaatttttttagttcacggaaagtttttgtgacagagaaaagttcaagggcaaaactctacacggatcatagtttggggggatatatactatttattctttgttcattttatggaatatatataatggtaaaatattattttagaacctgtattttgcaaaagttattgattgaattttttattttgttaatttttttacatttttttaaaatacaactaaccttaagttaatttctagcactcaaaagccttacccttaggcacaaatgacttcttcttgaacttcttggacggatatactttgtgcctccaaaactttgcctcaatggccagcgtagctccagaaaggtcgaagattgtgtgggtgttattcctaagggccaaagtgaatagggggtggtagaaaggcttggcctgctgaaaggaaagatggtatgcctcaactccttcagcaatgtaataatcagcacaatatccaccaatcttgaaaaccttcttgtaggtggtacctgttagccatgcaaactccagtagggaaacataaaaatatctggaccagttatgatgtgggtttgacttaaggttaaaaaaccagttcacatcatggggagaaggcatttcccatccctgctcgacataaagcacaaacagtgcgactagatactttatcccctttggactaatttgtgtcgagcagatcccgtaatagttggccaccttctgaaagtatgagtgagggggcagtagagcaccctgcttggcatgaggcctgaccaggcacaaagcccttcaccaaggttatgagccaattgtcctcccttggaaaaaatgccacatctccgacctggcctttggtgtggaagttgtttagccttttgacagtaaacttggatggtggtgaaacctagtgcgacagtgcttagacctagatgacttcgataaagtctccaccaaatcttcgttagtgtaatccttgccaataacaagtaattggctggatgatgaaacacgtttaccagcttcgtcgaatccctcgtaggtaaactcttcatcagcatcaagctccatttccccctcagaagcctctgggttcttatgttcctcctaatcctcatgctccataggcaccgtggctttcctaacaacaaccatatacctcgcgatgtggggatcgttggctgatattgcacggatggtttgctttgtatgggctaattttgacttggcctcaaaaagtgatatttgattatggcgaacaactgtaactgctacttcagcttgcacagagcttctcttcaaaggtcccagttgacccatgggtggtgtatcctgtacgtcctcccagactttgtatgtccacgatgctggaagaaatttcctccaacctcggtttagcttccacacaaaatgtccatacacttctccaccaatctggtcagattggtggtggcattgtacttttggttttggggaatcactgctgacttcccactcaaaaaatattgaggtagatgaagaatcacttggagatgaaggcgatttgtctgctcgaagtctaggttggttgtcgtgaagaagttgaagcagattgtcatctatttgaaagtcaactccccaaaagtcacctgggttcatctataaagaagaagaataatggacaggtgagtgtccgaaaaggtttagattgtccttctaaaagaagaacatcccaaatactcctaccagaagagaaaaatagatcaaaataaaggaaattcctcctaatgacaaaacacctacataaaaaccaatcttagaatttttacaaccagaagctccgaagaacataatagagaaaaaggggcgattttttctcgcgaaagttccacaccaaacattttcaagtaagacacatgattcttaggtttattatttcgtttcttttttagaaataaatttgaagaaaacttaaaatctaacgggccacaacaaaatgcacatgtatatattccagtaattctaaacacatttaagcaaagaagagtgaagggaaagtttaaaaggaaataatgtactcacttttgcgtggagagttgattatcttcatggaaaacatatggacggaaagcgaatatcacacagcttgaagaacaactttttcttttttctccaagctttgaagattgaagaactggtgaaagttctaaatgaatttagaaattcctcttatagacccattaaagggtagtatcggtatgcaattgaaattgagttttcctccaaaaagtaacaaaaaatataatcattaaaagaatgggggcgtgcaaactgtcaaagcacgtttccccatttcttggtttttgaatgagcattaaatgttgagatctgaagagattaaatacacacgtctcgagcaggacaaacgtcatctccaatacaacatgtgaaccgtaacacatgttattgatccgagcaatatgcagaccttggaagtccccatgcgactaacagttcccgcggacttgggggcaaatactattccaaaatttgcacaagatgacatggcactcaccagggtaacaaatgtcaagtgtatttataattggaaggggtatactagtttggggttttgtctagaacgattcaaagccaaatcagataaatatagttctacagcaagtattatccaggcttctttgaacaaattagatatgcctagccgagttccattttccgtacagaggaacgtggtaattaaagatctccaaatatattttccttaaatatcttctcaattataacttaattagaatctttatttttatgggattattttattgagagaatcgagatttgatatttagtttcccgaattcatctcctatattctcaaacttacatcttgtatttttttctataaatagtagagtcattccattgagaatggatcattttttttgattttctaagagctacacgctgctaaaatatttgtaagtttctcgagaatattaaaacactcctatgaaaatcgagttttggtaaaatttgtattttttgggttctatctgatttttttgtatatggtacgatgaggtacgatagaatatgatggtggatacgatagtagtgtaatctggaggttagagatgaatgttcgatatggtacgataattgatagactatgatagttgctttaaatttataccatgataaaatttatggcatgataatatagaggttatggtatgataagttatgacagggtacgatggtgggtgcgataataatgtaatatggaggttagtgatgaaggttcaataggatacgatggtagtacgatagttgataaaggtacaatattttatttgacataaattttaagcaacaacttaaaccatattgtaccctttcgaaccttcatctccaatctccagatactatcgtaccaaccacagtataaaaatacatatctatagctttttttaaacatttttatactttctttttttcaaaaatatatacaattattttcaaaataatgttgctttcacgttcacgttgatgctacatgaaagtgaaagcaacatgaaaacaatgttagttttacttttttgatttaaagtataagtataaaatttgtaaaaaaattcgtaaaaatataaaaaaaaatcagtaaaaatataaaacaaatacgattttaggtattttgtataaaaattcaataaaaaaaaacccaataacacatgaaagaataaaagtattttattttatttctttaaagaaagaataaaattatatagtgtgacctataatttttcgaaatcatgagcaattgagcatcattatgattcatgatgctggtagtgcactatacgttcagcaaagtttccatggtttcaaacttgaaaatgctttaaaatattaaatcacacacacatgtatatgttatatatatatatatatatataaatttaagcaagcaagcaagcatttccatattccacaagtttgaattatgaatgccactcaaaattagaatccaaagagaaacttaagaaagaagggtgtctctctctgtctcatctcatctcacaagtacaaatatgtttgtgttgtggacttagttatatccctataattataataatctaataatacaataagtttggtcaattattgtaacttttaattaacaataacaacccttttttctctctactaatgaaagtgcctaatcacaggttaccatcatcaaatcaccttttttatttttatttaagacaaagtagtactaaatcccatgtaatagtaatacaacaaccatggacaatcaaaaacccaacttttttttaattgcccaagtttgaattttgaacaacaaaaacggcaataaaagaaaaaggccatgctttgtggtaaattatccactttaatcaaactacaaaccataaaataatataaagatttggtggaccaacttagcagttaggagtagtagtagtagttgttgttgttattcttttttaattcatttaaattcgttttctttttttaattcttttttttttaaattatttttttggcattttctttgtcaaaatcccaggtgatgcggatatgccatgttttgagctaatatggccaattgtttcatatcacatttgaccaattaaaatactaaatatgtttattaaattattaattttgttggattttcaattattaatatatttataaaaagacaacgcctaatttcttcttattttaatatcacttactacagagtacagtgtggggaacataccatttacaaaatccggaccccttgactgttattatttattttaattattttttcaaatatttttttttggtaattcctttaagccattttactattaaatttttactttcttatttgtaaattaacatagcattaatttaccaaaataaaaaaaaatccaaaaacttgatttatgcccttttatgtcattggaaaaataaaaaaaaatccaaaaacttgatatatgtagaaaagaaaatctaactaattttagcttatcattttttaactctatttttcttttctatttttgcccatatcatggttttaaattttaagactaaatatatgaaatacatttttttttgccatttataattaaaggccttttaaaaaattattcaaaaagaaaagccaattaattaaaaaaaaagataacattttcttcctaaaagaaaatattttcttaattgacacgcagacacacgtgccacaatcttagtttgtacatatctatagtatatagtatcacaaaaaattaataataataaaaaataaaatcgaaggaaaagaaaaagaaaaggaaagtatcaaaatgagagagaccatcgttatcatcaatcaatctataatctcttctctatagcccaaattacccaaatacagagaggagaagagatgagaagctcacacatacacactcacactcatcccatattatatacatacataaataccattgtccaatccattggcattagacaaagacataaacaaacctgagcttaagatccttggataccttatatattcatcttcaacaaccgccaaatctctgatttacttcttctaattctaatacacacagagcgagagaatattccccttcccccaaataactttctctctctataaacaaccccaagacaagcacaaaattactcctttttctctttctctctctctcctactagagctcaacgttctcttggttggaatggaagctaagtttctctgatatacatacagagtgtgaagggaaaaagccttaacagaaatacccagaaagcttttcttaaagactcagcaaaatccatacctttggggttatttaatctgggtgtttttctttttgagcttggaagcaatgtggttcgaattggagatttcataggctctttttgtgaatgatattttttttttgggtttttggatcttagaagacaatggcgctgttcaggaagttcttttatcgtaagccaccagatgggcttctggagatctctgaaagggtttacggtaatgactcgtttctcaggtttgaattcaatgtatgggattttatgctttaatggcggtcgataatggtttgttgagttttaatcatttttgaaatgttactgtgtacacacatttactgttcgagtctgagaatcgtttaattgacataattttgtttggagaaagaaagcatattgataattgatccctatggtatgtctttgaagattgttaaatgctttgtttatgtattttttttttttaaaatttaagaaagaaacaaaatttatgggttttgacaatgttatgtgatgaatagtatgaaaaagacctttgcttgaactagctttctagtatgtcctaatcttaacctttaagtttcttaatgaaactttatggtgaaataaaatgtttgatatgctttagtcaatatggttttcagtttttgattgctgctttaccaccgatgtttgggaaggagatgactataaagtctacataggaggtatagtgggtcaacttcgtgatcacttccctgatgcttcatttatggtcttcaactttcgagagggagagagccaaagccaaattgctagtatattgtcagaatatgatatgacggtaatggactatcctcgacactatgagggttgccctttgctcactatggaaatggttcaccatttcttgagatctagtgagagttggctttcacttggccatcaaaatttgctcttgatgcattgtgagcgaggtggatggcctgttttggcattcatgctagctgccctgttgatttatcggaaacaattcaatggggaacaaaagatgttggacatgatttacaaacaagcgccccgagaacttcttcaattgatgtccccgttaaacccaatgccgtcgcagttgagatatctacaatatgtctcaaggagaaatgttggctcagaatggcctcccttggatagagcccttacattggactgtatcattctgagattgattccaaatatggatggagagggaggttgtcgtcctatatttaggatatacggacaagatcctttcatggctgctgatcggactccaaaagttttgttctcaactccaaagaagagcaagttggttaggcactacaagcaggtagttaaatctttcttactcttatgtaacaggaacaatccttttatttatgaggattttttatttttaatctaccacattttgcaggcagaatgtgaattagccaaaattgatatccattgtcatgtccaaggtgatgttgttcttgagtgtatcactttggagaatgatttgaaacgagaagaaatgatgtttagagtcatgttcaataccgcctttataagatcaaacattttgatgctcaaccgtgatgaaattgacattttatggaatgctaaagaccactttcccaaggactttagagcagaggtttccatttatcttgacatatcctcatttttatctttttagaatttatgattgcaactaatattttgcatttgaatgaaggttcttttttcagagatggatacgatcatttctttaatgcctgttgatttgcctggcattgaggataaagaaggtcttcctattgaagcctttgcaaaagttcacgagatctttagccacgtggattggctagatccaaaaacagatgtagcactaaacacactccaacaaatctcgacgtcaaatgccctacatggaaagatggacagtgtatctgttcaaaatgctgaaatagggaatgagtttcgagaatcaactcctgatcaagttaaagttgtatcaaaggcatcggaaagcaacattcacaacctcaattccacgagtcaagtaaagcaatccatggccttgtttgaaccatccatagatgataatcttatcagaaaaaaaatggaaagccaagaattgcgaaattctaattcagttgggaagaagagtgagatgaagaacagtaatgtaactaaaagccagacgggtatgcaagacttacagattggtctccaacggccatcccagcctaagattatatctcaaagagtacatcaaacttctttgtcttctccagtttcatcaccattacctatatcgagatatcaaagtgcaccctctgctcttggaattacagctctactgcatgaccatgcagcatctattaaggaagaagaaattgcacatccagtgactttagcacctagtaatgtatctgtatcaaaacctcaacctctgttatctatacaatctcttccaagcacaaaagtcacttatcctgaaatcacattgttgaatacttcttcgccagcttcaattcctcgtccctcacatccacctactttattggaggcatccccgtcttcccttttcaagaacttaacttcccctccccctccccctccccctc

SEQ ID NO: 112331 - DNA, 8938 bp, Cannabis sativa
  modified_base (1981)..(1986): a, c, t, g, unknown or other
tcatcatcatcatcatcatcacctctgatatctcaaaaccatctaattccatcgaattcgatcaaagtctacgtattagaactccccaaatctctcaactacggcctcttagacaactactggtcctttgatttcgattccaggctaggtagcgatgcaaacaaatactaccctattttatggggtcgggcggcgaatgggatgagcggctgtgaactctccccgattttccaggctacaaacaaatactacctttgccattcccatcttatgtccttaccaatttccctcctcagatgacaactgtatcatcaacattgtagccccacgatacaccccatcctaccattaattctaccattcatgatccacttactcgaagctttgatgtccctactgttgctgcaaaaaataaacgtaaagctgtggttatttggaataaaatctcaatcgttttaatttttaagttccaaaaataaaaatttaatcgtatataattcgaaaaaactattacgttttaatttttaagttgcaaaaataaaaattcaatcgtatataattcgaaaaaaaactgttattttttgaatataaaatttttaaaaaaaaataagtcagccatgaatttctcataaaccaaaaattcggttatataggcacactttatatagaatagatataagttatacggaaagtacatacgttcattttttaggggtggcatatccttaatttattataataatcaattgaaaattatcaataattcatttcctcaaatttattttactcattaatcattagcttttaaaatattaatataaatatttgtctcaagtcaatactatactatataaatttaaaattaatttgcatgtagtaaaatgtaattggacagattattagtgcttatggggtagccaaagttgtggctagtggaaatgatgagtttgagaaggatgatttggtggtgggaatgatttgttggggagagtatagtgtcttcaaaggagaccaaaccatgttcaggaaactcaacccaatggctttggagtttccattgtcccatcaagttggactttttggtaattaactttccattactctaactctaaacccatctttcatgttaattttttcatataagcactcttaagaaaaaataaaaaaatagtgttatgatgaagaagtagccttgaaagatacataatagcttattttcctaatgtaaattcatttaaaaaagttgaagaagaagaagaattgtttttgtttttatggtttttttttttttttggcaagagtttacaaaaatatgactttttccgaataaattattttatgcgaaaaaaatatgggaaaaaaatttagggtaaccaattacttataatgttttttttttcatatttttgaaagtttcttttatttttccaataaaataactttttaaataaataaataaataaagatcaacattatattttttgcacatttagtataaaaatccataaaatatgtaattttgacttcaaaaaattcattggatttgatttgttttggtttagggtttagtggattgacagcttattgtgggctatttgaagtgagcaaacctaaaaagggtgagaaagtatttgtgtcaacagcttctgggtcagtaggccacttggttggccaatatgctaaacaatttggttgttatgttgttggttgtgctggcactaaagaaaaggtaactttttataacttataaccctacatgctaactcatcaatggttaactatttcaatgatattattattttatgagaatgctaaaatatatcattgaaagtatcagatttcacatgatttaatataagagtaatttacagtgtaaatatttaagtttaattttcggttacagttatattttgttacttctgtaggtacccgcctattaagtgtcaagttattatctacgtgttatttttttattggtatnnnnnnattaatttttaaataaaaaaaataatgatctggactaatcagagagtgtcatgtggccattgacttgacacttaacggtcaagtacctacaaaagtttcagaaatataacttataaggtactattactgtcaaaatattaaacttaggtatttatctgcatacagagttatatttaagtatttatgccgcaaattactctttaatacaaaaacagggatatttgcggcgaaactcccttaacatttataattattacacatatgaccctaataaaaagaaaagtgtcgtcataagtactttatcttacgattttgttacggtcgtactcttttttggccattaagtgtcagctcataaacatgtagcgacatattattggacaacgtattaaataagttaaggaaatatgtcaccgcttgttttttgagctggcacttaacgggcttaattggcacttaacatctaaaaaattgtacgattgcaataaaatcgtaagataatatatttttgctgccactttttttattaaggtcatatgtataataattgcaaatattaaataaaattcgccgcaaatatccctaacttttatggaatactccaataccactctgaaggtgtcaccttagtggtgcggtgcctaatactgatactcttattctatttctaggttgcattactaaaggaaaaacttggttttgacgacgcattcaactacaaggaccaacctaacttaaaatcaacaatcaaaaagtaagataaaattgtggaattcaaacgaattgtgtttcaattaatgcttttattttaatgtcaataattaaggtttaaataacataaattttaggtactttccggatggaatagatatttactttgacaatgttggaggtgagatgcttgaagcagcaattgctaacatgaaacactttggacgagttgcagcttgtggagtgatatctgagtacacaaacacaaacaatcgaacttcactaaatatggtcgatattgtttacaagagaatccaaattcaaggatttttggcgtctgattttgtagatatgtttccagattctatttcattcaccatgaatcatcttcgtaatggtagtctcaagacacttgaagacatttcaattggtttggacaccattccaaaagcttttattggactctttcaaggtaccaacattggcaagaagattgtgaaactagcaaacgaatgaattaattgatatatgcaaataatgtactcaaaataaaagaagattgtgaaactagcaaacgaataaattaattgatatatgcaaataatgtactcaaaataatcaaatgaacttattttgaaaacaatcatgtctaagttgattaattcttagttttttgagcggtcgttttgccttttaggctcacttttttgtagtgagtctaaaattctttacaatagcaagtaattcttacatatagtgttagattttgagcttattagatatgatggcatctttaattactgtcaaaattatctttatgctatgaaaatacaagagattttaagtgaccattctaaaattataaaatcatagtacaaaatgaaagaaaataaatagagcacaatcaattataggtcccccaaaaataatttgaaaaactaaaaactattcccttgtagttcataagtattatttatggtttatatatacaattagtattacaggcaaataatgaaattgaagtgaagctcaaccctcctcaaactcattagtggcattagtaaaatcgagaagagaaaaagcatcaaaaggcagaaccaccacccttggttttcccaagcaagatatctttggcttcattgattttcgatgcaaggtaatggctaccaccggcatctggatggttagcgaccatcacccttctatgtgcttccctaaccttttctgtcggagttctttccctgtcaaaaacacaaaaaacaaatgaaaatgtaacaaaaatatatatgaagtcaatgcagaatggataactgagttgtaatgctgcttgagagttattcctttttccttttttcctttttgaaactggtcaccgggcctaatattttgtagacacctaagaaggggggctccatcctctaatcttgtaggagcaagccatcccctgacctaacctaactgtctgagctacaaggctgctcaaaagtcaagtttgagaaattatgaactaatcttttgactacttttctttttgaaacaaggctctctgcctaacaatccaataaggacttgcccctctttgaggccacttggaagaactgcaccagccttctacatcagtttccttcttttcaccttaaggacaaggtgaaagtttgggtgggggctgatgacagacccccaattcggtatacctttgctaggcatgggcattaggagtgagggtgaagtgttatttgtttaattgtggaaagtgtttgaggttaaattgtttgagagtgaagggctagggtatgcttattccaatttgtattgagccttggctcttgggagagaaactaggactctcgaatttcctagaattatcaattaagatctctcttttcttctatttctgtatttttcatactgtggtgtatcaagtaattgctatgagggactggacttagaataaaactaatctccgtgctacaaccacaaaatagagtaattcattcagcttaagtaattcaatgaattttccatttccaaagacatgtgaccatattcttattatactttacctcaccctgacttgaaaatttattaaatcaaaaaaatgctccaaaattgtaatgttaacaacctagacatggtttactagagatgatgtctagaaagctatgtacagtatacctagtaccaaaagtccaggccctgatggttatggttcggagctttacaaggctatgtggcttgacataggtgtggagatagctgatgtcatgctgaatttttttgaaacaaggcggattccagctgagttaaatgaaactgtgatcgccttagcgcctaaaactgaatttccttcttgtgcagtggattacagaccgaatgtctgttgcaatactctttacaagtgcatttctaggatgctttgtagtagactttcagagattcttcccaatattataagtcaaaaccagagagcttttgtgaagaatcactcgctagctcataatattatgatatttcaagacttgatcaagaattataataggaataatgcatctccaaggtgtgctctgaaggttgaccttagcaaggcctatgacactgtggattgggaattctcggagaagctttcaacttgtctttgctatcctaccaagtttattaagtggataatgacttgtcttaaaggcacctcgtatattctaatgatgaatagtagggactcaaggagggtttcaaggagtcaaagggctgagacaagaagaccctatctctcctttactgtttgttttagtgatggaatatctcactatattgttgcagcttggggcgcgggataagaagttcaaatttcatcctatgcacaagaactaaagaatcatcaatcttagttttgcggatgatcttataaccatttgcaagctaataatgattttgtcaagtgtgtgaaggataagtttgatgaattctgtcaatctacagggcttggggctaattttcaaaagtctcaattgtattttggaggagttactcaagaggaaaaagaacagctgctcaaagtgatccaattcgaagaacgcagcttccctctcaagtatcttagagtccctatgcgtcctacaaattggaaagttgaggactgtgggatcattctaaagaaaatcaagcttcgattacacacttgggccagtcgttatctttcctatgcaggtagatctcaattcattacttctgttcttttgggtttgaggaactattggatgggtatatttttgttgtctcaaagtattgctaaggaagtgaacaagttgtgtatgtggtttctttggggcaataatggcacaagaagcaattttcactttacttcttgggaggaagcttgcctccccaaagcttatgggggattaggcttttaagaaggagctaggtggaataaagctatgcttgcaaagtatatttgggcgttgagcaagaaaccggactcccttgggtaaaatgggtgaccaaattgtatttaaaggggcaagatttttggcaataccagctagtattggaggaaattatgcaacatcaagggagttttttctcaaagtgaaagagaagaagctagatctcttggtaaattttgtactggcaggttgtatatgagctttataaggcttgagaaggtcaaataccatcagtttgtttggaataatttgtgttcccaagcactgctttattctttggcaagttgttaactctaaactgctcactagagataacttggatcgattccatgttaccatgaatagcactttttgtccagtttgtgatttggaggaggaaaaccacagacgcttgttatttgcttgttcctattctaaacaggctattctccaattgcaaagttggattgggaaagattggccttggaagtttgaagggtggcaggggtggattactggtatgaaaagagatgttgtggctgagattttgtcagccctcattgcagccacggtttatgggttatggacaaatcaaaacactagcatttttaaaggctatacttatagtgttgctcatactatagatatgattaaaaaggagattaagcatagaacttatagtatattacaaaggaatttgaaagatgtagagaggagatttgtaatgagtttgctctctgtaagtctcggcctttgttcaggcttggtttgtattttggttgtgattaataaagatcttttctttcttgatcaaaagaaaaacaaactagacatatatatccccctaatggttgggatattgctaccacacgaaaatcatgtgaacacattatcttaaatcagaaatcatgacagcatactaataatttttcatataactcgaacagggaggagatgcaaatgcttgattccacgcaccggagcaaataaaaaaagtaatgtatctaagactaaagttcaaaacactaacttctaagaagtttgaagacaacaatatcaacaatgctatcaacctctattatttgaatatcagcatgcacatactttctcagaaacaaaattcttatctagctagttactccatcctacacaacaagacagagcttaacaatccaatggtaagccctttcatcagcacggacaaataacatatattacgaaaagatcataaggaaaaacataaaaatagtacctgactccaagtattaaagccgcctctcttcggttcataacaggttgaaaaccaccttcataaaattttcgtagttttgcagagggtggtcttgctttgaaggcctgccaagccagaatgctgtatctaccagcatatgctgcagcagctactgcaattcctgccatcaatgctgaagtctggaaccaaaatttacatatccgtcacctcatatgggaaaaagatccaaactttacatacaaaaaatgataattttgtcaagaagttcagtcaatcaaaacaaaatttagtcgagaagttcagttaagcaacaaaacccacaaaagcaagagtgcaagacccagaaaccaaacaacacaaagaggacccaaattagaatcaaccaaaacgaaaagcaacaacttcgatatttttcctcaccattttgtgatgattagaaatttgaagctgacgaatccaattcggatattctgggttagcacttttcttcgcgcccaagcaaactgtttgaacatgtatgtattataaatattagtataaattaacaaaaagaaaattgaaaaagaaaaaaggattgttgtgtgtgaagcagataaaatattgactcagcttattttgaatcagtagcactattgaattatgtaaacaatggttcattcacatttcgcataatataatataacacatattgaaaaaatctgttgaaacaaagataatattttctcagattgtccacacacacacaacatttccaattacaaactatttaagtcttaagaaaccattaaaaaccccactctttgaaactaccatttaagaaagaaagaaagaaagaaagaaaatcagtacctcttcattctgggtttctgaaaatgagaagtcattggatgaattcccaataacattagtaactgcaaatgaataatctctctacataaccccaaaagaacaagctctactagattaaataagtttactctcaaattgaaaaagcacggaccaaaattgttaacgattatgcttcaactctaggacttttactcagtattaaaaataaattccaactgaagaaaacgccaaatctaagtttgacaccatttcatatcagcacagcaacacaaacctaaactaattctcaaattgctaaaacaaagtaacacacagatatatatatatatatatatatatatagaaagaaagagagaagaaattggggaggaagaaagggtcacctgagatggatttctacaatccagcgccagagatggagacggaggggagagagatcagcgaacttttgccgttcaacaatggagtggagaagaaagacgaagaagacgagtctgaaaagaggcttagggatatatacttgggcttgggcttgggcttgggcttggtcttggtcttgggcttgaacttggtttgggcttacgttggagttggcttaagttagagcctgaattttggggttttagaaactttttgaaaaaaaataagggttgagatccaaattgtcctaaatttggtaactaagttagtaaatgtccactttttaaaaaaattaaga

SEQ ID NO: 112332 - DNA, 1583 bp, Cannabis sativa
aaccgctcttccgatctaacatgtttttgaaaaatatttttactttttcaattttaaaaacaaaaaactgattaaaaaaaaagtgttaccaaacatcacctaaatatatatatatatagcatttatgtgtctacaaatttgtgaccataaaatttgccccttataaaaccaagcactaattcataatagcttgaaaggtatataagaatctagtgttaaatttacaaagagattgagtgtatcttttttaaagatggataagatattttcattttgattgagcaaataacgtggttaacaagtatacatgtgtagtatatatatatagtatatatatatatatatatgatatatatgactagttgagtagtaatactaatgagtaatgccacacctacatgtacttgtgtctcaattaatatggctactatgtttactcagtcattattattattacattgtgtgggtgaatcatatatatcatcttctcatatcattttcaccacacaacaaagaagatagtgttataataagtcacacattttctcacttgctttgaaagattgcttatcttttttctctaaaaattatataaatatgtatatgactttgtagaacatgatgaatgatatctttcttggccacatgttattattagtagcaatagtaggatatattaataattagtttaatgagcgttaaacttatataattattgagcatttaatcttgtattatatggtattgaaaaagaatttatatgcaagttacaactacattaatttgtcaaaatatgagatcaatttatagcttttttgtctttaaagaaatattaaataccattgttaatgcttttgatttggacccatcactctaatgaagaagattttgacaattaattaagccaaaagttttgtctttcatgaaaatatcacataattattaataaggagattaaggttttgatcaagttcaaatcaaaggttggggtttaattaagagtatatatacttagtttggatttttaaaaaaaatacactcgtttaaagtttttttttatatatttttatagcattttataaagacataagaaaaatataaaaataacatataaataaaaataattaacaacaaaataactagagtaaaaaataaattaaaagaccattttttatataaatagaattttaaattttatacagtcgtaattttttttaaaataaccttttaataataataatataataattaagtggtccatttagataaggattgggtcatttttattgtctaactgaaaaccctgcaacaataggagtaagaaaaaaaaaagtatatgtaaacaaaattgttggcatagagaaatagccaaatggcatttacctcatacaaaatccaaacatgaccttaattaatatgtatgcagttatacctgaagacaatcagcctacatgcctaatatgacaaacataccctgagaaaacccaccttgtcctttcctttgttctcttcctctttaatctttatacacacatatatatatatatatatttactaggtgattgttacgtgccaagccacgt

SEQ ID NO: 112333 - DNA, 2809 bp, Cannabis sativa
  modified_base (2783)..(2784): a, c, t, g, unknown or other
aaggctggcagacacagagaaaggttggccaacacatagaaaggctagcagacacatataaaggctggtaggcacataccgaggctagcaggaacatacctgcttggccaggccctacccgagcaacttatccaaacaactctaaacagttgagcaaaattacaggacaagtctaataacccacaaaaataggaattttccctcgagatattagtcttaatttctaggattttagttatctttttttgtagcttaaataatggataaaaagatgttaatatccctattttaaggggatatctttacctatttgaattaggatcttttgtaagccctacactacataaagagcattagatactctttcaaggctaagtcattccacaggcactaaagggtctctacaaggtcttctctcatgctcccttaagcctcatacacgtgtgaagcatttctctctcaatcctcacattctatgaatgcctcctagacactaagtcaagtatcttcttatgtccttcacaagatcttatcagtctttatctgtaacacattgttctctcaattttaatactaaagaaagccatagctagaaatcataagattttcacctatgatatgcatggtattaactcaagagtgaatacaactaacgagtaagtaattacctgctaagcaagggggtcgaacctctataaatctttgtgttacttttactatttattgttcttatttacacatggtgataatcaataattaataaggctccattattagttgaccaaattccgaggtaataggtacatttaggtggtttcacatttttccaatatgtattgtttggagaaccaacataagtagccgacttattgttaagatattgatcccatttttctatgtttttattgagtttccaagggaatgctagttagtttttgttagacccattttgtccattgctactttatcacacaaacgacaagatatattaacattagtattttcaaatattttagttatgttttcttccacttccattcatttagtataacattcaaatattagtgaaaatgggctcaaaattatcccatcaatagatctaatagaataattttaatgacaattacaatttttttttccaaataatgaatagagtgagtgaaagagttaacaacaacaataatgtacagtatacttttaattcagcaaaaaaataaataatatacttttagtgatgataaaaagtttttgccaataataatgtacttttttttatcacatgttgatagtgaacgtactaatatttaattgtttgtgtaagcactttagtcaggaatggctggaggattagaaactctatgtgggcaagcatttggagcagagcaataccacaaactgggaacctatacttacgctgccataatctccctctcattgatttgcctcccaatttctgtcctttggattttcatggacaagttcctgtttcttgttggacaagaccctttaatatccattgaagcttgccatttttcaatgtgccttatcccgggtctattcgcttcagcaatcctcaagcctttaactcgatattgccaaactcagagttcaatacttccaatgcttttgattacccttgtggttttagtttttcatattcagacatgttggattcttatttacaagtttgaaatcggaaagaatggagcggctatatcaattagtttgtctacttggttgaatgttatgttattggggttttatgttacgtattcttctgtctttgagaaaactcgaatttccttttctaaagaagctttccaaggtgttggggagttctatcgctatgcagtcccttctgctgtaatggtttggtaattttttcttttttcaaattgtcttttggtatattgtatcttcatttggatatttttttacttatttacgttgcacacttgtgaaatatagtcttaaatggtggtcatgtgagctgcttattctgctatctggtcttctaccaaatcctaacctggagacttcagttctatctatatggtattttctgaattcagtatatatggtttacgttgtttaggaaatataatgtaaggataaaattggcaaatttgaagtatcaagggcaagggctagctgatacaatattattaggtgcatggtcataacctgtataggtctatgagttttgagtaaatgaaatgagcctttctaattcttagtcatattatttactaggttgaaaaagccttaaatttataaactaagtttttcgtggtgcccaaattttaatgtactataaccaatctgttaaagaaattgtgtgtcatgccttgtcaacagtttctagttcccacattatgcataaataccaacttatttttttgtcacgtaaaagttgttttaatttttataataaattatatattacaaatttaattacttatattgtttcttttggatctttctaatcagcctaactatctcaacattgcacttcaccatatcatacggtgttggagccactacaaggtttgcctcttaagtctcttaatgcattttaatttttgttcattttacttatgttcacataggagtgtgcataaatcatccaatctaatgacaaccgatcgatccaattacaaccaatcgctaaacatttgatatccatttgtgatttgatcggattggatgttatttttgaacatccaatttgattggataggatgttggatggggtgtctgaaaatccaatacatccaacatcnnatcgaactaattaatattttcattt

SEQ ID NO: 112334 - DNA, 7437 bp, Cannabis sativa
atcgaaattcttcgattagaagatttctatgaatgcctaaatgaggggggttggtttacactacactgtttttctttgaccaaattttttcaacaaggtttataacgaagcatttcttatgaacatctgagaagaagtattatgaaatattatatatggatgtctaaattaccaaattaattattattagtaatgctcgatcgtattttcttttattacattgatttagttttccattcttttagttatatttttgtataaataaagacttaccccattagaataaacaatcgaaaaaaatctcattcactctctcattatgttattctctttgccttctctcttctcctatttttttttttatttattctatattattttataataaatactaaatcatagctcaaaatagttttcacacaaacctggaaagaaaaaacacatttaataagcaatttaaactttgatttcaaaattataaattattcaaaattcttactttaagaaacaccataagaaacaccatcattactcttacaaatactcttacaaaaaaaaaaaaaaaaactaccatttaaaaagggggtaaaaaaaatcttgacttgtccataaaaaaagtgttttgcccacataatctccttaaaataaattgtactctctttatttctacttaattacttgtactagttagtatatggccactcatattactactacctcaacaagaccggcacctataattaaaaagaaaacaaaaattatagttcgatcgttattgggtattatttgtgaccattggattcagtatccatcccttatgattgcttattcttttgatcaataatagagttccataattaatatacgtatatatatttttgtgtatatttaattaataatacataaaaatgataaacattaattccagtggctttcgtttcattgatgaaatgcatggaagaaaatagttggccgatggccgtagacttattaattctgatggctactattaaataagtcttcaccacatgattactcttccaaacccaaacaagcccttttgattaaatgtcactcttctattcacagaagaaaactattttaaatttaattttattgtctaaccccaaactttcaaactttttttttttaagaaaaaagaaactctttgattgtcaatttcacgttacaccaactcaaataattgaatgtatgtagtagtagtatgaaaatgtgatgaacaattcaaagctgctagatatatgtactgactagtgagtgtgtggtcgtttgaattattttacaaatgttatttcaacaaaagcttttctcatcatgatttagttttgctaattattatttggttgtagatggacaatcaaagggggccagaagagcactttacaacagtgtttctgcgttttcctttttgaaaaaaaaaaagaaagggaaccagcaagaccacagcttcttttttgaagctgtcaaactagcttatagcctggccatacaaactaattaacaaaaaccacacggcttagcactgacttaacagttaataaatacattttaaataaattagttttgcttaaattatatatgttattgtggtatgattggtccaactgtccagcttgatattttggagaatagcatgatttggggacacaagtcattttctaagctatataatttaatataaccacaacttgtaccctaagtaatttttactaaacaatcatctcattatacaaacttttaatgtgtgtgtataaataggaccaatccacattgcataacattaactttctttgcccaaaaaaccactttctctcacactctctctccttctccctgtttcaaaggagctctgtttattaaagttgaacttgatttttaattttagatcataagatcacgttataggaaaaaaaaaatgggagtccttgaccatctgtcggattatttcacaatagacagaccaaggaagaagcgaaaagcaatgcaggtattaaagctcaacaaccattttcttttatatgtgtgtatatttatataatctatttaaattaacaagattcactcaatagtaagtagtatataaaaacgcttatttctttggtaaaattgtttatgaatacagacagttgaaatcaaggtgaaaatggactgtgatggctgtgaaaggagagttaaaaatgctgtcacctccatgaaaggtattccgaccttgtacttcctctatcccttaacaccatatacgtctttatatgtacatatacgtttatacataacatagtaatacatccatatatgttcatggacttctctcaaagtgaaaggtttttaataaattaaaaccttaaaatgaaatactgttaacagaccttgactggtttttccttcacttggactttaaccatttattacatacaggaaaaggttgttgggcacaggccaatgataataattaaaatataaaagcgtggaaataattttcaaaacttattctcaatatctgaggaaatactctgcaatagcccgaagacaatttcgtgttagcatacttttggaaagatcaataaataaaacttttcttctgaaactactaggtcaaccactacacacgtaccttaattgcagctactctttcacgtttaccctttgaattttgcagttttctcacttatttgatcctttaataaaatttataaatattaatgttgcagcacttattgattggtggcagcagcaaaagatatcccaattaatcttttaggctgtcacataaaataaaaatgaatatataatatatgttaactgatagagaggtttttaattaaaaaaataataataatacaggagctaaacaagtggaagtgaacagaaaacagagcaaagtaacggtgacgggttatgtggaggcaaacaaggtgttgaagaaagtgaagagcacagggaagaaagcagagttgtggccttatgttccgtacaacttggtggcttatccttacgtggcacaggcatacgacaagaaagcaccgtcaggttacgttaagaatgtcgttcaagcccttcccagtccaaacgcatctgatgaaaagttagtcaccatgtttagcgatgaaaatcctaatgcatgttccatcatgtaaatgtaaatgtaaatgtttttaattattaaataaatccaatataaaatagtaattagttaagaataggattatatgttttatgtctttttactagctccaaccttgtacgttctctgagtttgtttttagttaactgggcgaaagaactttttctttttaatctttttggttaaactttgtatgctgtgcattaatattagttagctttttttaatcatgttctaatttttatacactttactctaattttttatttgattattgctaattacaacatcttattaacctttacactcgaaatcacatgcctacttattatagttacaatataatttatataaatttttgaaaaattctgaatagtttacacagtaaacaaaatttttaatattccaatctactacatgtgttcacaaaacatcaaatttatttttgacactcgtacacgatatagttacaatataatctctgtaaatttttgaaaaattttgaatagcttatagtaccaaaaactgaatttctgatatatttcagtttactatatgtgttcaaaaaatatcaaacttattttcgagactgtaaattattcagaatttttttaaaatttagagggatgatggttaactataacaaacaccaacatgaaaaaaaaaaaaattgaaaataaagtattttgacatgtgttttcaagcacgaagattaacttcaggtttttttgtgtgtgtgtgtggcaataccctcgtaacttcagttttctttgtaaatttaaagcgcttgttaaataagattgccactgtgtacacctgtatacatgtgacaataaaatctcgaacacaatgaaaacatgatgtatacatacgtgcacacaaaaacaatctagttggtatttaacagtgaaatttaaatctttacaaattagcaaagaaaagtgaagttaagggagtttagccacaaaaaataaaaaacaaggagttaaatgtatacaattaaaacataaaagagttttaccaccaattatccatttataaaggtgaattttgccaaattaaaaatacatgtgaaatactaaaatttacaaaataacctcacttaatttactctatacaaccatgatggtcgtacaatatacatctatggtcattttgtgaccataatagttgtttacggtcgcacaatataattcatgatcgtttttgtgaccatacaatgtgctaacctcacttttagctaatgacaaagagtcaaattaaagcaaattaagaataatttaaatagtaaatatgaataatataaaataaaataaagtaaacaccagaattatagaggttcaaccctttgatgatggtaatagcatactccccttttgttgtattgacttgtgagtagatgaaaaagaaagccaagaaagtcttgatctctctcgaaagctcttacaatgatctctgagcatttcactcttaaatctagatttctctcttgtattttctctgaatgaattttgtgtccctgaatagtgagatgattccactatttatagggattaattacatcaaataggtttcccaaaatcaataaggaataaaataggaaatatgtttactctctataattacgataatcaaaatgggaaactaggtaggtttcatttcttcttcattactacgagtttatcccatgaatttatggatagtgtcgtgtcttgtaagcatgaggatatataggatatacctctgaagatatccaactcgtgacctctggtcggtacatgcaaatcgctcacatgttggaggttggtcgggtgtcctcgcacgtcttgcttggatgttccaaccgctgctgacttttagtatctaatctcactgcacagttcatcaaaggtagaatgttctgttcagttgatgaagcctaccacgtgtcagtcaagtggatgccacatcaccttgtatataaatttggataacatttttccccaaggttcgtgtgggattttcttggtcgtacatggacttattcggctatgaagctaatcggatgggtgacgtgtgtacaatttttacctttgatatgacgtgattgatggagtgactctttgctatttggagcattgaatgccttatattgaaagttgtaccttgagtcacacaatggcatttatgtgacaccgtatgcatgacgtttgtagtgttctaatgagtactaatgttccttttttgaggggaaaacccaaaagttcgaatttcaaattacctaattatctctctaaatgcttataaaaagggatttaagctttcttgacactgttttagcaattttaatcttcgaaccatcatagccatattttcctttttcctcaaaaatcttcgaagaacactctattggaaatcaatctttaaaaccgtcctagcacactcaggaatctacaaacagtaaattatctaatttttttcttatgcgatttcctttgaatacatgcattacttttctaaattttactgtaattttgggttcttgaatctattcatgactggtatgagagttaggaaaattagagcattaaacttttaactaatatacgtgctgattttttatgcttctaatttcttgccagtttggccagaaattatctaaaattatccattcataagtttttgagtattaacattctttttaaacccttaactttgggactttcattattggagtgaaattccttcttttttctttgaatcgacctggtcggtatatccgatatgttttaccttcttttcctctatctatctctcaccctttctctcctttcttttgtagataaaccctgatgagttttgggaaggtgaacatcatatcaaccatgatcttttttagattctctacgagaatcatccttggctcggtgcaaactcatcttcgtctggtgaaagctcctcaacttcaaactttaacgattgggaagttagtagtgatcattttgcgcctttggagcttgtggtgaaacatcatcaataccccaaccaaataagcggagagggccaagaatggttcattttggaattgaacaaggattagacgtattatctccttgatttatggatgaacaaggctgacctggtaaaatcgatacactaacagaaggtcgaccaactctattggccagatatactgtagtagcagacattgctattactattgcgaggcgcacctctgaattgaattcttcatccaagcataaagggatgtgaaggacaaaaaagaccatgaagaaggctttgaagtctgacccccactttgcttggctatttgcaatggatgaggtagagcaggctaggcctctgagcgaggatgctgaagttataattggggacgctgaagactaggagattgaggaccagggaaaggtccatctacttggtccctctaacgtcgaaggagaagaagaggatgatgtaattcaagtccttccttttggaggctctaatgaggctaaagaacctgtctctaaggttggtgatgtcttggttgcgggacaagactatgtcgatgagtaacacaaggagacccgacccatgagcaccaaagggacctttcttgagcttcaagactctcataggcgtcctggtgggattgattgactttggtaacatatttatagtattactactcatacttttgattagcctcatcaagcacattattacaaaaactcttagctctccccttgatatctgtgacatcaactgtaacttgagctttgacattttcaatctcagaggtcagagtttagtttttagcctagacttgctcacgctccatgaccacagtgccaacctctcgggaatccccctccgccatatggcataacaaagcaacataagacattatataatgcaataaaaaacctaaaatgatgtgctcaccccaacggcctattgcttgcgtgcatgagtcaatgtgactggatcagaactgctacacactaccaacttcttggttgttgaatcatagatggtatctgccacttggtcgatgagttgagtagaaaatggcaccaagtcgatctcaacactaggtgcaaaatacctgttaagtgcatggcaatccaacacaggtctaggacccctggtgcgacctttgtcagcaaatatttccttctagattgaatgaggttgctcctcctctaagccatcaccacttcctcgctacaatgcctttttagatagcgatcgatcttgtaatggccgctttagtaatttggattagcaaaggcaattagcactaattattg

SEQ ID NO: 112335 - DNA, 4512 bp, Cannabis sativa
aagttcaaggggcacgatttagtacatgtcaaagttcgggaagaaaaattactaataaacttctttgaagtgtaaaaataaaaaaaccttccttttattttgattatattaagaaattatacacaaattttatatgataatatatatatatatgtgctttaaatataagtattctgcttgttttatttttttaaaaagaaattatacaatttattaaagtacccaaaaaatatagagtttaaagtgaatagcacgagtgttttttttttttaaaggaaagaaactttcattaaaccaaaaacgaaaaataaacaattcaattagtagccacaaagggggctacctccctaaccacagacaaacggcttaaaagattcactctaacttggaaagccagaaaatgaacaaaagagttctccacacggggaagaaacttaaaagacaccaaactaaaattgacagaaaaagccaaacatttcttgaaaataggataagacccccaagccaaaggtaactctcctagcttgagggcctctacaatagccttcaaatccggctcaatcaaaatagaaacacatttttcttcccaagctcgctccaaagccgtgtaaatggccaccaattcagcttccagaacactactgaccatacaatgcgattgaatcgtgatagcattttataatccacaccagaaaggacaactccaatccctgcaacaccattgacgacagatgcattcgaacatcatagtcaattgatgaaaacctttgggaattagactttccatcttgaaacttagaatgaacatcaggagttagcacaatagaaactcatttaccctttttgaaatataattcagagtgtccaacaacataggggaaatgtcacaaaaaatgtagttgtttctgcaggactagatagcttcgaagagacatgcagcaaactgcattagttttttgtcattaaaactgcatagcgagataaagaaatcttcaaaagtttccatggcaagatttttaatctttaaccctagaagcataggaaccatagaccataggcaaaggaacacctgtagatgatatgaaactcaaattctaattcttcatcacagaggcaacacaaacagtcctaatgagcaaggaaacccaaaagctttttaagaggaagacaggtagccagaattttcctattgagaatagattgttgaggatggaggcttaacttccagagctccttccacacaagtttttccaaatgaaaccagaacttctgagacaatcagtaagcgcttttaacagttaaaaaaccattgcaactagtcgtccaaatcaaagtgtctacattttcctctaaaggataaatagagggaatggcaactgcaacatcaggatcaaaacactgagaaattaactatttatcccaaacacgagtaccttaaatgaacaaatcagccataaaagagaaagcatgaattatttgataagaaaagctccttcgaacctcctctagactgaagcctgaaacccacggttttgtctagatgtctttctcccccttcccaaccaaaaatcctacaccagcaacacagagatcccgaacctcaataattcccttccacacaaaggagtcaccactatttttttcaacattccaaaaatccagttttgaagagtacattgcacacaggacttgaacccagtggtgtctgttgttgttcaaaacaagctgagataatttagccagaagcgctaaattcatatcacggtatcttctcaatcccaatccaccattcttctttggttgatagagatttgcccaacatttcagagccaagtaatggttgcttgtgttattgtaattacttcctttccaccaaaactaagccaccaatctgtccaaatcagcataaatcgaaacaaaaattttatgagtggccatggtgtagcaaggaataccataatcgagtttataagggttagacagccagcctgagataatttttttgctttctgactctctaagtgattcaggactttaggtttgagaaaagagaaatcttcacacttttttgtagagagaaagtacgggtttcccatgtacttctcctttctacttaaaatatgtattctcagggtattcaagatcaattccttagaatcacttttgactttgggagaaaaaacaatgccactcttggcctcaattactttctgtccagaccaacgttcatactttttgatgcaggagagcaaatttgaggcctccgtagcattggctttgtaaaaaaaagattgcatcatttgcatagaacaggtgtgaaatagccatggcatttctgccaactcttatcccagaacaggtgagtagcacgagtgcttgtattattttatataaacgtttaactaaaactcaaaattattcaaaaaattttaaaaattaattattataactatgttaatttaaattatatcatataataaaatggaatataattattaaaaatgaaattcatccatacaaaatgatgcccttacttaaatatgtccctttatataaatatattttgtccaaatcatcgtataaatataatttgtattatatttatctatatatacatatattgaaacacgtaagagttccattgccttcctaaggtattttgattaattttaagaataaattattccaccaaatcatgaatgtttgtaattttttttaaaaatgtatcttatgctatatatgtattggtttaattaatgtatactattattattgtggtatagttcatccaaataaaaaagtctctgcaaacatcatttctagaaagttatttactcgcggtagccagttccagaaggaggcttgtggagtgatagtcgtgtccagaagggaattcccagatgattatcatgtccactccaggttcagtcttcaagatagctagccgtctcctcgaaagaagttccagctggttagttatctatcctagaatagtaattgcattttgtggagaaatatggtttccacaatcatttgaggtcacatgcttgatgccttcatcaatggaatgtgacaagctcctcccgaatttgttccagcaagtgtagcaacaagtgatggttaaccttaatttagggttcaggtgaatccagaatatgagcaatagattgtgtatgaccaattgctcatgggatgactctatggttctatgagagaagccatagctactgaagtgatgggttgcacttcagcttgtactctttggacataattgaaaagtttatacggagcttattctaaaggaaaaatggatgatatgagaatattgttgcatacaacttgaaaaggctctacaacaatggtagaatacttaagacagaagaagtcttggtcagattaaattgctcttgcaagtgacccataccctgaatctcacctagtgtctaatgtcttaagtggattggatgttgaatacatcacaatcgttgctttcatagaagcaaaaaacaatatcactcttgttacttggcaagaactcaagagactctcttgagcttttgcagaatgcttgagagacttggaggaattggatcaaccaaaaatcaaaactccaataactcttcttcaccatctaccaatttatctcacaaatcaaatcaaccaaacaacaacaacaacaaaggaagaggttactcaccaaattaaggcaatggaggtagaggctatccttcaaatggaagaggaagcaataatagcaggggtggaagaggcaaaggcagtggatggaattcaaaaccaacatgcctagtctatggaaggtatggacactctgttgcctactgttacaacaagtatgatgaaaattttatgggaactcctccaaacacatctactggtggatctgatcaagagaaaaaggatcccaaagctttcattgctacgccataaactgtggatcatgaaaggtggtatgctgacagtggactagcaatcatatcaccactgatgcagatcacatgagtcacagatcaagttatggaggtactgaaaaacttattattagaaatggtaatcaactcactatctctcatattggaactggaaacttgaaatcaaataatggtgaaacactaattcttaaagatatgctacatgttcctcaaatcaccaaaaatctgattagtgtctcaaaattgactactaataatggagtttatgttgaattttattctaacttgtgtttttaaggagtgttcgcggtgcgagtggtgtggtttttgaccattttttttaaatcaacctggacatgcagtttttctaattacccaaactgaacccgcaccacaaaaactaaaaatccatagaaattgtaccccaaaaaatggtgcggtgcggtttctgcagtttttgcattttggattatcaccaaataattaaactatcacaaatacaacaaaacttgagcaacacctatcaaaaataccataaggcttgaaaataaatatgtaaaaa

SEQ ID NO: 112336 - DNA, 2886 bp, Cannabis sativa
  modified_base (443)..(464): a, c, t, g, unknown or other
  modified_base (521)..(521): a, c, t, g, unknown or other
aatagttcgggggaatttttaacagccaaaaaagttcaggagcacgatttactacatgtcaaagttcatgggaaaaaattactaaatagttgctatggttcaacattacaaaattgtggagggttgctataattttgcaaaattttacaaaggcaataattgaaggagaaaaaattatttgtaaaaataataataaaaaaaaacttgcatacctaaaattatcaatttcaaattactcttaaataataaatttattcaaaattaacatattacatgaacatagaccataggccagtggtaagatttgtacttctttcaatgtattttttttcaatgtatttttttttttttgggaattaccatatatactattttttttaactttttttgtttttttttcaaatttcggtttaggtttctaaaatggttgcagcgctagttgnnnnnnnnnnnnnnnnnnnnnnttttgttgcaatttaggttgcagtgctagttttaataggagtttctatgtagaattncgtaaaaatataaaaaaaaaactattttaaaatgtaaaaataaaaaaagctcttttttttagtaaattaaaaaaaataaggcttgtgtatttatttaatttattatgataaatatccattcataaacacattaatattttgacttagtgcaatagttataatttaatcccagttggatattttgaggttgcaaattgcaatactagtaggcatgagttcttatgatcatattcatatacttattcaaattaatcgtcagcagtgatcaaaactatttatttataattaattactttataaaacatagaatcaaacttgaccaagtaacatagaatcaaacttcaccaaactggaattaagcatcaagaaactataacttaataatattaatcaatcagattacttggcttgcaaattggttcaaataaatagtgtactttcctggaaaacaagaaaaacaattgaaatttaagttaatttgatttccctatgtatgtaattgttgtcttgttcttcttggaagttataacaattgtctctattttaaaacaattgtcttcttcaaaagctaccaaattaaagcgaagagtgtctcatagtttagataattgatagagccaattcaatcataccctacgttatccaaaaatagactttacttgtattgtaaatgcctaagataataagaacaaaaaataattagactcaaattatattcaactaatatcaatgtttggctaatgggctttacacatcaaataaatatatgtaaaatataaatataatatttgtcctacattgtttatgtggagggttgattttaggggtaggcaccgcatcctttaggtctctaaaaaatttattataatatataaatatttattaaaaattttcaaaaacataaaattaggttagcgtagcgatattttgatacattagacatttgctttaacctatttgaatcctaacatttggcaatgattttttcgtaaataattttattcggtacaaaattaaatgaatgtgaggttggaaccctaacttgaataaaaagtgttagggagctcaacactacaccaaatcaagtaaagttatattaaattttttagtattttaattaacattagggggctctttaattttatttcgccttaggccctatttttgcatgtacaaccttgctcatgtgtgaataatttgtgctatttatattatacttagtagctatcaagtcttaagctcataataaaatgttagtaattaaataaatggtatgtttggtgtgattttatcgaaatatatatatacacactattgagtataagtttattaattattacatatttttaagaaatagaaattaaatataaattttatcaattattacatatatttttaagaaaaattacaagtggttgggttgatgcaatgtcgttttttgttttttttaccatgtagtaagaaattttttaccactaatatgttgaggatttaattatcatgataaagtggagaatttgacaaatagtttaaatataaaggcttatttagtcagtattaaaatgtataattagaagattttttttttgaaaacataattagaagaattttagtaaataatgatactgttaatgaataattttaaactactttcagtttgtaacacatacataggtatgttttaatataaattaattaaaataataatacccaaatttgtactatcatgaattttatttgtttattatgaagctttaaaaatattatttggggattttattaaaacatttcttaaaaataaaaatattttctataattaataacaataatatttgtctagctaaggccgttggcggttctttcttcttaaagtcttcactgaatccccatactgagccaagttccttctttagtgggcaacctcaaattcaacacagatgcaactattaattcggtcgaaaactacaatggccttggcatggtagttcaagatgagttgggtaaggcgcgtctacaagttggaagatggttgtttggatccagaggtggcgaaggctttagctctttgcaatgctttgattcaatacctttctttcgggtatgaatgtatgataacatttattttgtgggattgtccgagtattattgtaaaagtcaagagcaacatgtcttttatttgtcgttgagacttgttttaaatgacatttttagtctttgtaataagttctaagatgttaattttattcattgttctaaatcttgtaatatatgtaaagtccttttttggcaagttaggtgacaaaataatttttcctttttatggtaagattgctatgcattaattttcgaaatcttacctctttta

SEQ ID NO: 112337 - DNA, 2384 bp, Cannabis sativa
  modified_base (2324)..(2329): a, c, t, g, unknown or other
acaaagtgataaaatccttaaagtatatttaagtttgcttaaggcagattataactgcaattgcgaggcagaattaacaactgctcgaaaatatgcgttgacaacgtaggtgttacaaacaccccaaaatggtccactgttttcccaaaacagtcaactattttttttggattcagccctggataaacggtaagctatttttcctacagaaacaacctaacttggatttgacaaaacaaatccagccaaaactcctccaaatcctgccaaacttttcagaataatttaaataacataattaagcataacccacaacttaattaccccaaaaatataaaaattaaaagtcaccatgagagctcaagcttgagctccatgaactcaaacttgaatccctaactaacaacagccacacaagcctacaaagaatacaaaaacatgatccaacattaactcaactctatagcaccaattaataaaacctaatccaaagacctatattttccttcaaaattataaagagaaaaatatggagctcatttaccttagcttatcctcaagagttctatctttggacaaggattcattgactaaaatgagataaaatttggatggaaatttttggttttcagcttaggtttctaagtgcttttcaagagagaaagaaaaggagaagaaaagttgataatgatgaagtcatcttgatttaatcctctaataacaatttaattaaaataaaagaaacaaacactatatatcaacttaatttagcctatagttacttaaatttactaagattaaattaaaaaaaccttagtgaaaggaacattctaccctttccttggttactaaaccaattctaagtttaagaattaattggtcataactaattaccctgaataaaacaataccaactttactcctcagtgtaactaacactaaacctattatcatcgtaacatccttgacaaatcaatcaagtttccatagtcgtcgaacctaaaaatattttattttaaaaatgatatatataataaatacctatatatcaaaattttcgtaattaataaattacgcttattaactcattttattataatctcaaacttcacgtaattaactttataaaatcataattttatccattatgccctaagtattccatttattttctatatttaataaaatattcaatatttaacgtaatttcatttttgaaatattataatatcccctccttgtagaaattttatgcgaaaaatttacctgaataactcaagatactgcttacgcatctacgactctaatttataagttgcttcttcaaccttgtcgttcctccacaacactttcactaggagaatggtcctgtttcgaattacttattcctttctatctaaaatctagacaagttgttccttatacgacaaatccgtctgaagctcgatatcatcataactaagaatattggtcaaatcacacatatttcctaagcattgacgtatgaaacacattgtgaactccagacaatgcaggggtaaagctagccgataggctacttgacctaccctctcttagatctcgaatggaccaataaatctagggcttaacttcgctttctttcaaaatctctaaattcccttcatagacaaaatcccaagaaagataaagttcccaacttgaaacttaacatccctacgctttggatcagtgtagcttttctatctactttgtgaggcaagcatacgagcttgaatcttttctatggccttactagttttctggaccgctttgggctcaagatacatcctttcacctgtttcatcccagtgaataagtgaacaaaacttcctctcctacaaaatttcatatggtgtcataccgatagtaatttgataactattgtatgaaagttctatttgaaggaggtacttattccatgaactttcaaaggccaacacacatgcttgcagtatatcctccagtatttaattagttctctcagactgtccatcaatctgaggatgaaaattcgtactaaactttagtttagttcccaaagctcattataaatcttcccaaaaacttagacgtaagctttggatcttgatttgagataatcgactttggagcaccataaagtcgaagtatctctttaatatatcattcatcatattaaactgttgcatatgtagtccacaatggcaaaaagtgttataactttatatatcggtccattatcacctagatagaatcatagaactctattgtccttggtaatctaagtacaaaatacatagttacacctgttgggttttatgccnnnnnnaaaactccatttcaatgtaatttattttatttaacatcaataaagaaacaaaagt

SEQ ID NO: 112338 - DNA, 3669 bp, Cannabis sativa
  modified_base (83)..(86): a, c, t, g, unknown or other
gtatttttgtaaatatttgtatgtggactgtataaatgtttaatgggccggcccaaagtatttttgtaattttttttcctttnnnntatttttctgttttttttccctaaatataattagtaactttcgaataaacaattcataaaaattaagcatcttccactaaattagtttcaaaaccaaccaaattagatttaccttttttagcattaagagatactttttagtgtttctcttcgactgtcccattgagtcacaatggaagcacttgcccttgggttccttcttcttggacttgggcctctcttgttcttcttggctttaggtgctagcttgcctttcttgggcttgctactttgtctttaccatctcattttttttttcacttccacattgtttgattcactcttcttggatttattattgttgaggttttcaaatactgtcaattcttaaatattggaaggagattgactcaagaataatgaataatgctcacttgagtcctctcattgatggtagccccatgtgtctctccctcatgcatcaattcaatcatatgtaatacatgagttctcacaggtatatccttcttcatcttagtatttatgtagctataagtagcatcatgtctactttgaccagactattgctcaacatagcatagagataatccattaatttataagcattctccatttgttcatgcgtttcccgtagaacattatctatgctagcaagcaaaaaacacttgtccttgttgttggattgaatccaagaatctcatatttgttccgaacatttttttaagcattggcattgggctcctcaagaaactcttcaataaagaaaattttttggttctcacaaatcaaaatcaaattcaaatttgattttatttaaggaaattatcaacattaagtttttgaagcactaagaaaaaaagtaagaaaatttgacatagtagacatgagtgaaaataaataaaatagtaattaatgtatttgaaaaaaaaaatatctagttttgaaaaaataataaacgtgatgcatgagcacaataatcaaaacaataattatttaagttcttccacgataaaattttttaacaactaaagtgttgtcttatgattggtcaaattaatattagatctataagacaattcttatttttattattttgaaacttaaatatctcatatgtccttttcaaaagataaagtactgttttttttttagtcaagttagcaactaatcgcaagaaagcatagttgcattttgtgattgtaatatattatttcaaatttcatgacataacttagtaatgtctccttaggatcagtcaaactaaaatacactatatcctcctcttattcaagaaatcaaccatgtttaaaatgatggaccaacaccttttgtaagggatgaaaataaagtcatcgcgaggcatgtttcatacacaaatgtcgtcggccaataatagagatctctggttacattgacatgtactttttcctccacttactattttaagattaatgcgttttatcattaattctcagtattaatacatatttactcttttatggatgtgattaatttatatacaataaaagagccttcttttatttataaataaattttcagtcacttctaataaaatttatttaaatatcttttcaaataattaaattaattttaaattactaattaaaatttagtaagtttatatactgttgattttaaaaataataaacacaaaggacaattctaataattatgtttctacaataagatgcacgataaataactgtgtggaattttcatgtataacatattatttactaatgcatgatcatattatcaatcaactatttatcaacatttatttaaaataaatacttaaagaaacgatgaactaggtgactactgtatatttctattttacaacttttgaaaaaattaaacataataagtaattacaaaataagcccatcattgattttctctccataagggcaatgttttttacttttgtaggattgttttaagcccttaaattaattaaaaataattttaattaatttatttttaaataaaataattttaattaagactatttttctttatctcatcttctaattatattaaataaatagtaaaacacttttattatttaattaaacttagaacataatacatcataattaattaaaagttgttttaattgaattagaatttaaattaaagcacaaaataatttatcttaattaaaataattaaaattactatttaagagacacaatattatttttaaaataaataataaaaggaaaaattgaattggggttgccaccgaataccaccatcgtggccggtggctccaagaggagccagcagggccataacacacctgacaaccaaggggctcgatgactcgagacccgttagggtcaatggcacgacatgcttccaaacggtcataaagtccatgcatgcaagcgcatcccaagcgagaatgaccagtcgggactaggcgcgagttaagtataatcagacttagacagtccttggtgtctcacatagcagaaggaccgaaggtcctacgtgttggaacttttgctagtatcttaatttactaacaattatgtttgattataaatattataatctaacatcctaatatatgaaattcatgaagcgatatataaacacataaaaggaatagaatcttcacattggttgcaatagaatagattgacttcttccgttcaatcactctaactctctattctcgttctgtagtagagtattttcgagtgataaacctggattgcttgcttaaactcgataagcgacagttttacatagacttccacaaagatctgagtaccaccttgaatagtgtggatggtactcaactcactaacggaatgaaatttgagagagaaaatagctatttttttttatataatagaaagaaacagagagagcttgtcaaggctaggataacttggaatgacttatgatcacaaactctcatctctttctatatatagccaacatactagggttagattagatgaaatgggctaaaataaaaagccatggccaaaattcacatagaatggcccatgattataatttttccactttatttcaacttaatgaaacaaaatgtcctttaatcaattttaccatttatctaatttaattatttaaataccaattaataattaagttattatcaaacaaaaatataatttaaatatatttattaattaaacccacaaagtgtcttaattaacaaactaaccattatttctcttttcttcttaaacttgtcaaaacttagtgaaaattttcaaataagacatagtctattttcaaattctaattgacctattaaattaattaattgattctacaaggcaatattatctcaaataatgcgggggagtattggcctataaaatcaaataactagggcttaggtttaaattatatggattaaaaaagaataaaataatgagcaaatattacacatactggccagccactaaatagccttttactagttacaattttgccactttatttcaaccacttattcttctttcaataatgtcatattttttaatttcaatcttataaatgccaaaactattca

SEQ ID NO: 112339 - DNA, 7867 bp, Cannabis sativa
tgatcctgaggctatgtttgatatcatctcttcctttttctcaaaccttttttccactgatggctgtgatgctgaggctactaatcatattttagattgcttggggccccccttgaggaatctgattatgagttttttactcagcctttcactgctcaggaagtgaaaaaggatgtttttagcctctctggtgataaggctccttgatttgatggtcttaatgcttttttctaacagaagaattgggacacttttggtcatgaactggtttctgtggtattagagtgtttaaatggtcagattgacttctctgccctcaacagtaccttacttgttttgattcctaaaaaacaacatgctaatactatgaaagatttcaggcctattagtttgtgttccactctttacaaaatcatttctaaggctattgctaatcggttaaaggttgttcttgacaaaattatttccccttgtcaaagtgcatttgtttctgggcgtgttatctttgataatatccttattgcccatgagcttgttcatgccattaattctcgaaaagttggtaaaaggggttgggctgctttgaagcttgatatggccaaggcttttgatcgtgtagaatgacattttttggaaagtgtcatgtatcattttaactttcctatcagttttgttactctaattatgaaatgtataactactactactctctcttttcttgttaatggggaggttaaaggttctcttaagccttctcgaggtcttagacaaggggatcatttatccccttatcttttcattctttgtgctgagggttcgtcttctcttcttcgagctagacaagatgctcatctccttaaaggaatttctgtgtctaggcatgctccttcaatttctcatttgttttttacagatgatagtctcctcttttgctctgctgatagggattcttctttagcgcttcatgaaattttccatatctattctagggcctcgggtcaagccattgatttttccaaatcttccatccttttttctcctaacactgttcaggagattcgtactatgttttttgacactcttaacttggaagataagccttttatatctaagtatttaggtcttccccaatgtctgtctcgttctaaattccattctttttcttttcttagggataaagtcgcctctgtactttttgaaagctgtaattcaggctatccctgcttatgcgatggcttgttttaggcttcctgttaagctttgtaagggaattgagactgcgatggccagattctggtcgggttctaatggggagtctaggaaaattcattggaaatcctggaagtctctttgtaaatcaaaattctatggtggtttgggttttcgttctcttgttcaattcaaccaggctatgttaggtaaacaagcttagcgtattcaggacaatcctaattctcttctcagtaggatccttaaagctcgttatttttcccaaacctctatccttgctgctgcccctggtcacaacccttctttcactaggagaagcattttatagggtagagatttgttggcttcgggactcatttggaaagttgggagtgggaatgatattcacaccataactgaccattggttacccaatcataaatttaaatcttttactggtaatattgatcctccttcacaatttttatcttactttatttctaacttgggtacttgggatgttgctaagttaggtacttattttaatgactctataattgctgatattcttgaagtgtcggtctcagggtgttatggtagagattccctgatttgggagaagacaagttcgggtatttttttctgtgaaatctgcctattacttggctttttcttctctggatcttccttctttttcttcttctttcacttcctcaaaaaagttttggtctcatgtttggtctcctattatccctcccaaggtcaagttgtttgtttggagaatgctatctaatgttcttccagttgcaacttctctttttactaggaaagtacttgattctcctctttgtcctctatgcaaacttgctcctgagagtgttaagcatgctatgctagattgctccagatccagaaaggcatggagatcttccaagtttgtttcttataatgatattaataaacacatgaatctgaatgagttttttatgggccttgttattgatcaagataaattgactcttagtattttatactgttttttgtgggctttatggaatcaaaggaacaatatcttacacaagcaattttctatccctcataaagatatttttgattggagtcttgcatattttttttcaacatttggatgtgcagcaaagtcaggtgccaagaactggtccagtttgcaactcaacatcagcaacggttcaaccatctggttcaaataattttaaaatcttcacggatgcagccactgattctcaaagaagaaagcatagtataggattggttcttttggatggttgtaaccaggtgaaggcagggttctctactcctttttctgggcttgttcctcctgctgttgctgaagccaaagcttttcatcaagctatccaatgggctcaattgcttcgactttcggtggacgtgttgatgacagattgtaaatctataatagataagcttaattcttgtaattggaataatagtgtgtttgatgatgtaatatgtagtattaagaacttattatcgttcaatccgggcctaaccatttgtcatgttggtagggattttaatcttttagcacataaggtggctaggatgggcctaggattagataatgagttaatctggaatgatactctactttccttatagcttgtgcttttgtcttgtttgtagcacaagtttctgtccaaaaaaaataaattattttttatataaaaaaatatctgagtaatttttcttttattttatttaatatttgtgatgcaacctagttaatatatatgccattgcatatgtaatgagattacaatgttcaagagcctttactttgaaaaccccttgaaaacccctctcccaagaaactcaattagtaacgaagatcattccttgttcggaattggaaccagtaatggcgactgataagtctgttattgccgtgatcagggcctccaggccgtcatttcgtaacgacttcgacaaacttgcttttgccgtccacgcctctttcctttcttctggtttcgttctcactgctaccggaacccctgcattttccgatactgctctctcttcttcctccacctccggtaataatttcccaattcttatttttcagctttatgtataatttttgttgattgtttctttagtctgactatttgagtttgttttgggggtttaagatgaggtgggtattgatggctggaacgatgttgatggtgagtacgcgtttgtctacacaaaccctgagaaggtttctcaaaaagtattggtgaaatgtcttgtgatgaacgacaagttgcttgttgatgctttggctgatggaagctctgaacctgttcatcttgaaatcaagtgggtttttcttcttcatcttcttactttcgcaatttttgagaaattgagtttattttatgtacttacttcttatgggagaaatgagaaatgtgttttgggaaaattaattatttcagtgttggagactataatgtcggagaaagcggggagaccaattactccacccagttcaagaatttggataagctggtcaagagcctagattcagaaattttctccaaattagatgggtcttctaaagctaactcatccaccaatcttcgaaggtatcatatcaaaattgcccctttattgagagcaaaattatttcagttgcggttcatgttttgtatcttgctacctaaaccaatttattgctcttttttttttcctttcaaattagttaattttttttttattgtggaaactggaattgaattaactaagcctgaaatttgtaccagctttacttttctagccataagttgctgggttttgattgactattaattgttcattgttgttattctactctttgcattttccaatctgatattatatttatcaatatgtctaaagattactgactgtgcatttcccatgtttagcaatttttttaagttttatgcttctttccgaatcttgaaattcaccactcgtaactcctcgaagattctagttttgaactgtgaattttgagtgtagagaacaaagtaagaagtgtttttgttggtacctcctcgagtgtagctgttaaaaagtaacacaataagaattcactgtcaatgttcttaattgagagatgattttgaagctggagctgtgcagtagcattttagtgatagtcatcttatgtttgcttctcactaattgtctgttctttttttggtgttatttgcagttctggtactagggaagaatcaagaaattatgtcaatgaacctggtgctagagctcctgaatcttccagagatcaaatacacccttcagggtacactctctcttcccacacacacccacatacgcctacactcttcttcatacatttgaacacttcactgttacttaattactaatgacaataacagaagccttttctcgtacttattctttggtcagaataagctgtaattttttttttttgataaatcacaccaaacatagcatttattcaattaccaaaaacctatcataggattaaggctttgtaggaataagctgtctgtaagttgtaatagtcttgagttcgcttttcagtaattgctccatataattgaataacttagctaaaagcttgttttgataatttggttaaatatctctggaaatacactagatcggattgttatgacacggttaaacctcttgtaaaaacatttgacaaacttcacatggcacactcattgctttttattgggataacagagtcccatgttcagttcttcaagttgttgcttaaagccaataaccttagaatcactaataaacccaaccatatcaggtagatttttatttgattctcttaatagtgtttatggcagtcacaaaatgttaggtgtcatgtactttgttttgattgagtaaattcaagtgttatttgagtttaatgcccaaaaatactggcgataggctgaagggagtctgaattgatattatgagctcgttttttttagtatttttgagtttcttatttcttattaatgggacttctggttgatcattaatctcaaagcaaggaaagagaatacaatgaggcagcaataagtatagaaatatatttttcattgaatgtatatttcagtagctcctcttatgcttgttgctgtatgactaaaaagaacaaagatctgttgacactttgtctatggtggttttaatagttctgttactgtttggacacaaaattttatggattgcacaacttcagtattagttttttcatataaacgcaaaaggtgaaatctctttgttgacagaggcaatttagttgtacaaaagaacctagttattggattaacatttttctggctgtttgaaagcttgaatataaaagcttcaaacttttgattttctgtatgccttgtaaatgccatgatggcaggatgtgttttggaaaaatctaggataggccataaattttaaatgtttgtcaaagttgataatatcaattgccgaggcacagcttcttgcacaggacatgcaaaatctcgatgagtcacataccgataaagtcaacggcagcgtcaacaatttgaggaaaattgaagataagttgaagcaaattctaacagatacagtagttgacaatgccatattaaggaagcaattcaactcagttatacgatgtgccctgagaacaagttccaaagataatgataatgaggaggataccacttagaggagatccgttcttagcaaatttttagaaaactaactattgcaaaaatgtaaattctgtcctatgttcaataagtataaaaataacccacataattttagtggttattttaaaagaaaaaaatggtgatgggtcagtagctgagattgtttgaagtaaaactgtcaataagggtattgggaagttgttcatatcttcacaaattacaggaatgtttaaccattctgtatatctcccataaatttagagccattttatgtgctacacttgtagattatttatgtttgattgtctactttatttgttcttctacacagttaacttaataacaggcatcgtggggtcattcttttttcataaattaaatccctgtttggttgcagatttgtatatcctcctgtttatccagttggtggtagtgatctctatcctggccctggcgctgggatgtatccacccaggtattctataatatgctatttatttagtttagtgtttatttgtttgatttctacataatggtgtctcatgcttgcattatcatgtcttcttaggggtgattttggcggtggaagcatgcttctaggttagtaactttttttccttactatttgtgatgcaaataaacactatatggtttctgcatacttacagttttgtgcatcatgtggaagcagggcctaatgaccctcgttggtttggtggaagtggagagcctgatttccctggtggactaccgtgagttttagattgctctctttgctttcccctttttcatacatatttatcattccttgtgtggttctaaaccagttcggtcgattgaaacaggggtgtacctccaggtgctcgtttcgatccttatggtcctcctggtgttcctggctttgagcccaatcggtttacaaggtacataaaattaccatttaaacttgactaagtactcccaacatctatatttggttctagtaccatgtttaaacttgtcatgagcaataaaatatgattaattaaatgaatttatttaaatattggttctaccatttgttacaggggtccgcagaggccggggagggggactcatcctgaccttgaacattttggtggtggctctgatttcatttagagatgccatgaaaactctttcttagtttctgtctccacttttttccagagagaatttacataaatatacaactctatatgcatattacataaagaactgctacgtgtaataagtacagtaggattaatagcagcaccaccagatctttttgaacatgttgttgtgtttgctcatggtcatgaggtaaaattaatctataataatgtcattaagatagttaaggcagaaatccaaaaatcgaattttatttaattgattttgctgtttgtatatatatgcttcttctgtaaataaacaatatatttttatttaattttatatttggggtgagattatttaaaagttactcatttccccttgagaatgttttattttgaattttacaattctaactccctaaatttagaacaaaaaaaagctggtttttcttgtcggatcaggcccctaccccagcgggtcaaccctgtcccagtttattagacctggttagtagaaattatattgtatatccattttactttatctcttttaatttttacctttatttttatattatttaagatcaatccacttttatagatgatgttcttattataccccttaaattaatgtaaattatgtactagacttaagtggagagtgagcgtacaatccactcataaaaatggatatattttaataaaatataatatgaatgtatttttgattaaaagatacaaaaaagaggtatttttcaacttatctcaagattcataattttctttttattattattattttaccaaata

SEQ ID NO: 112340 - DNA, 2179 bp, Cannabis sativa
gtcatgacttggctccttcttcattaatttagtcccagtatttttgtgccacgtggtattattcttgacacgtcatcgtcgtcaaaatttgggtaaacaactacaccaagtatagctaggggtatacccaagagtagcttttaagaaacttgtctgtttatagtatttggctttcaaaatcagagcaggaagaaaatcaggaatcattaaaatgcaccaagcttgtgctgccaataatgcctgattatgatactcaaagttcctaaatcctagacccccttgaccttttgaataacacaatttataccaagccaaccaatgcattttcttatctttttctgagccactccaatagtatcgtgccatcatggattctaattcatcacgtgtattctttggaattcaaagcaagacattaggtatgtaggcattgcttgaataactgctttcaataacacttcacgccccccaaatgaaaaaagttttgaattccacgagtgaagttttgaccacaccttctccttaatttctgaaaataatctttgtttgttctgcccacttgacataggaagccccaagtatttctctattgcagaagtgactgtgatattaaacgtggatacatagagatctttgacattgtctggggtatttgtagagaaataaattgttgacttggtaaaattaattacctacaattacaaaatatatagtttgtctaataaatattaattgtaaaaaatgagccactcaatcatgagaaccataatgtagttactcaaaagtttttgggtaaatctgaacagaacccctatttattatagtgttttttcctccatatttttatttattctcaaagtcacagccacaaaataagaacaatctttaattgctatatacattgttaattcatccaaaacttaattaacatccacaactatataaaataattagaaataccaatgatatatttttataccaatgatatataagtttaaaaaatatatgaatattttaatataaattcagttttcaagagtcaggtatctttaaattaaagtgctataacatttttttaatccaatttacttttatttaaataattctgaagaaaatatatatacgtaatattagattcaacatgttctgtggctcttttagcttggctagcaaaaaattaagggtcttgggtgttgtcttcagcctgtgtctcatcaacacccatctcaaacaggacctctgtatgtgatggtccgggcatacgcctcttcatccgggcgaggatgtagccccttcatgactactaatgtctgtttaacaaaataaatgcaaaataagtgttaataataattaaaaagtcatttttttcaaatcatcaaaaattatcaacattctgtcgataagatatcgacaaactcacgacacttaaataaataaacacaaagagattatcgagaatgcatcgacatatcgatatcatattgacacacataaaatcaagcataaaaacaaacacaaagcaattatcgacaatacatcgacatcctatcgatattatatcgacaaacataaaatcaagcataaaaacaaacaaacataaaataattagcaacagtgtaaggagtatcgacaacctgtcgacaaactcacagtacttaaacataaagaaatgatcgacaatgcattgacaacctatcgatatcatatcgaaaaacataaaacaaaccaacaaaaaataatcaacaacagttttagtagttatcgacaacctgtcgataaaatgtcgataaactatcgacaaactcacgatattaaaaatattaaacacaaaagcacatcatcgaaaaggcatcgacattatgttaatatcatgtcaaaaaacaaaaaaaaattaaaaaataaacataacaattcaaaaaaaaattaaatgatcatacccgttttgaaaataataaacagatttccttctttcacatgtcagccctgctggtccagcttagaatcctgggaaaatgaatcccctgacacgaaccatacttctttcacacctctagaatggcctcataggcccaatattgtaatgcatgtgtgaaaccgtaagcagtgtatttgcattcatgctgaacatccatcttcagcttcttctcataatttgccttctgtttcaacatgtcttttt

SEQ ID NO: 112341 - DNA, 3931 bp, Cannabis sativa
attataaatcccatcagaagtgtgatgccaaatttacttatcttggtgaggtgtgaaacttaatgggatatccaagatacgactcacatcaaagggtagaaacaaacatggcaaaacagacatatcccaatgacgatcactagttataagactagaaactctcaatgaccgatcaacaccaaagaaggtcaaaggtttaatttttattataccaagaagtcagtcttcgtaaaatgttattgtttgttccaacaatccatctaatacctttcgtagacatatcacaattacgatcactagttataatgtatgatgatcaaaaaagttacaaacaagtttgtagttgtagtttgaatctcttttcaacaatgtcatacgatgataaatttgtatgtttcatcaactcaaatcgcataaagttacacataaaaaaactgctcaatccatcaacttgttgaacagttatgggttagagttttaaaaactacaaaaactatctaaaaattgcctaatctgcctgccttgcagtgtctcgcatggtgttgtatttggcccaaaaaaacattaaagtagaatcataaattacatcaatccatccctggtgttcttttgttgatgatggaatcaaaggggatttcattttttagcagctcttcctttttcttgtgctttctatttgcctggcacctagattttggcaaagagggcaaaattgtccgttcaaattgggccttttgggcttctgacaagcttgttagacccaagatccattataacagcaggcccaacccaataccatgtcaatagacaaatagaaactggagacgtgaagagaagagaagtcaaaatcaagaactgaccagaagcttaaacaaaaaacacatggcagaggcgttgttaggtgtttcacagacctttcttctgcttcaacccaaaatccgattctcctgcctatccagcggcggagctccggcactgctttcgcgctcgtctagaacgtcctttggtagctctaatcttctcagagttcatcatcatcagaagcttctctgcactgcagttgtctctgaccccagatcctctaacaccttcactgtcgactcggccactaaggaggtcgacattcaattggataccggcggtggtgacggaaacggtttcggtgatcgaggcgatagcggtggaggcggtggtggtggaggtgataatagtaactccaacgagggtgagggtgaaggcgaatcgcacgagaatagcaaaaagaagatggctttgtcaatgtctcagaaattaactcttgggtatgctgcccttgttggaggtgagattatagaactcttaagtgtttttgtgaatttgaattagtgctgtgctgatgtttatgctttataatggaagtgatcatatttagattacaggatttttggagtcaccgcatgattaattagattaaattggggaaaaatgtcactttccattttagtttttgaaaacatttttacaattggcttatggctcttttcaacaacacaaactattggttctctcacgtattggaaattgcttccattaacgtgatgtggtcaagaatctattggtttctacttagtttcctgaatttacttagttgtgagttgcacggaccatggctacttaagtctcatgaaattactcatatttggtcacggattgcaaaaatcttaattctgttttccttgttaatttttgattaactattctagaaaagggtcataaaagttttttattgatgtttttgcgtaacatagccaattaggctttcttctgcatataaatgagatgttggttgcttgttttgacagtgggtggtcttatgggctatttgaagagtggcagccagaagtcgttgttggcaggaggaatatcagcctctttactctattacgtttatactcagcttcccaccaaccctgtgtttgcatcatctttgggacttggtaagaaatcttctcactttagtcaatctctttcgttattatctctacatggagaacacccaacttttatcttctttttgctaaaattttatcttcgaaacaagatgaagtgtgagcaaacaagcaggcattatgcataatcatctctactagtttccttcaccgattatataagagtaaatactttgctgctactagtttttactcttaattgctttcattatcccttgttttggcaggcttgtctgctgcactactagtagtgatgggttctcgttttaagagatcagggaagatatttcctgctggtgtcgtatccattatctcgtttataatgactggtggctacttgcatgggatcctacgcagtgctcactgaaaattgcttaatgtaaactggtgttagtgacttgttaaagtgatttactaactaagcatatgagctagtttttgtggtgtgtttttggcatgtagacttgtgttaagcgatatcgttttgttggaataaatctgccctggctctttttgcttaagtgctcttgtgaaaattatgtgtattctgtttgtaaaatctaagcaatcaaggctctatttttaaagagaacaattgaagaactcagaagttcggaaagttagaaactgttgagaaagacatgatatctatacagagcattgagctcgaatttagtacaaggattgttccaagagaacagaattcatctacctgaaataaataccatgttaaatccaaatttacaaggctgtttagagataacaattgagttacaaacatgttgaaagagctctagattggtaacaaaaattattacaacaaacatacagcatacatccacttgtacaataaacataacatatattttcaagtagctaaacattgcttactgttaagctctaacaaggattagccatttctggttacatttgttaaagatggttgtgtctcactttaatcacaaagtaaagaggagtttttctgatgtttttaactattggcccttcccctttatgtaagtttgttattaaacacgaaagtatacacttaatagtagtaaaaacataccaattcgttcagatgattcaaggagataatgtaatacatgaacaaattcccaaggcctattaaggatacaagttacaacactaagagaccatttgggttataagtccttgtaagacacaaatcaaaatacatcatcactactaagttcactttagtacagtcagacataagtttttttttacaagactacacttctccataagcaagtgaagatttcacaataaattcatacatagtttattcaaaggtaaaaaaaacaataggttaatattcctcctggaaccataaaaaccttgtcgaaagtgatgaaatcatcactgcaggacaaggtcagacaactgagtcattttctaccttcatcattggtgaagaaggatatgggctcttgcttaccagcctacaaaaaagaaaatgatacacatatgacatattagaggttgctggtgtaataaacattgaccatttatatggccaaggaatcaagacaattttcaaaatttcaatggtgctttattttggggtacctgttccggcgcttctccaagaaactctgaagggagtgccttcttgcaattggaaattctaaaccatgataaagaaaaaaggttagaggaaaatcaatcatgaaaatctctttaataacttctgcagcattactgctattttgtagcaaagtagggcaattattaccagcttgcagtttgttaagggaactcttctgagcggggcaaagctgggcaagaagagaacccactgcagccgcattttgaattgcaggagacctcggaggaactggtgaactagaggcattatcagcctccatattattcatattgctggacttaatggcagcagcagtggcagcagccatacg

SEQ ID NO: 112342 - DNA, 3532 bp, Cannabis sativa
ttattttgtgtgctctagttatatatttcacttggaaaagattcatatccaatcattaccattttgccaattaatctaagttttgacattgaatctatttaagctgttgctgttatgagattataaaattgacccctccaattaatataagataattagtcacataaatttgacacgtcccttcagctgatatgttcccacttggtactacgtactactgtttcttctgcttcacaacatgtcttttggctaactgatcgatcaatctcatttaattaagactttattcttctgtttatcacgtgatgatgagcgatattcacacaattcatattaaaacaaatttcatttagtgacaaaatcacaacagacaaaaattctcatgtaaacacaagtaacatcaaattcaaaacttaattgatttattttatactcaaaacgtttagaggtgtttagctatagaggtagcagtactagcttatataggtggctaatattgttcatttatctatagatgattaattaaacttgctactattattgtcgaactgaaagagataaaaataatcttaattaaggatatattttcttttctttcttattttgttgggagcaaattttaattatattatcattaaacattcgaatcctagtcattgataagtaaagtgaatgaaaatcatcacatgttaacttgtatttgacccacgtggtgtaatgaaatttttatcatatcatggattcatgatagtttgcaaacgttgaccaaatcttaaatctcttaaaatatcataaaaactatattttgttgtgcttcgatctttttaattattttattttgatgacaatcagaacctagtgctctgttcttgttcctgcaccaaacacagcctgtttatttttccatgttctttccacttgcacctctctctctctctgtatttaaatatataaagaaaataatgtggtttaaataagttggtactctttcttatattttaatatattaaactattgaattcaaatgcataatgtgtgttttggaacccatttataatagtaaaatctaaacgagtagtccaaaagagagatggcatggaaaagtcttatcttattattaaaaccaatactagagtagatgtgtataaacagagaatcatgttttgagaaattggtttttatttgttttcttcttcgtaatttatattcataaatattttatacgtggaatcgaacatttggattttcatatttgataataacatcatcgggtaatattgcgctggcaattacatttatgtttataaaggtacataattccaatcattactccaatttaattcaccttcttggtgatatgtgtcaatttttccagactcgttcaaactaataaatttttatgtgtggtgtggctccatagttaccacaccatatatatatatatatatatatatataaatgtaataatttcgagttcataatccaattaatattgtgtttgtacgatacagttgatccggtgggtggtgcatggttaattatatagtcttttggggaccaaggagaaaaagaggccgtgttaggccattttgcagccattatcaaaaaaagtaggtgcctctttggggcatacattttgactagccaatactttctgctccaaacttaatcgacctgtaattgttgctatatccaatatatataaatatatattcgtatattataggttcaatatttcattattttctacttcccattaaattgtatgttgtcttttgcttatcaataaaagccgcacttcgatatatattaggctaataatataatgagcgtctgtattatacaaaattatagtaattaacatattcgaattttcgtataaattgaaagtttcagttcaatcattgggacggtcaatggtgcatgtgcagtagggaaaccatggtgatatatgaaccaatcatatgaatattgtttacggtagatagggaacaaaaacagttcaccccaattaattaaaactaagttatatataaatatgtatatatgtatgcatttgtgtatttattctcttcgaggaccgattattttaaatgacacaatctgtacattccaagtttttcaacaaagttatccgcttagttgcttgagcatgagaattatttatatacatattcctgaattaaggctattataaaattcataaccacagcttttcgatcaagggctttgtttagattagagcaaatactcgagtgtacttctttagggtcatcaatccttgtagtagctttttattttattttttattttttttacctacaagtcttctcaatttaaggatcgatgagtactttgtaataaatccttgacaactcataaattacctgttcctaaaacaaaaattgatactaacaaattaggaaaaagtagaaagagaaaatcgaattagaataaaatttaattgatttaatattaactaaaacagtttctgctaacggcaccaaaaatttattattgattttccaacacgcaagtacatatattgtttgcaagtaatagactcacaagagtaaaatcgatcttaaaaacactatagttaattactaaataattaaattactaattctatttggagtcaataaaaataagaaaaaatgtttaatttctactaaaaaataaaagaaaacaaataattaagatgaaatttaacaatgattaaagcttagagtgattaattttaattgcatctactttaaatgatttaatataattttaattctcaaatttcaaaattttcatatgataacggatttactaaaaaaaattatattcgaggtaggacataaatttctacctatatgtaatttttttactctcgtgataaatttaaacacataggaggcagtaagcataaaaatcctaaatgctacacaaaatatataggtactctcgtcctatatcaaaatttgtgtctatttcactataacataatcaacactcacttttcaaatttcgtattgaaatcattaaacaattaattggtgatcaggtaattaatacgaatgaaaaataagcacattaaaaattagaaagaattaaatcatattaaaatcaaaataaagtgtcaaacaatctccattaataaccctattaaaaagtctagctactcataatcattgaaaatattttataacaatttaagaacataaataacttagaggaaaagaaagaactcttcgaaaaataaatattgaaagtcttcaaagctgcttcttgcttctaatttttgtactccaaaatcatctggtgaaaagtgctaaaaaggatcctttatataaccttttaaaaagataaaaaaaaaaaccctaatttttgcactttaaaagaggtgggccgcgacattctcttgttgtgttacggtcggtgtcattcaaccacaaaaaacactacaacaattttattcatttgcggcgaaattattagcggggaattttcgccgctaataactattattagcggcagaattggg

SEQ ID NO: 112343 - DNA, 5698 bp, Cannabis sativa
gtatattctggatctctatcattctctcttttcttaggtggacggaggttggaggtttgtggcagttcgttaaccacagtgcttctgagtttgtggcgtcgactgcagtccgtggtgattctcgacagtggttcgtggttgttgagtgtttgtggtttttattgtagtcatgcttattttgggttttattgtactaattttgtatatgttatatacgaaaaaaattgtaaagtaatgattttttttttatctgaaaaacatatgaataaatattgtaaaacagggattgataataagatttaggtctgattattttttgttatatttttttattatattttttgattataagaaccgagataaaaggagttttttttatataaaaagaggccttttatcccgatttacataaaaactgagataaaaagatgtttttttatccaggtttctataagatctattatcccactggcatatatcccaatttttattttagcaaaatctgggataaaaagctctttttactgtagtggatccactgatctttgaggctaaaaaagactatgcagagtcttactcaaggatcaaacagtgtcactacttattacacttgtttaaaggccctatgggatcagatcagagagtatagaccataacctgtttgtacttgtggtgctgcgaaagtgattcaagaatatcaagaggaggatcgattgctggaattcttagttggattgaatgattcttatagatttgttagatctcaaatcttaatgtgtgatcctcttccaagggtgaacaaagcctatgttgttgttgtccaagaagaaaggcagagaggattgactaatggattcaatggttcatcaaatatggacaaatcatcatcgagcaactctggacaattagctggagctattcaacctttttgatcaaagtacaatgtacacattattgaatgaatggtcacactattgataggtgttataaacttcacgactatcttcctggtcacaagcttcatggaaagtttcctaatcgagatgctaaggggcctctagggaagtctactactgtaaatttcataggaatggatgaaggaaaatcagagatgccaatggagagagatctaatttctagtctatcaattgaacaatgtcagaaacgtatggccttacttgctcataaaacaacaaaaaacaatacacctaatgtccatgatgaacaacatgtggtttttcatttttctggtaagaattcttttgctcataacaccaattggatcattgatacaggagccacacatcatgtgtgtcctgatatttctttatttaaaaacacctacattaattgattctaatctaaaaactattctcttgcctaatggtttacacactaaaatttcttgtctaggaacaattgttttaatactagatctaattcttgaagatgttttttatgttccttctttcaaatgcaatttattatctattaattctttcagaaccacaactaattgcactttcttattttctcatatatagaaaatgtgtcattcaggatactttgaagaccaaggtgattgggatgggtagaaaatttggcaatctatattacctgaattgtaatcagatgagtaataaacacctagtttttgtttcttcttctatttttgattctaaagtttcaatgaaacagcttggcactatagattgggtcgtccttcttgtgtaaaaactcatcctttgaataaaactttaaagtttcatgttgattctaattccttctttcattgctccatttgtcattatgctaaacaaataaaatttccctttacatctaatcacaatgttgttgaaaactgttttgatctaattcatgttgatatttggggtccatacaataccatggaaactaagggatacaggtactttattaccattattgatgattgttctaggtatacctgagtcaatcttatcaaacaaaagtctgatgcacaatttgttataccccaattcacataaaattagttcaaaattagttcaataaaaccattaaaggagtaaggtttgataatgctaaggagttgttcaaagacttgttaagtgagcttgggaccatacattatcactcgtgtccatagacctcaacaaaactttattgttgcgagaaaacaccaacatttactcaatgttgctcaagctttgctattccaatcctatgttccaatcgtttattggggagattgtattgctacaaaaacctatcagattagtagaacacctacaccaaacataaagaacaagtcaccttttgatatcctctgctctaaaccacctgcctatgaacatttaaaagcttttggatgtcttgcatatgcttccactttgagtcaatcagatctaagttttctcctaggtctttcccttgcatttttcttagataccctactagtatgaaagcatacaagctgcttgatttaaacaccaatataatttttaattctagagatgtctacttttataaacatattttcctttttttcatacggggtctttctcctacttatgattttttttttctctaaattacctcgtacaacaactcttccaaattctcttacaatagctcctcaacatcttaaaactaattatgatgaatctagttcttctgatatgtctaattctgatgtgctaattcttcttcttctcataacagatcaatgagacaagtttctaaaccatcctacctgaatgattatcactgctatttagccactaataaccatattgtttcttctcaggcttctctggttactactcacattatctcgggttcttgggtaccacaggttgtcccctgcactcagagttacggtcctagctatttcaagtcattttgaaccaaattttccagtcaagctcaaggcattctaggatgggacaatacaatggacacaaaaatagaggctcttaagacaaaccagacttggatttcattgcttgaagattagcatgtcattagttcaaaatgggtctataagatcaagtttaatgttgatgggagtgtaaagatttgaagctaggttggttgccaagggttacaacctataggaggggatcaattacacacaaatacctttgcaccagtaactaaattggttactactaagttggttttatctcttccagcaatcaaaggttagcatctgcaccagctagatctcaacaatgcttttctatatggtgatctccttgaagatgtgtatatgtctctacctcaagggtatagacctaagggggagttgccaccaaatgtagtttgtaaattacaaaaatcattgtatggattgaagcaagcttcaaggcaatggtttgctaaattctcaagtgctctaactaaggaaggtttccatcattcaaccacagaccattctctattcatcaaacacttcaatgaaagttttatttttctactggtttatgtggatgatgtcaacctagctagcaataatctacatgagctcgaggctctaaagatcaagttacgtgctcaatttcaactgaaaagcttaggaaagttgaagtatttcttaggacttaaagtggccagatcagagaaagggatttttgtttcttaaagaccctattccttgtaattatttgaagatcttggttatcttggatgcaaatctatgaatacaccaatggaagctaacctcaaacttggacaagatgagaaagataagcttgttgatccaattttgtacagaagaattgttggaaaacttcaaaacttaacaattataagatcaaacatttcttactcagttagcaaactgagccaattcttgtctacccctcgagtcactcaagcttggggaatctttgaaatgcctaattccttgctgagtcgattattgaagcacaaatatttttccaacaataatttcttagaggcaaatgtgggatattttccttcgttaacatggcaaggcatttgttgggagagaaagatgttaatcaaaggacttcgatacaaaattggaaatggttttaaggtgaattgtgctttggaccttagatacttggacatcataacattcaacctctttcctactcaagcccgccatctttaatagttacaaatctcattagtgagacaaaaatatgggatgtaaacttgttacattcgtacttcacttccataagtgttgacatgattttatccattcccttaagtatctttcaatcacaggatcagctcatttgacatcatagtacttctggcatttattcggtcaaatcagggttccatttaattgatgaattggcagaagcatatgactcttcgatatccaaaacttaccatacatggtgggaaaatttctaggcattaaatttgccacctaatattaaaatatttgcttggagagtcattcaagatgctctaccagttgttgccgctcttcgcaaaaagaaaataatagattcaacaacttttttattatgtacacatgcttgaaaattaattgggcatgccttatttacatgtagaaatgctaagaaggtgtggaaaaacacaaattttaccatcgatatcactttgctcaacaaatgtacataggtgattatattttccatctatcatctttgcactcgaaagaggatctagagcttattatatgtactatgtggactatttgaactttaaaaaaataaagtctaccatggtaacaagggtcgatatggctctaacattgctgcgtacgcaaacacatatttggagacctatacgtcagccaaaaatttccaattcactattgtaggaattctgacttccagcatatatctttcacctccaccagctgctactgttggattcaatggggagaaagagaagggtccgtggaagccacctgaccaccttagtttaaaaataaatgtcaatgtcgtggtgaatactgagacaaaggtgcaaggcgttggagcaatagaacgtgatcactttggaaaagtaattgctgccttatcaaagcctttacaaggttacttcaaaagtgatgagatggaaggaaaagctcttttccacagcatcaattgggcacaccaacttcaactccccattactcatattgaaactgatactatgagagtttcattggctcttttaaccacatctattgatttatctaattttttagatttaattttaaatgtttgctgtcttttatctttttccctagagttattatttctcatgttcgtaggaatgctaatcaagctgcctatgaactggctaaatatgctctataattgaatataggttgataatagatatttgtaggatgggagaaattcttcatcctatttttactattattgtaaatgacttctaataattttttttaaaaaaaaaaaaatatttaaaatttaaataatattaaaaaaaagggctaatataggaattaaaaaaataatcacacgaagagtactaaattggtagtttttggaaataggggtacttattaattattattcaaaatgaaactctactacaaaagttagaattcgcgacggtcctaaaaatattttttttggggactgtcgcttaaaaaattcagtaactgtttaaaactgtcaggaaaaattagtattcccgacggtttataatagtaattataggaataggcgac

SEQ ID NO: 112344 - DNA, 4853 bp, Cannabis sativa
gttccacatacccacattgtccaaagccacatgtattgcagtccatgacttgggatatacctgcactcaccaataaagtttgtcatgcatgacacatattcttttatcacagttaaccaattaagttccacatgttatattattgcttgttttgggattgctattgtattgtgttttgtgagaggattgtgattgtgcactaataacgatatgactcttggagagtgctagacactagtggcgttttttagcatttctcttataaatgtctttacctgagtggtgcaacgtgaaactgcatcccggagattgtactgatccctactagacggtgtccactggcctccatccattctgccatcaaataaataaaatatttattacaaataaaagatttcaatgccccattttgccattcctaattatgagaggaaacgaacatgtcaattgaaattactatcatgtgcttacccaacgacaaagaaagagtagccatccaaatgcaagctctgcactatgtcttcatcgttttggaagacaaattcgacaaaagttctataatcagctccaagaacagctgtgtcaaggtacaatccaccgccacttggcctatcgccaacgcttcccacgcggaagcctccaagtttgaagaagtcagcgaccttaaggggtgtatcagttgggatgaaagatacactgttgaatccgtatctttgcttcccatttatttgtcctgccgaacttgcaagtacgaaggttttgaccaagggtataagaccataatggtacgacccttgtgggttcggcctaggcccacttgctgtaagattcgtcctgaaaattaatgaacctttccacgtttagcatcataatattccattactattctattttccctgcattacatatggtatccaaaacattattgaataatatagtagacatgtgcaacaacagactcggatagggatacttatctagaccccagaccctgacacagaccaagactccggacccggacttggacaccagaccccgggttcaggtttaggtctgggttcgaggtctagggtccggggttcgtattcggggtctgaggttcgggtttaggatctgggattagtgtttgatttccggggttggggttgactacaaattttttgtaaatattataatacaaactaatactggtcatttgttatgaactaaataatataactcacattatattaaattttatagtcttgaattaatataatacaatattttatctaaacataatgttatttgttatttaaacaatacggcctattaaaatacaataccatccttatacggcatactaaacgagccttaataaacatgggctgatgtgcaatctaacatcagtatacaataaacaatataatagacatgtgctgatgtgcaatgcattaactgtatacaacaaacaatgtgtgtggcccctcaactaaacattggtcacatacatggtcctatcagataacgagtaggtacacaataataatgataagggagaaaggaaatgaaatgtacctaatagagcgagcttggttcaaagaccaatcaatttggatggtgggaccaccaggaggtgggccagagactgtgccagcagagttgctataatgaagaacaccagttgtagtgaggtagtcagggccagtggtgaaacgagtggaaaccacaatgtagtaatcttgtccaggctggtctgctgttaccagaacggaataggattggcctgcgtgtacatccagggaggagtaggtggtctggagtgtatgtgttccctccacttctaccaacttcattttgtgattttgaatgcgaaagtttagggaattttgcagcccaacatttgaaattctaagcctgtaagtttttcctgtaatgggaatattttcattaagagaaatcttattatgcatattccatgtgaatattgtgacgcttatattgagagcttaccttggtcaacagtaagagaataagcattaggcccacgaccattgatgagaattccatcaggagaaggcaacttattaccattgtcaagatgggttttcaaatcctacacaaacacaaacataaaattatcatcatcacttaaatgacctgttcaaattaaaccattaaaatgaaatttcaatctccaataattatgccacctagtagcatctgcaagttttcaagtaattaatgaaacaaaaatataaagtattagaagttagagtgatccagaatttaagtcacaattaaaattacagttagcactaaaacagtgcttgagtcgttgactttgtttcacttaaaaaagacatttttctgttttccttttttcatttgccgtaagtatttataacaacttataataagtggcattagtaattacgagtataatgtatcattgaagaaaaaccaacaaaatgtcggtttaatagttactcttaatctgatcaaatcaaactgttatcattgaaacatttcttttttcgaaaaaagaaaaatctgagccgaaaagtattggtcaacttattaactatgaagaaaggtaaaagtgtcaatattataataatttttaaagagtatctgtaaactataacgtctaaacagtactaacattaataccaaataactgggaataaaatgggaaaattaatgttctaccgacaatatatagagattggttaggacaaaaagacaaagacaaactattactgtctatctaaaaacacgtttattgtgactacaacaaggggcgaactcacgaattttgttcagcaggagagaaaataattagaggggatagtaaacttaaacattaagacataataaaaataaatttataaaaaaaaaacataatataaaagaaaaatacaaaaaaaagtataaatataaaaatatttacaaaattaaaatatagcaccctagttttatgtttggcacgccactgactacaaccacgtcacaggccagtgattttcctcccagctagcctactgaccactaaaactaatttctaataaataacatgggtggtatttaatttcaaactatcaatgtacttaaaagaaagttgatcacatacacatagattagatagataaggaaatgtgggttaccgtgtggttggacttgtaccaatctccaataagaagagtgtaatcaccagctgggtctggaaaaggaacaggaattctgggcctgctaaggattctaatacctccaaatccaccagcagctttgtggaatgcaagagaagggaaatagtaaaaactcccaatctgatctttcacttggagaatgtaggtgaaatttttgcctggtggtattgggcatgtcgttccccatacaccatcttcaaaagaattcctcctgttttgaattccattcctataaccacagcacaaaacgacatcacttctctactacccaaaatttatgcccatcatctgaaatagttcatttactgattatgcgttgaaatttcagctataagatttaagacagctaataataattgaattgatggctaccaaatttgcatgtgcaaagtaaaccccaccgtgcaagtgcctcatctcatttttggaggttaccgcatattaattcaatttggaattagttttcaaataaataaataataatcaatttgaaagttcttccccaaaattaataattggaaataataaaagcgaaaaaccgctatatttttctacttttgatcctgtggctagtcttgtcaggattaagagtatttattagaccgcattcaatatttttaggtatattcaaatttcatctaattatatattagatgttaaattttattatgctatccgattcaattaatttcagtcattcgattggatgttcgatcagatcggttatatgtattagatgtattctatgtatatctattgcgcattgatttcaagtttttttttttttaatattttagacctattattttttagatcgaatggtatttatccaattttttttaaattcaatatttattcgatccaatctaaaaaaaagtaaaattttaatttaaatttttatacgtgcatatgtatatattttaagtataacaaaataaaatttaattaatcgtccaaactaaatgaaaataataatgaggttgattgaatattggatgtatttgatttttggacacttcatctaacattcgatacgattcaattggatattaaaaaataacattcaatccgatcgctatcacaattagatatccaatgtttgccaatcagttttaattagactgaattgatttatatacacccttagctggaatataaaagcacatttaatgagctaaaataactcaatttttttttcatcaatagtgcttagctaaatatagctaacaaatttgttagttttagtgcttagctataattttttattatttttataatatatatatatattttttatttataagtgtaaaaatataaatattatgtaatatatgatattttattaatttgtgtattataaatatattatttaaatgatataaaaaaatacgaagaaggtgatcagagccggcttgagttaaggcgggctaaacacaagcctaggacctacccagtttaggaactcaaaaataaaattaaaaaatatacatatattcttttagtaaattttaaaaatactacattttcttatgaaaatcacccaataattttaggaataattacataaagtaccattctctgtaaaaatattacatttttacatttatagaatttttttttacatttttatgtttttccatagaaacaacaagaaaattacataaa

SEQ ID NO: 112345 - DNA, 3760 bp, Cannabis sativa
tatatattacaacatgttttacctgggactcgaacccaggacctccaacactcacacacccacttatggccacttgagctagccccaagtggttcatgccttccacaagtcaaacttgaaatatgttttcttattcatgattgactatagcccctcaacacaaataaaaaatgagaaatgagataagggatccccttgcctaatccccttagacggcacaatgttaccaataacatttccattaacattattgcataggtcacagttgtaacacactcgtaatcaaaccaatccaccccaggtggaaacccaacttttccatcatacctcaaagaaaagtctaatcaacactatcatagaccttagccatatctgctttaacagcgagaaatcatttactatccttcttatgtcttttaataacattaaaacactcaaagacaatcatacccttcttatgttttttggtttcgcggtgcgtgtggtgcagcttttgactattttttcaaaccaacccacacatgcagtttttctaatttcccaaaccgcactcgcatcgcgaaactaaatatcgcagaaatcgcaccgcaaaaagtgatgtggtgcgttttttacggtttgaactatcaccaaataattaaactatcacaaatacaacaaaacttaagcaacacttgtcaaaaataccataaaacttgaaaataaatatgaaaaaataaatttaattttaacaatacaataattagtgagttttgggatacatattggacctaaataaatataaaaatttgtatttttataatatgcgatgggatgcggtttaaactgcatattaacaattcaaaactgcaaactgcaccgcaccgtgcagttaaaaaaaaaaaatcaaactgctatcacactgcaaaaaaattcaaaccatattttttttatggtgcggacagtttgaggagtttgataaagtattccttactattttatcttgagtttttccttctggattatgttgaaggttttaacaaaggtcaattttttcaaacaaataaataaataaataaattgatgaaaaccaaacatatgtagtctgcatgcagcagcacatatagttgatatacattttgattttaagtgactataatttataaacaaaagatttgctaaaatcacgagaaatgagcagtggatcacattttaaatacttcaaatatcaactgtatatatagttggttcaaccacatttaccagcagagatattgggaacaaaaatagaaataatgtttcttgtggtcaaagttaaggcattaactgtttacttttttaacattaataacatacgttacgaaatagagagagtatgatgctttgtttgttgataatatcatttttaggttagtaattttttccttgaagactaaattgtgccccttgaatttttttgactgttaaaaattcactccgtactatagagattgttaaatttaaggatttttatctaatttcattcaattttactatttcagtgattatttatgtactaaatcatgctccacagactttaatatctactaaatcataccctctcaaactttgatatgtactaaatcatgtcccttgaactttcattcatgttagaatttttttattaaaattagacaaaaatccttaaatctaacaatctcaatagtttagaggaatttttaacggctaaaaaagttaagaagcatgatttggtacatgttaaagttcggggagaaaaattactaattaatcttatttttatctcttccttaattttattaatatgtaattaataacattattattttatatttaccccaagatttttggataaaaagtttaaaattgtcatgattttccaactagtggtatttataatttatttttgaaggggtaataaactagtgctatattattagtacaagtgagataggagtattgtatgtatccaagaaagtccaatatcatttttataaagttattggtggacaatgatttttaaataatcaaattttcaaacactactgaaatccaaatgtatccttgttagtatttatgatcattattttttactatttgagttttgtggctaacttttctaccaacaaaaaatattaatggaaatcataagtttcagatgtgctgcttatggttggtttgtttattagctgttctccattaattttcacgctttactatttaaaatcatgactctttgaatgtttagttgtcctaccattacttgctagaaacactttcaatttaaacataaaaactacatagaaaagtttacttttactttaatttagataattttccaatcttaaaaaattacagtaatagtctcaagttctaaattcttgtaaatatgttggttcttattttaaccgatccgttagttacttcttgcatactttgacgataattccactagactcttaattttaacaaatcttatagttgagattttgaagatgataaatctgaatctcttcctcttaaatctcttgaaacttcttttttcaataaatgcattaaattgttgacattatttttcgtcaacttaatctaagaaaataattaattagagaataaattaaagaaataaagagataaaaataatatatgaacaccatatatttttacgaggttttgtaatttaatctacatagtccacgacaagtccatattatttatgagtttctagttgtgtttacaatttaacagagtttctgtaagttatatttttttttctcccacccttttgagtgagcccctatttatatgaataggatataagatggtggttactaaattcgatctagtgggaagttacaagtagtgggtggtgaatgtccatattttacgtacaattgaacatttggataagaataaataattgtttatatttaaaatacaaagaagttgtctttgacttggtcaaatcatgttgtttgcaagcagatacatggcagagtgtgtgctacgagcaaatgcatagtggaagtgtattcgagcagatgcatacctgagtgtgtaatactagcaaatacataactaagtgtgtattacgagcagatacaagattcttgtatttcgaccaattacaagatcattgtattatgaccagctacaaaattcttgtatttacgacgaggtacaagatccttgtattacgtccagatacaaaattattgtatattacgatcaactacaagatccttattgcaaaatgttgattttttgttgaaaaaatatcccaacaacgctgaaatatctcaattcataaattttgtgctccttatttaaatgaggtcgcatcacaagttgagtcacgagtttcaacgacttgtcccataaagtatttattgcgagatttattaattatgtaaagagatatacaattcaacttgtttattaaatagttcaacttgtataagtgtgaattttagattttctaattcaattcaatatgtataagtatagatattcaccattttgtaaattgaattaaattaaatcagatgtgaattgaaatgataatgagaatgagcgatgtattaccaaaaatattacttaattttttatgttaatgagagggtattatattaaataagggtacgtgagttattgtatttttatataagtggtgtaatagtaattaactaattatatatgtataaagatggttttatttacaccctataaaatgataaatacactttattattaaaaaaaatat

SEQ ID NO: 112346 - DNA, 12186 bp, Cannabis sativa
  modified_base (12137)..(12143): a, c, t, g, unknown or other
aattattatgaccaaattttttaatacaatgtatgttgtattatttaatacataataaatggtctgtattagcttgtattataatatttacaaaggattttggatcaacaccaatcttcaacccagatccaaacccggacttggactccggactcggatctagactcgagcccatatctggacacggacccagaccccggacctgaacacggacccagacccggagcccgcgacccggacccagacaccgacccacacccgaaccccgacccggactcgaatctaaacccagaccgcgaacccggacccagacctcgaccccggacccaaaccccgacccggaccctgaacccagacccggacccggacgtagacccgaacccagacccggatcctgtacccgggacttgggacccagacccgtagttggtgttaggatcgagtgtattagaaatatattataacttaacacaatcaattaatacaagccaatactaaatattgtatggtattaaataatactaatacaatacaatacaatataacacaatccaacacaatacaatatattacaatacgccaatacggcgtactaaacgagctcattatatttaattatatgagatctaatatttaattacactaataaatatgacatcacttactcttgcgcgcacgtaataaataatagtcgttctgacccaggtggtgacactacatgcttagaaatattaataaaataagtaaataaatggaaaggaccgaacaaagtgagaagaaagagtacaactctgacttctgagagtgagtgaatttggagcaaaaagagcaacacaacagaatcggaaatggtgtctttacccattgctcttcgatccttcaggctcgtctctcgtctgcctaccatgcaaaaccctgctctactctctcgccaggtctctcattctttctctctgtaactgtaatacacacacacgcaattcagttattaaacgcgatcttgtttgttctctctaaattctgcaagaaccctaactttttcttttacctatacactattggcgtatgatttgagttggtttatttgataacataagtgttaattggactttggttttttttggcatgttagaaatttatgttttgatttttaaagtaatcttgatatgattggacgcttggaaactcgaattttttgatatagtcgttatgtttttccttcataaccatttgattgataaaattagattagatgtggcgtacgagttttgtgtcattctaagttctaagtttggaaaattctactttttacaagggtggtaatgataggtacgtactaacgaaaaaggtccacaacttcaatttagcttttgtgtgttaaattttgatgttccatctctatgaaatttttctatgtgtgtatattacagtgtacaggtgcaataactcatttatttagttgattaattttacagtttattgaattgttagtatgacattgaatgtgtgatttggatgccagatgactacggacgcaaatagtgttgcttctcaactaaagagttctggtctgttacgtacccagggccttattggagggaaatggattgattcgtatagtggagaaactctaaaggtcagacaaattaagcttttaactttgatgcccgcagtgtacattgaggattttctgtgtgatttcctaaattttagctgcttttttgatgtttgggttagaattggttgagaaaactatattttacttttatgacttattttgtgtagtcaggagtctcagtttacattttatggcgtaagcgctttatattgcagtcttgttttgaattgtaattagtgcttgtgctgctcttgtctgtacctttgattttgttgtttttggatatacaatgtttgatctttttctttttgtttcctactccatttggttttcccttatgctacttctggctgaattctatgtcttgaggtactggcaggtttacaatccatcaactggtgaagttatagcagatgttccatgcatgggtcagagggaaacaaatgacgcgatatcttcagcctatgacgcatatacgtgtatgagaatgttgattgactttttatcatttttattttttaacttctctatagcatatcacataatgtatgctaaagcatttgtactgctttagcatacattttgtgctcatctagattcctataggctacaagccttcttaattcttaagtatactattttttttctcattagtgtgatatgattgttctttatcctaaaacaagttttctttagacaagaaattttattgattcaaatattggactactatggcattagctttttgtctcagtattgtactggaactcacaatatttaaaaagggacataaaggccataataactacgatgaataccatcatacaataaaagtggagttataacctttccaatgctaaaaatagaaagggatgcattggtgtatccctccttagtggttgcaccagagacttgtccactaacattatattacttgctagttcagctcttttttatgttattactaagggtagctcaaatagttagggatgtgttgtttaaaaagtaaaatgaaaagaaagttaggcacttggtttgctcctacaagatctgagattcaactttttattttggttcttttcttttttcttctgagagataaatatcacgtccatgacttcctctaaagtatgttgagagcccacacatatggaggagaaaaaccgtggctacaaaaaccaacaccaagaaattcctgtacaaaatttgtacagaaataaaaaaatacaaatcagggaaaataaattgtattatagacttccctataacaattgctatagttttttgtttgctaaatattgtagggttaggtcacgagagtagtttcaaaaaaataaaataaaatatacacgggcaatattaatcatggcatgagcttgcataacaagttttaaaaggagtattaaaccttttatttggtttcatatcagcaaaataatgttcattctagctcagtttcggaaaaggaacatcattgatatttgaataaataaactttattttccaggtgtagtttgtgaaaaatataaatattattatttcttttcctttttgtaattttaagggaaaataccacaatgagctaactttgtggggacatctcatcctgagtcttgtagctaaaatattaaaataagaaactactgtgaacaagatcagtatcctttgcaaaattttacattgtatctgatatatacttttttttttttggatgaattatctgatatttatacttttgtcaattattattttaccaacatttaattgtatttaacttagcaggaggttgctaagtatgtttgttaatttaaattttctcattatcttccatgtagcttggagcaaacttactgcctctgaaagaagcaaatatttaaggaaatggtattgttgctgctccacactgcattgtctcttccgttcattctttcctagagtttaattttgacttttttttttcacactgttgctttatctaatggaaaatatatatggtacataagttcccatttttatatttgaattttttaagtaaatattgtactggctgggattttagctgttatgtcagtcataaaaatcatattttggtgatcaaggtgttacaaagtaaagagttttagatagctgagtgaatgcttatgttgccttctctatgtgtaggatccaaaatttagatcttttatttgatttgtatgtatttttgcttctcaacttttatcatacatatcttctggacacctcatgatccttttttgagtatgctttgtttctttacacttatcattgtactaatctgttttaccatcagttatgtcttttaaaaaaaattcaccccttacttttggaccattgaaatatgaagtataaatttttctggtccaagactatttctctctatgcaagtgtagatcagtttcaactatatatatgacaatatctatataatttctcttttttgagctaaaatgaactacttggtttgttgaaagattacagagctctaaatttaagcaaaacttctgcacttgcaccttaatatccatacatgatattcttaaaatgcaatccttttagtctttatatggttgatgatatggagctctggtttataagaccccctttagaatgcttagttcagatttggttgtttggggtgacagaaatcgaagaagtttctaagttttgcatctgtggagatctgagagaaaacaaaatttaattatggggctcttctattgaattgtgttcaaggattttatgcacttttgtttttctgatttattgaggatttgagaattgttagattagtcagatttttgttttttatgcattgagtcattgatttatgaaaggtttcttgtacctgtgcaaactttgtactctttgcatttgaatctcttttagtattgaataatatttttgtttcttatataaaaaaaatgctgggctcagatgtcactttcactataattgtacttatgtcctgtcccatatatcaaggtatgatctactaattgcccacaaagaagaacttggtaaactcataaccttggagcaagggaaacctctaaaagaagctcttggtgaggtattgacgtatttattactgttattttgtgggaataagtctacaggttgaagttaattgacatattgtctgaattgcaacctaaaggccatttaacacctaattaagaaaaaaatagcttagcattgaattacaaccaaaatgactaatcgttgagtagcatggaaaaaggaaaatttttaaatccttagtgttaaaactccctatagccactcaacccttttactctttttcaagtagcagctacttctgcttccatattgttgaatatacgcttatgttttttgataagcaactatctttttgacgctattattcttgacattcaatgctgagttctctgtaactcttcaaaatcgtacgtgatagtctcataccttctactacagatcaattatggagctagtttcatagagttctctgcagaggaagcaaagcgagtctgtggtgatataattccatcagcacttgctgatcgacgattgcttgttttgaagcaggtatgcagtatcatgtacaatgtcaattaacttattgacccaatattcatttgaaagtgattgtacgtgcagttgtatttgtttatgaatatattaatcttatatggaagaaatcgaaatctacatataaagtctgtatagctttaggaattgactaatttcaatgtgtttagtgttaactcacaaacacaagctgtacatggttcctgctatggagacaaagatttgcatagtagaagaactgggaaacaagaaagaatcaggaagaaaatcaacatattaaccttcatattttatcttgttgctcaaatctgcatatttacatctaattaaatcttgttaatcttgttcaaaaaaaaaaaaaaaaaatcttgttaatcttgtttgatctctgaatatcacaaccaaatctctccctcaagctggtttgaagatgggctgccatgaacgtaaaaggaggatatattattgttgttattattattattatttttttttttttgaaaagggaaggggtccgcaagttttagacaggaccctcccgaaataaattaataagcttcgcttatggcagaggaaaactatattacagagagatacataggattttagcacaccaaggttgcagcgaaaatagtaatggatttcctttacaagaatgcattccaatctctacataaatctaagaaagacaggtcctcgaaaaacttggttttaaaaacccaagtagctgtccaaaacttaactttctcccacaagtcctctactgaacaccccaagtaagcaatattgttataggagagatgggttaaaaaaaaggtgattaccccaaaaataataataggtcatctaggattacatccaaatgtgccaatctctaagtaggttgggaaagaaaatacattcaaatctatattatgagcttagttgggcactcccctctcgttagaaaaaaggtttaggaactaaagtttgattaattataagaaaacattttctaaaagaacatttttggccctggcagttcgactaagagacctcaaggattttgagtctatagggttcaaaccttggtacaaatgcctaccaacactcctttaacactagaccactccttacggttggctaaatacaaataagagaggataaagtagtaagttttatgaagacagttagccaatccgtgcatgtcgtaataatcaaatttaaataggtaacaaaacataaagttaaatgtctatttctaatgatatatatttttttaattttaggtagtgatacctaatcatctaattcaaaagacagctgactcgctaatgaattaaagataaacaaacaatagggttgattctaagaaggaaactcaaggtcgaaaataaagacaagaagtagaaatgaaaagttttgaaaggcatcaccttcttaggatttcggctgtttcaaaaggttaaatatgatgttaaaagtctctacgtaggcctctgcatgcttttcatagtgttataacaagcaatgatcatcattaaaatgaaaataaaaataataatgatgactgaatatgttttaccaactgcccttcgggtggggttgtcatgatgcttgtttatgtgtcttttttctcaaatgtcaattcatggcaaggacaaattttcttttgcagcctgtaggtgttgttggtgcaattacaccttggaactttccactggcaatgatcactcggaaggtttgattattcaatatgcatgcagaattgtccagaagaacatgagttgtcaatgcatgattttcatttccaacactcatgttctattatcttacttggaacaggttggccctgctcttgcatgtggctgtacggtggtcataaaaccatctgaacttacacccctcacagctttggcagcagctgagctctccattcaagctggaataccaccggtaaattcagtcatgcatatgtgcttcctttttaaaccccttttaaaagagcagaactcttcttaaaatgtacatttcatattttctaggatttttagttgatattggagttgtccttatggagaaggtgggttaatagttgcactgtaatttttttgggtcatttaggcttcgttttgatagttgttttgttaggaagttagttgtgggttgtcgttagttagatgagggtggtcacagtaataaagggtctgtatgacttttggaagagggagcctcttgaatcaactcacttaggctatttttggattggatccaagattagtccattgttgatacatcactgtgtttgcgtacctgggaccttctcacatcacttttgagacctgagagttctcttaaaaaaattattttcaaaacctgatagccttgtctgaatattttgtacggaaacaacttacaagtaatcaattataagcaaatttagtacgaagctttgagaggcaaaaaagaaaagaaaaaaacgaaagacaagctagaatttctttgtagttttgagctacagaatacacaataaatggactttctttcttttttttttttctaaaaaagttgttttcaattaaagtgatcttctattgtatcattctaaaatgatatgtgtttccttctacttcatgatttctcttccatttgttcaacgttttttcaaaaacaaagaaaaaaaattatctgtttttattttttatgatttcaagaatttttttttttgttttagaaagacaagcatgtgtagttgttcttgcaaaatgctttcatccaccattagcactccttgttgaatttgaagaactaagtggcagaataacaagttatcaataagattgtgggccagatgcacaatcatagatttggtacctgtgctggggattgtatccaatgaacattgttgtatcatttttcatttgttttacttgaaaaaattcacgacatctgtttctaatgaccttcattttatgcaatagggtgttttgaatgttgttatgggcaatgctcctgctatcggagatgctttgcttaccagtacacaggtttatactgttatattattattcacccttctctcatatgccctgcttctattctctttcggggataattgaatttttgaaggatacttcattgcctctttcttgattaatgacccatcaggtgcggaagatcactttcacaggatcaacagctgttggaaaaaaattaatggcaggtgctgctgagactgttaaaaaggtaaggtagatacaggaaaaaaacagtgaaaatatatgtacaaagaagtcctaaccctaatgtttctgataaggtgtttgattattggatccatctggctccttttcttgcaaatcattcttttcagtctactgttttggttgctcaagtgaggatcaagactgatgttatgttgaagtattcagtactggaaatacgttgttttttttggcggagttgaatagttgaactttcgaggataatttcatgatcgtttttctttatttgaaagagtgtttcacatttccaaatactttcactttttaaggagtttagagattccatccacagtaaacccatgactcatcccatttttctacccatcatctttcaagtttaggatgctcaataatttaatcttctttttgtaatgttttccttacaattcaaaagataccttgttttccttatgtttgttgtaatgtatctgttagttataaataattaacatcttgttcaatataaaaaatatatatattttatgtttttaatttcttgaaatatttaggtgtctctggagcttggcggcaatgctccctgcattgtttttgatgatgcagatctggatgtggctgtaaaaggagtagtaagttgaaattctttgtctaaagatgttacagtgacgttattaccattttttattttttaaatctttgttgtcactcggatttttttcttactattatttttatagctatattgttgtcctgctgcctgcttttggttaaggattgtttgagtaacatcaacttactgattagatggtggttagttctttgaactaggagtgggcatacaatccaatccaacatttttcttcgaatccaatccaatctgattagtaattggatttggaaaattatcatctgattcaatccaagtatgcttcaaaattcaatccaatccaattaataattttttattttaataaagagacaggggttagaattgtgactgaccctcacttatggtggaggaaaactgtggttacaaaccatgtcaacattactcatagatttactaaaaaatattgttgattaactacccaaaactccatcctcacaacccaaaaacatatttgccaataataaaatacattcccactctctaataatgtcttggaaacacagcccctcaaagtacttggatttaaaaacccaagttgtagtggattagatcagttttttaattggatatcagttcgacacttgatttttaaaatattaactaaaaaacattaaaaagaacacataaaaactaaactatatgtgagttcttaggattttttgagggatttctttaatcaggtgtaatagagtccatgaaaaattaatgaacatgtaaaaatgaattttagatattttttttattgtatataaataaatataatacataatatatgaaattggattgaatcggtttttaattggactttgaaatattttcaataaccgatccaatctgattagaattcaactattcacatccaattcaattcgattgtaattggatatttaactttttgtaattggattggattggttcggtgttattaaattggattggtttgtggatcctgcccacccctaatttaaacaataaagtcaatagtgtgtatgtacggctaactcagtcaaacctttagttttattaattctactttcaatgtaattgacagggtagatgattccttactttctttatgagggtaatcttggttactgatttcaacttaccttgatactgctctgatgaacagtagcccttaagcagctataggaaatgcactccctgtggttatattggttttgatttgcacattggattggacctttattgttttttctctttctgtttgcaatttagtttatgatatgacgaaaacaatggcgaaagagccctgcagttgcacagatctttacaggtctccattattcctcacatggtcaccaagagatctgtcacttggtcagcactctatcaagttgactcaaactcacttcagcactctagaaatccatgataactgaagtaaattgaagcacacacaaatatctcatttaggaatggcattttcattagttttaaaggacaatggaatgtcaattccattagtgaagcacacacggtcaccatggatctgtcacatggtcaaagctctgtattttttggctattgatggcactaagcatcacacatagttagcccacctaaactcatgttgaaacaatactactagaaattataataacctaagctatttttggaagaaaatataaccacagaatggaatggctatatttatgaatgatattttcattatttgtagagtagtcattccattagagtagctttcagtacatgtatcaattttatttttattcaattgatttcattccatccaaaccagtcaccacctcaatgttacaggtacctgattttttgatttccaatgagagctcctcttgggagtagaaccatgcagctctaggaatggactctatgactaagcattttctttatattagattgcatgagtggcttttagtccttttgtttttctgctaggtttgacggttgtacagggaaactaaaattaacttttccatctaattcaaggcatttgttatcaactattgtggagatcagctaaaatttagcttgtaagttgtaaccacggttttcctctgccacaagagaggctaccgaataaatttgggaggaagtcagtctaagacaagtgacctctgtctctttttcaaaaaaaaaaaaaaaaatgaaaattgtggagatcaaattatcaaggatcctcaattaggataaaattattggacattttcaaataaaataatcttgtcactgctctaataactttacattctatgaaactttaaaataacagagacaagcagtaagaaattgacagatgtgttgatatcataaaaaatctatttattcgcgtttgcttttctcctttattagttagtctaacagtcatacgttataagtaaatatatttgtatcatttagtctaacaatctttcattctaaggaagacttgtttgtattgcttttttctattttccgtcttttggtttcaggggtgttgtttgtttggctttattagttcagggatattgttattttgctagtcatctactaagccatgcaatttattttacagattgcagcaaagtttcgtaatgcaggacaaacatgtgtatgtgcaaacaggatccttgtacaagaaggtcttgattgttatggccttattcacagctgcttgaaactgtttccttgtagtttatatgacttaatttgttgaataaaatgtgtttagggatgaaaagtagttgtgtgcttgaagttggatttgggagctctatttctgcttatcttcctatgtgcttgcaagtataaaatgtatacaatcttatgttgtagtatcttagggtgcatttggttggaggtaatggaatggattttccattccattttttttgcttggttgcatttcaatagaatgacttttccaccattttggtggaatggctattccatttcaaaatgggtggacatgcattccaatgcaagatgaaattttttataatgtttttatctattttgtatatgcatattaaatttaggtggcgtttggttnnnnnnnatgaaatggaatggaatggaaaggaaacaattttcattccatt

SEQ ID NO: 112347 - DNA, 6841 bp, Cannabis sativa
aagcattgagttggattgcaactcattcgtggaatagagtcatgttggaaacagatagcttggtgttggaaacagatagcttgctgtgtctaagcgattcagagcggattttatgccttcacaatttgtgttttgtaaaacgatctgtaaataagttgctaattgcttggcaagatactattgtttctctagaggtcgtgttcctctgaagtgagttttatttattttttgttgaatgaatttattaattaatacaatttttattaaaaaaaaaaaaaacgctttagtttgaagatctccctgtctttctctaccaaactctctttcacttcgttaatagtttcactttcacttattctgtactattgtaagtaaggccttcgacgattacggacatggacgattcagacaggaggtttcatgccctaatggacaggatattcaacactcccaagaagggtcagaaagaatccccttccaggtttgtttttttttcccttctccgtttggttcctgagaaacgcaaaattgatttggtttccgttattttttgtgcctaatgtttattttgggcttccttttatgttaaaatcgatgtgttcgtaggttttttttctaatagaaatttagaatcgatgtgttgttaggttgattaagagaaatttagctttagtttaaatgttttgtctcgtttactgtgccgtctaattgttctctttccgattaatcgcgttttaaacaacctaacgtagcttcaagaactatgtcgaattcgttatttttcttacagtagtttacactttgatatacatttattgaactagcttcttcttgctgtatcgaaatttttacagagtatgctccaaacctttttgcgaaactaattatgatacaatctttgatatgagttcacaaatttgtgaatcctgtatttttttttttaatttttttttggttcatttgttttgtttttattgagttttttctttctttctttctgttattagttcatcggatttacaaacaccgaggggtgaaaagcttgcggattcgccgtcttcattggcattgatggaatcaaatgtaggtggtaatgtcagagctggaccgtcctatcagggtccagagtgtaggccatgggaccgtggagatcttatgcggagattagccacattcaaatcgatgacatggtttgctaaacccgaggtatggttcttctacttctgtcatccaatttgatagccttttgcctttttctgtttttagtttctagtcaggaataaatttctgaatttgtacctttagtatgttggtgctggaactgtaaatgttctttttattgtagcttctcgaataagcttgcatggcacacctttattctgaggttcttcattcagttctagagtggtatgaagtaggagcatatcacaagtaggaaagagttcggtttaagtattgcttttgtggcaagtactcatagaagataaacgtgattagaaaaatgcaaccttttaatgttgtgtgtttacttctgtgctctggaagttgacagtcatggaagcatataattcttgcaaacgttactttgaataatgctctcatttaatcttttcttgtttgaaaagatagtctgtttctcttgagaaaattttaggaacatctatgtaggtttttgaatggtagaaggccgttcttttttatattgtgttgggaacaccaatgtccttatcaagctcatttcattgctgcaattaaccctcaagctgtgctgataaccttactgaatagtttcatttatccggcttggttaaaaaaattctaatttttctaacttctctgtttactatcaggtagtaagtgccttaaattgtgctagaagaggttggatcaatgtagacatggacaccgtagcttgtgaaacatgtggggctcgtttccttctttctacaccttcagcttggaatcagcagcaaggtatgcttggtttatcttctaccaagttcggattcatcctaagtattccaaataatggtctagttgcctatattttgctatatttgtaaatggagtggaatcaccataatttgttattggtttcattagtatgacatttatttgttttctccataattttctgtcagttgagaagtcggctgcagtattcagcttaaaactggacaaagggcacaaattacactgtccttggattgataatgtctgtgctgagaagttggttcaatttccaccaacaccacctccaattttagttgataaatttaaagaacgttgctctgctctcatgcaactctctgctcttcctgttatttcatcgtcagcctttgagtacatgagaagtcctcaacttgagcaaattattgaacaatctttagtgctggagtgtgagaatggttgtgcagacatgtcaagagtagagtacctcagagatgaacatgatgtggattctgagaagaaatattatcaggttcaagtcctacacatgttttcatttgtaactgtcattacaggcaaatgattgctttcttcgcatatgatattttattagcatgttgatgaatgtgaactcactgactgtaacagtaaacacattctcaattgttcttctcttgattgttggtatgtgtgcaacttgagtattttaattttaatgttaattttttaatttttattaatataattttcaggcacagaagcttataagtttatgtggctgggaaccacgcgtactgccttacacagtggatactgggaataaatcaagtcaaccctcaaaagaaaatgtgccagagtcacctaattcagctgctcatgatctgaataccgaaatccatgtgctatctactagaattaatgagcctacagaggcaaatgagaattccaacagtccttatatgccacgatctgatccaaattcggctgctctagattgcaggctctgtggagctagtgtaggattatgggctttctgtacagtaccaaggcctatgcctatggaactgatccagctggtaggatatggagaaataaatggtggaaaccattctgaaatcaatgattctcgcaccgaaactaattccataaaaaggggagagattatacttgctgattcagatattacaacattgactaaagagagacatcaaagtttaaatctgactattgcagggggtcctccaccaacaaaacagaactttaaagctacagtttccttgcctgttattggtcggaatcttagggctcgatttttttctgattctaaatcgagggatcctgtagtctctgatcaagaaaaagaacatgtcaatgaaaatggtgatgaccaaaacacatcaggtgtaacaggtaacagtggggatggtgaaggcgagttgcatattcctgtaaacaacggtcttgtttctcatgatactggtaagcaatataatcattttgttcttttcttttgatcatgaatggctgacttgaaatgtcatgcttgtctgtgtggtttattgaagttctccaatttttggcatctggttttcttcgaaatatgtaaatatgtgttcatattgccttgtttctgtgcaaagttcttctgtgataatcattaaattttaattgattagtgtgtctgctcataagtttcatatatgacacctatcgagccatttttaggcaagtggttgttgaattctacaaacgttggagaaactctcatggtttttgaaagaaagggtttcgttgtttctggtcactactgtgatgtattctttgtttcatttttatttcaatttatttaactagaggtaatatctaattatatgttatcttgtgggcatcaaaaagataaacaattggtttttaggagttctttggcaaacccaattttgacctctcgggtctattaatgtagtggctcttattttatgagttcttttgatagtgatgactgcattataatgaatcagagctttgatagatattcaatttgtcagtcttttaagagctcttctttcaagaagcttcctggtctttttttgcctcaatgaaactgagaaaacatttttgacaatccttctccgtcttccttctcagggagcaatctaataaaacaagtgtcatcagataataaaatggagcttgatcccgtcaggcagcacagacatttttgcccctggattgcatcaacaggcaaggggacacctggatggaaacagactttatctgctttacaacgtcagcaaaggagttcaccaccttcatctgagagatctccattgtcatctattattaaggtatttcttgaccttcattcttgctagcgtaagtgaagtgctaggttgtcgaagataaaacatctcatacttgcacttgattaattcactgccataaattacattcggccatgttcaaacctgttctgagtatgataaacgcacaaacactattaagatatctgctcacgctatgtgcttgctttctcctttgcatgtcatttttagtatattgttatggaactgttatttgaccaactgttcctttgcattataacatttctgcaggtagacgatccccttgcatctgttagaaatatttttatgtctccatctgccaaaaaaaggaagtgtgatgttttatcaaccccaactactgagaaataggcaaggattggagatctcatgtttggtgaaatgatcagatgaaagttaatttctctgatcattgatctcttatcttcagttaatttatctgcatttgctgccaaactactgcttggatgaacatggtgaaacttccattggagaatgacacattacctgctaggcttcgaaattcaagaatttggtatcgagaggttctttaaagcaagataagcggataattgtactacattattgtgttgctcaaaaacaaaaagagatgcaaatatcattgtgttactccagcaagccacaatttttcactaccacctttgagtaagggcgattgaaacctctttctgcaacaacggctctcttgtcacctatgagcttggccacccttcacaagtggacaaaattgttgttagtgcatttattgagaggctaaaaaggagtgtctgaaaatttgtgctgtcatggtttgtaagaaaataatcgagactttgaattatacatttttaatcctttccatattaatatcacacaattttgattgctttaattaatatgatatgcaagagcaagcagctcttacaggcgctagtatttaacaatgaggagtgtattatgacattgtgcagagacagagaactcatttaaaaatataagacttgaagcaattaacttacctaaaataaggggagctggtgttctcctgcacagtcttgaccttgctgatcttctccacgacttccatcccttccaagactttccccaccaccaaagccgagtcatccagctccggtgagtctttcatggtgatgatgaactctgtcccattcggagcggccttgacctcctcctcatcaatctcaagcttccctcctcttgcaaccaacttctgtttcggaggtggcctcgaaggatctctgacaacaaggctcactgtcccagccaagtttttgattccagagcatttttccttggctctttcccactcttcaagaagattttgggcctctaaattgcttccagttctgctcgccatctctgcgtcaacaccataggatctcaccccgccatgctgaacataaccaggcatgattttgacaaactccttccttctgtagctgattccagctgaaccactaacaaggttagctaatctagtagctccaagtggagtgtcgtttccgtacatcccaatcacaatccgacccactggttctccatcaatggatatatctagaaacgctctctttgttaagttcttgtcaccacaaatagaagcagagttggtatcattctcattttcttcagcttttgcttcagacgatctgaatggctctacgccaccttgaaatcccaagaggaaaagcaagagagaattggtacggattgtgagctgccgccgtgagaatttgcagcattgtttaaacttggaataagattgggaagtgggtaactcttggacttgtggattagccaatgttgatggtgttggaggaggaaggaactgagttgagggctgcaagaactttgggctctgtagcatcttttttcgtttggcttcttttctttctctcttcagtgaatatccctttcctttactctttttctggttgattttttctgttctttttcctccttttttcttcttgggttcttagcatgtaaagagattttcgtggataagaaagttccaaaatccaatccatatttgctttataaatgtctatattatgtggcacttagtattacttgctatcaatacccataaataaatgcgcaaaaaattattttccttaatggaataaaaacaagtattagtaaatctgtttttctccatcaaaaaataaaataaaattgctttgatctatgtttataaaattttattttccacatgtttggtaaatccaaagtaaaaataattaaaattgttcatcatttttttttaaattataaaacaaaataaattcaaaatcttaaaattcatgccaaaaaaaaacttattagggaaatcaaattttaacatgtattttttttatttttagtctttattttcgattgagtatttaagggaagagtaatttgcaggcgataataccaaatattgttataatatataatatgaaaatacagtatatatgaatgatatgtaatgcgaaataaactaaaaacatattgaaatgtatatgcaa

SEQ ID NO: 112348 - DNA, 3167 bp, Cannabis sativa
gcctaattattgaaaattttatttcttatttaattatttggtagtatcaaataatgatttactatgtattaaaaaagataatgatgttttactaataaactctctctctatctatatatattatattttttaatgatacaatatgacataatacatagagcaataatattaatttaaaatatactgtaataataataataatatttggcactacacttgtcgctgtatttaatcttttctggtaaattggtatatgaattagcaaaacaataatgaatgagacaaaatattgattagcataaagaaagtaggatgaagaagaaaataataaatgtaaaaccatcagtttaaaaacgacaaaatgaaaagtatgaacagtgaaaaataattatttaaatttgtatatatgcaataaatattttttcaaaaaaagtaaaataaataagacatcaaaatattgtataacagcactattcaactaaccttcttgcttctaaatataattgagctaatatttttttgtacacgctcggtctcattcagagttacaattgagctaatattactaagctactacacaaggaagaaaacaatacctgctccttctaagtcagctgtaatagtccccagtttcacagcaagaggatagtttgtttccttataatattcaactgcatggttgttgccacccgttccatcccaatttttccgcccgcaaagaatcacaccatcagtcaaatttagccaaagattctctgttttatcacactttgcacatttccaaccagatggaggaacaataacaccattgtcaatttgttgcaaattcgttgcgtaagcactaacttgctttttatccgctgtccaggctgcaacttgctctttccgctcagcaccctcagctaacaaaatagcatcaactgccaaccttacctgcagtatgataccaaaatgacattattgtttgatatagcacctttttttttagtttcttccatcaattatttttcaagtatttgaaccaaatagaaagtgcaccttctccggtaactccacagaaggaaatggaaggattgcataatcaggaagtacgactatgctgtaggtctcttcatattcaatttcattgttatcatagccaccatcaacccctacagacgatatcacaatgagcaaacaattctaccattatatataataagttgcacattcaaaacagtatttttaaaagcagcatgtttctgggtatctctgtacaagtctgtactaattcactatataatttaaagcaaaaattaaattaaattaaacaccatgcatgctgaagctacaaaaaaatcaaaggaaatgaccatctgcagcccatttcattaccccaagaaactcatcatgaatgttctcaactcatccagctcaaaacatttgaagattcttcctatggttatcatcaatttttaacaattatttgtaagtaataataatacagcactttcttatacatagtccatcataaaccttaaaatcaactcgttatttcagttttaagtttaacagcttgaagtctgaaaaacataagtgtaacttctcattaggtctcaatatcagaaaatttagattgtttcatcagctaagtgttcctacagcagaatcttgaaacaccaaggaatcaattctgacaaaaactaaaatataatgagtaaacttgtaaagtcataaggcaaacaacataaacagacctccatcatgaaacaaatttgggtctcttgacatacctatagccagtagagtaggttttttcagaggcctatcttcaggaaccaacttttttgtttgctttatgtgtaaatatactgcattcccagtcttctcatagttccaagcaacgcactcttttccaaaagcaaggaatgtattcatgtcaataaacaagccaccttctgacctctgaaactcataataagaacaattagaaaaatggcaaactccaaagagaaacaaaaattttcaataatacaagatgggattgcatctcaagctaaactacgcaccaatagcgttgagaaacacaaaatatcctagacctagagcttaaaatcagaatattacatgttcattcagtgataacggttttattcaagaccaccattgaaagaaaaaaaaaacaaaaagaacttgtaattagtgttgtacattgattttactattacatagcaaggtccctaacacatcaccagctatcctcttctctcaaatttctgagcattcaaacaggttttactatcaaaagaaagtcaaaatgctcccaaaataaatcttccattgtttaaccagtgatgcaatacaggaaattgcaagggaaatactacagtaaagccacgaaactaaagctcaaaagtaacatgaatgcactgttcaaaattgggccaaaaattagctgaatatattactgacttcttagaattttctagcaacaaattcaaaaaataagtaaacaaaatcatcaaatgcactaattctcaacttaaccgcggagaaaactaagaatccaaaaaacaaataagaattagaattattattattattattattattattattctttttcaacgaactatagcggcgaaacaaaagaagcttcccacactttctgagtaaccaaacaggtacggaaaatgagattaccggagtgtcgaacgataagcagcattcatgcttgtagatacggttggtaggctcggggatccgaacccgggagagattggatcggagcaagtccatggggttaagcatcgggtctggagaagaagagggctccagaaatgaaagttatggaagaaaagagaatatgatactttgccctaagtgaatgcaaagttgtagttatgagaatatatgagaacgagagtcacgtttcttatgctttggtcttataactagaactagaggacgacgacgactactaagtactgttgaggtgtaagctttacacaagactacaatacaacgcagatgcagtgctacgtttggaaagacgcacctttattctgcacaacgacatattaaggcttcaaacgaccactctaactatgaacgtatttggttgggctggctcattttaattgggaaacttacaaaaatattggaatttgggataatttttacaaaaa

SEQ ID NO: 112349 - DNA, 2932 bp, Cannabis sativa
cttaaaatgttataatcattattaaacatccattattaaataatctttagtgattagaaagaaaatgtaataatacaatacatgaaaaatcttaaaacttggattaaacatgtataaacatgaaagggttttcaattaataacataatatttccatgttattatttgacttatttttctttttagccaaatgtaggtttctataaggtgagagaatatacatatattttgttagtcctattctaaacattttcacactaatcttttgaagaagaattccctttttctatgcttttctaatattttcttttttttttgagaaaagcttttctaaattcaatgtgtgtacattatatattaattaattaattattatattatatgttgaaatatgacaaagccatgagagtgacacaattggtatatatactttttttgacttattaaatttttttaaacctctattaccaacttaaaataaacgtataagaaaagaaaactatcaccaaatgacaaaaatcacttcctcttttccttcccatttatgtgttagtggagtccttgtaattgttcaagaacgtgtcataatataacataaaattatcatgataaagaataaaagaacaaaatagaacagaacagaatccacttctaatttttttattttattttattaaattcaattcaacttgggttgaatatgaatttactttccaagaagttgaccaaacatttaatttggtctcccaagttcttcatctttggagtaataagtaataatgtcattgttggaaacatcaacaacccacccacattcaaaggtaacatccaagaaatagagcatgaaaatcaaaacaaaagatgagataaacatgggaagaggaccaaatatccataagaatagagggaaagagaagtagaaagctcttaaccctagtgaccaaaaaaagcttcctctattcacattctttgctacaaaatcaactgtcaaatgttggtgttgttgatgatctcttgatattttcttgtatggtacatttattaggatgcttgcatggctgaagtacctacaaacataacacaacatacatttaacacattatacataaaaatacgagtaatgatatgtgcatttaaaatatagacttaaaaaatacatatggattaaggaatcaatagagagtgtttcgcaaaaaataaactttgtgcccaccctgttatccatttacatgggaaattcctgaaccattaggagatcttatggctcccaccctttttaacaattagaggtaaaagatactcctcgtacttatcacgttctttatttagacagaaaatctctttcctactagagaagaaaaatgtgcatcactaaacattataaaaactactagattcttatattaatggttttacatatatttatatatgtaaaagaacatataccttatagattggacattgaataagaaggcaaccaagaagcaagccaaaatgcaaaagtacttgagagaaaagctggcctcacttctatcaccaaaaacaaacaaatcagttttgtttctaccaccattggtcattaacacagcaatgagagaactcaacataatggccgtcgatgccaagagggtcgacgccattatgttatttctcaacgtttgaacagcaagaactccgttctttgacacatcctgcaaaattaaacacaaaatataacatgtcgtttatcacaattaatccatgcaaataaaaaattaacaaatgtcacaccaaattgatctcattatatatatttcattctcgagtaatataaagcattattaatacaattttaacaatactatatattactcgagaatgaaatagaacagaactacatccgaaacgtatatatatatataaaaaaataataattgcttattacctccatcatggcgcggacccaataccggcgatgaatggcattgacaccgatgacagtcttagttggatggtaaataactcgatagagaagccaaccatggtaaaccaccatacccaaaattcctaatggcactaacatataatcaataacccttttctccatttttcttcttcttcttcttgaaatattcaatttgtttagattgtgtagtactattatgtttgtgcttggtactaataaaattgggtttcaaaccgcacaaagaagaaaagggaagcaaattcacatttggcttgtgaagaagtgaaggaagagtagtagtagtactataaatatgcatatttatagggaaagtagagagagtgacaaggctggcaaattggacctcatacgtgtaatgtaagagtaccccttattaagcaaactcacactcaacacactctttttatttttatttaaattatatttaaattaatttttttttttaattttttattaaaaaaaatagaaaatatcaattatgtgtttttgtgtgttttgttaaatcacaattcacatcctaagctcaatccctacgtacagttgacaactttttattcagaataaatagttatttgtaattaaaatatagtatttagatataaattgtcactaatttaattttaatcacaactaattgtgctttttgtgactaatatctttagtcacagattttttgtgataatataagaataatcatttataattagttattgttagacatttatatgtataaactgaatatacgtatgtgtatataatatatgtataatcatttataattagttattgttagacatttgtgactaatttacacacgctttgcttattcttaattttgtaatatttgtttttccaggtcatgcaaatatgttcttgctactattattttaagaactggaacaaatgcaacatatattataaccttattattattattgtttccaatatgtttttactggacataaaa

SEQ ID NO: 112350 - DNA, 1735 bp, Cannabis sativa
aaaaaaaaaaaaggaaaagaaagggaaaatagtatgattatgagagagacgcctctctaaaaagaatacctattttctcgcattcaaaacgcactttaagtgccacgaatgcattgtaagaggtcgagcaccacctaagggctaaaactccctcaagaaaatctgataacttgagaaaggctgagcgcgacccaagaggctaaaaagctcccttaacatccaataagtagccgataagaggtcgagactgctcaaagagtcgatactccctttataataaggttacatcaaaaaagaggtggagagagcccaaacgaaaaaaaactccctcaaaccaaagagtaacactaagagtcactcagccaaagagtaaccctaagagtcactcagtcaagatcagttttaaaatttactcttgagtgactaaaagtcactcagtcatgtttgtaaatgttcggccgaagagtaaccctaagagtcactcgaccatgagtgtttataaatgtcactcaacctaagactaaccctaagagtcactcagccaagatcaattttaaaattcacttggtctaatgactaaaagtcattcagccatgcacaatttcaaatgtcactcgctcccccccccctaaaatatatatttgcatttgaacttaagatctcttgaaaataaggcttgaagttcaccacaaagtcaaggaggaaattgtgaagagaagttgaaagaaagaggcctcctatatatactaagtattttttttgaatgcctgccaagggaaaagcttacaattcatttaaaggacatcagagtaactagtccgcaagaacacttaaaaaatttcttacagactagggggcaagtgttaaccccgaaaattagcgttgctaatcttgaggttagatggttaataatcgagggattaacaagagcgtactcgacaaggtcacttggcataaacgtcgagaaggtcacttggcgtggacctcaagcatgtcactcagcatgcaccatgccaaagtcacctgacatggacattggcgagttactcggtatgcaccgtgtcaaagtcactcggcatgcatattgtcgagtcacttaattagcatgcaccatgccaaagtcactcagcatgcacattgtcgagtcactaggcatggacctctcttggatcactcgacatgcactcctctagggtcactcgacatgtacattatagtagtggtgattccctctcatctggcaccaagttactggtggatggtcttttctacgatggtaacatgtgtgcaaccaacttagtggacaacaatatgtgaactgaaaatatgtacaaaaatattacacatagtgatgcgtggtacttagtttaggtaaataatagttgttaaaaaaattaacattatgtccttgtgtgtaattttttggtgcacaatattatttttgataatatagattattaaatttgaattatattattatttatattgtgttttagaaaagaaaaaaaatattcatttccaaccataaaatataataatgttaaattattacacttcatgtccaacaatatgaaaaaatttcgattgtgcgatccttaaaaccggacatgattgtggaactttttcatgtctccgtatatcatgttcaacacaaaagggacatggtagacttaccatgtccaactttgatagcaatgaaaggagttttgttgtgaaaattatatacgcaagtata

SEQ ID NO: 112351 - DNA, 2209 bp, Cannabis sativa
aaaaagaaaagaaaagaaagaagctagggcttgaaaataatttcagctttatcgagtttcaaacccagtcactcaagtctccagagtaagcaaaacaactcaactcaactcaacacttgtactgcaaaaaaggtaaagctttatggctctcttgctctttagctttctttctattgtggttaattttgatatttttctctgttatgcttttgaaagacttcaattatcattttctgctgtttggaggatattagcactacccatttttcttttcgggattatttgtttgtgaaacttagataatccttctttgtctggtgtttttcttgaattttcaactaaaatgttgctactgcaatgccatattcaacaattatatgatattttttttcgtgaaattgatagattttgtataccattcggattgtgttgggctttctttattttacactagcttgcagttataaatttctgtaaattgaaatttaaatggggtttttaacttgtaggaaaacttgttttaccaaaatcatgtttctttctgtttatctcttttcctttaacaagaaacttgtgtggactgttagcctgttaggtgaaattggttgtagtcaataaaccattgttgttttgagcaaattcttttgagtttttctttcattttattgaactttttttatcgtccagtagtgtatgttaattactgcaattgcaatgtggttcgttgattaggtaggagatatgtcttctgatacggggaaggaaaatgcatctgtggttgactcatcagtcactgaatggaaacaagacatggggaattcagatgaccctggtaataaacgatgaaggtgccttttattttatttgtactttccactttcttgttcttaagttggtaatgggatggactatggtgtggattcatttgatagagtaacggtttttttttttttcttttttgatcaaagtaatgattttttttttgttactaagaaatagggaatggatctctcaatagagattttacagcttctttttctattttttcctttatttatttttatttatttatttgtttttattttcaagattctaggattaatatgctagaacacctgtggccgatgatagtgatattcgtagatggtggctggtgcatcactttgtagcaaccatgccaaataacttttaagagtattttcaccagaaaatacaattatgtcaattaacttggaatgaagaatatggccatgttgtgtttggattcaataagattttattttaggactcatgttcctgcctcctggtgtgactaattctttgaggccaactttagccgatttcttggcttagaatttgatggtagatgcatctgctggaaaatagtgttatacacatatttccttacaacatctttacttttgtttactcaatcttgaaactgatgatagttttgtcttacctttgtgcttgataattttattttgggatattggccccaaaaccacctaaattatacgatttgtgacacttaaccacataaacagattttttgacgcaaaactacctaaattgtacatctgttttggtctttactcttccgtccaaaatgctccgttagtggacataccacagtgtaccttgatgtactcgtggagaatatttagtggttcattaatttaaatataataaaaattattttaaaattacaaaaaatcatttagaaaaaaaaaaaattaaaatacattttgtttttgttctctttcttctggaaccatcagacccccccaccacataacatcttcttcttcttcctccttccttgttgttcgtcttagctttctctagtacctttagagtgacgaagattgtaatgtttctgtccaaggcttcagcgctaagtctagggatgttcaaataatccgtaatccgtggttttaaaccccgaccaatccggacgaaaccatttgagaccgaaccaaatgaattcagtgtgaatgatttgatcaatccggaccattttaaattccctggttcggtcacagttttagaaatctcggtagcggttcaaatgaaactaatccgtataattattatatacacttaacatttttttttggacaaaatgttgatatttgggaacaactttaaatagaatattgatattgagtttatattattacgataataattttttattgttacttat

SEQ ID NO: 112352 - DNA, 7610 bp, Cannabis sativa
  modified_base (7516)..(7525): a, c, t, g, unknown or other
atgcttttcttactaagtctgttgactcacagatattgcttccatgtgtaggtaaagggaaggcaaagctgaacaatagtgagttttgagcttgacgatgattttacatgtcgagacggtgcgacctggaaagttcggtctcgggacgacttgagcttcactttgtggttgttgtgtgacatgtctataaaagctatttgggatgtaaattttgaaaacgggatcctagttttgtatatataaatatatgtatatttttataaaagtttaaagttaaatcaaaattttaatttatcatgatttttgagaaaaaccttgattagcaaaggtgtgcactgcaactaaaaagtcactatagtgtgtctaatcagtaggactttacatgtgtcacccatcctatcatctttgtggtcgagtaagcccacatgggaccaagaagatcccactcaaacttgggggcacatgttatccaaattttacacaagatgatgtggcatctatctaggtgacacgtggagcacatttcataacctggatgaataatttctctcataataagtcgtatagggagatttaaaactcaaggtcataaataagagtcgtggcatccgagaagagtacccgaagacatccgaccagcttccatcaagtaggtagctcgtatgcaccaaccagggaagatgagttaaatttttttagagatatatcttatatatcttcatacttgaaagatacaatgctatcattaaatttatgggatagattcgtatcattaaagaagaaaggaaacctgcctagtttcgtttttcgtttattctaattatagaaagtgaaaagatttcccattttatttcttattgattttgggaagctgatttgatgaaattaattcctataaatagtggactcatctcactattgagggacatgaatttcattcgtagataatactcaagagagaaatctagatttatgagtaaattactcagatctttagagaattactcagagctttagagagagatcaatgcttttttccttctcaactcacaagtcaatacaagtaaaatgagagtagcctatactaccatcacgccgaacccctataacaatcctggtattttctttactttatccttattattattatttaattattcttaatcgcttaaacttgcctaactatcggttgctaaaagctagatcaataaataacattcattaaaaaattagtggggaaagtagggaaagtattccatttcttttttttcttttttttcttatttaatcaagttctccctttcctaaagtaggaagacatggtcctttaccttaaactctatgtctctaggctttgaatctgcataactttttttgcctactttgagaagcaagcatccgaggcttgatctgtttttataacatcactggtcctctgaacttattcaggactcaaatacttttttccccagtttcatcctagtgaatcagaaaacgaaatttcctaccatacaacatctcatagggagtcatcgttattttactctgataactgttattataggaattttaataaattaagtgaataaatataagggaatcattaccttattcttattgtttgttggtaaacatgccattaagataatacatgacgtatgtaatatagttaaagaagaaaaatattagaatgttaagaaaatataatattgaatttgtaattaaagttgttgggattatgggcatttgattaaatttttttattattatttagttataaagtgtgatatactttttttagcaagggatttcgcctactcttaaattatgttagaatggcctatgaaaataatcacaattcttaaatcataaaaactttgcaagctttttgattattcatactaactagttgattagtatttctaataataataataatattaagttgctgctcgatagtcgatacctaaaaaaatgaggtactaatttggagtgaaaaagtcaaatagaaaaaagtttgatgatgaaaatttatgtgtgtaaatagcagaatttttataattttctctccctcattcttttaatgtcagccacggtttataagggagttgaagtttggatattgaagatgtttttgttttaatcatgaatcgtgatgaatggacggctttgaacgactcgtttgattacgttggtagtgatgaggatgttttagaaggtgatcttgaagcaaccttcattgatgttggtaaagatagtttcgctaaaatttttgtggggagattgatctcttataaagttgtttcgggagaacacatgactcaaagcattgagagtttttttttaaaaaattaatcgctcagtgactgtcaaggcagttgcaaataagacattcttgtttttatttttgcatctaaacaacaaacgtaagtgctttggtggtggtctttggttattggtgcaacaattattggcccttgaagttcctacaggggttggtgactatcatactttggcctttgatagggtaaaattatagattctaatccatcttgtgctgatttcatgtatgactgtgaatagggtaagtgagttagaagagcttcttgcaccggtgactaaagtcggtgaaaattcttccaatgattgcctaggaatatgtttatgtgttcaggttagaatcgatatcaccaaaactgtactaaaacttatgaaagttagcttgattaaaggaaatgaaaaatcaaagttccctcttaaatatgaacgacttccggagctttgtttttgttgtggtataattagctatctgttgtaggaatgtggtatggtgcagacaaccaaactgagcggccacaagtggaaatacaatgatttcattcgaggagaccctatccataagtcttttttctcatcgaaaaggtgtcacaaggatgttggaaggccacctcgtactagtaatatggtgcaaggtggtacgttggggaaggacatcagacttatggcatggaacacagcgccaaagatggtcaatgcttactttctcagacgataataaagtttcatacaggaaggtcattaatgcaaaatttccatatggtgcattaaagtctccttccgttttggtaggtgatcaaaataataaaggaaaaaatattgatgagattcatgacttatctaatttagtgatcaaattggacaatcaaaataatgaaaagtttcatatttccaataatggaaaaatgacaactctcgattgatttaaaatatatttttttcctctaatttgagtacacccttaattttagattaaaacttatctatcattggaaattttgccacacactatgcatcaaataaggaatttgtatcttctgtatcggatggtggagattttaatggaaaaagttgtatttttgaaaaatattgggccaaaaaatgatgaaatgaatgtttttgggtctatcacctccaagggtcgcgtactacaacttaaaatcatatgatgcatggggagccatcattttcatcgtatgcgcatgggagaggtttggttaaactctccacaataaccatgcaaggatgttttggaaaaagatatgttaccatccacctgtgttgggagttaaatgatgaattttttcaacgttcgtaggaagtagggtggctatgaatgaaaagaatgaggataaggggaagatggtggctatgcgggaggtgggcgacgagataaaatagagagggagggaaaaaatttgggtaaggagggttttgtttcgtcaatctcttctttgaaattttccaaatggagggcgatggaggtttgtttgagttaggatgagaaggttatggggctagaacttgcaagggaagagggtgtgatggttagtgatggtggtttggaagtaatggtggataagaatattagtgttctctcatgtcacccgttgagatgaacaatgatgatgatgtgacttctgttgacttagttgtgcctgctttgcagagctgcctctctttatgaatgtgctggcgtggagtgtccaaggcgtgggaaatgataggatgtttgagctctacatgccaatattcgggaagttgatcccgacattatgttttatctgaaactctttgtacagtctctcaaatggaattgttgagagtttgtttgagttttttttagaagttagtaggggagaaagttggtcataagttgttttgtgtttattttagaaataatattttaacgttactttactcaggttttcttgagaccatattaatgtgctagtttacaagatgggattggttccttggcattttacaaaggtgtatggacatcttgactcttcgttacatatcaaattctagaatctctttccccatattgctcataataacatgtttccttggctgtgtaggggtgattggaatgaaattttggctaactctaaaaaggattaaggttcgggtaaacccaattatttgcgatttttttttgaaaagctcttcaagattgtctccaacttgatctgggttttgagggtcctaagttcacctagtgcaataaacagtgatattcttcctttgtttagtaacatcttgataggtttgttgttcaattcttttgggcttaacttatatctaaatactttttttctctcatttatcctcaaaggtttggatcatatgccaattatgctatcttctatttttgtttatcggaatcatggcaaccatgtggcttattctcgtttccactataaaaatccttaggctgatgaggaagatcgtgtggaaattgtaatgtctaacttaatgttcttgatgtgggtgagaaatttaatgtctagaataagaaaattcagaaaagatactacactgccattaataaaaagcttaaacaattcgttattatgaattctaatcttgacagtgttagttgtgaggagcttcgtaagattcaaaaggagcttgatgttcttcatgagaaggaagagaaataccggtcttccagggaaaagaatgattggctcaagttaggtgacaagaattctacgtacttccacaagtgctcttctagtagtcgtgccaaaaataaaattctaaatctttgaaataaagaagggattgaggtgtcaggataagaggaaattggggttatttttcaagattatttttctactttgttcacttagaaccaacctcaaatgatgctttttccaagatcataactcagttcctatgaatatttctaatgctttggatgataggttgattcgagaatttcatgttaataacattaaagaagctctctttaaatggaccatttgaagagcccatgtgaagatggtcttacgactggtttttattaagagaatccagataatatggtgtttgacatcatttcatttgccttggccttcctgaatgaggtctttagaagagattgtgagaataaattgttgtttggtgtttcctatggtcgaaatgctccagttatttctcatctcttattttttgttgatagcttattctacttcaaggcttctgatgtgtgttgtgttagattcaagaaaattttgagctagaatggggcaaccttgggccaattaattaactttgacaagtctacagtttgctttagcctaaatgtgcctagttccgagaaagctaatctagtgaacttgttgggagttaagggggttgattcctatgagaattacttgggccttccttgttttacgggacatagcaagatgggtttgtttgatgtcattagtgatagaatttagaaaaagctcaatgggtggaagtcaaaattcttctccatggaagtcaatccattccaacacaatactatgaatctctttaagcttttgaaagcctttatataaaatgttcattttaagtgtactaagttttggtggggtagaactgatgttaacaaaaagatgcattggtgtacttgagaaaaaaatttcttgcataaggaggatggtggtatggattttcaggacctacggttatttaatcagtatcttctagctaaacaagcttctcgtatttataatgttcctggttccttagttggtcgtgtgttaaaaggcttgtacttctaaaagagaaactttgtcaaaattaagaagttcaagaaaggctcctttgtgtggaacaatattttatgggccaatgaactctttgattcaagggtgatctggcgtgtggggaatgggagggacattatcatttacttagataattggactcctttagagttaccctctatcttgacatctccccatcgaattgatgattaaaggaagttctctttcttaaaggatggctcaagggtgggataaagactttattcgatctagctttttggctagtaaaattgaggttaccctttccatcacatggtcttcaaacgaagtgccaaataagattatttggaactttgagatgtctgattggttttcttttaaaagtggttattggttggctctttgcattttggtcgtgcctcgtgtttctccgtctggggatttgtcgtgttggtggaaaaatatttgatctcttaatattcctccaaaggttagaatttttgcttggcaagagtcccataatttgattcctactaaaattaatttggctcattattgtcttttatctgcagtttgtcctttgtgtgggttggaaggagaaactactcatcatgctctttggggttgtatttctctacttccttgtaggaaaatctgtgagtttatgttggtagatcctctggttaacccaatgaattttattgaatttattcatagatttattgacacccttttaaagtagatgactgaactggttacggtgatcgtgtagagaatatggtacaagcgtaataaaataatccatcacaatgttaatttgtctcctgctctcaatgttcattgggctcgtgactttttaggaacgtttcacaacacgcaatgtctgatgggttgtaccgctcctccttcaccagtggtggcaccatctttggcttgcctacgcggtggcaccactttccccaggtagctcccaaatggaaagatcttcctattgattgtctcaaagtcaacacagatgcgactctaagctcttcaagtaattgtagtggggattgttcatgcttcaacgaattggaatttggatggttgttttctgcttaaggtggctaaatctttcgctattagaaaggctttgtcccaatatatttcttttgggtatggagactatcattattgaatctgattgtttgagtattgtgcttaaaattaaaaacaatgtctctgttattatttccttaagtctagtgttggattatattgttagtctttgtaataagctcaagttgttagttttgtttattgtaataggtcttataatgatattgcttatacattggccaaacttgctttgactgtaagtagtggtatgtgattgttagggagtcctatttgttggaattattttaccnnnnnnnnnnatttactaacaagtatgttatttaacatcctaatatgaacttctaaaacgatatgaaatagacacatataaagtataagaaacct

SEQ ID NO: 112353 - DNA, 5902 bp, Cannabis sativa
tgtacaagtttgagttttttagcccacacttagtttagaaagaacaaagacctttgtggaagactttggttctttagttttctaccattgaagatcgatgtcaatcatttgttattgctttacgacaactgttaggattttatgccaaaattaaaaccctaattcaatttgtaaccttaattattatcaataaataaaaacgttcagtttttagattataaccatgaaaattgaaaagcaaattttagattttttttgtgtaagaaaccgaccgaatcgactgttgctcacctttattaaatcgaccaaacagtagagtaaaacgatcgagttttttaatatttatataatggtcggtccgttttcaaattataatcctgaaaactgaaaatcaaattttaattttttttttttacataaaaactcgactgaactcaccgttgctcacccttagactatagcaatgttcttctaatataaaacataaaacgcagaaattgtggagtttgagtgagcgtgatttgctcaatcatccgtcatcatcgctctcttctccgcccacgtggcttgtcccgtgtctctttcccacctccaaaaatggtttttatctttccactttttgttttactttaataatattcttttatttttctactatattcacactgtgtatggtttaactaaacataaaaaaaaaaaaaaaaaatagaaaaaagatatctgggagaatttggactccaactggtactactacttcattcatctgcctcagtctgtctcatttcgacattgcccgtctcatctctctcctgtctttcattttgtcatttagggttttagaagaaaacaaaagaatacccagaaagagagtgtgtgtgagggggaatgctgtgtagccgtaaaatgttaaatttctttataagaaaagatatcagaaagattcttaagcggaaagacagtgatgctggtgaaagaggtaaatactaagtagtgtagattaattaacttcgttcttctgctttaatttcacaccttttttaaatttgtttgcttctcatcacatctttctcatttgggtttttgggtctgaatctgcgcaagcttaattcacaatgcactttgtggagcaaagtcttttttttttttttggttgatctggctcacaaggatgcgttttttgtgattgtgattggaagatggtttcgtaattgttttttcaaaatcttttttcttttattttggtaataccagttcccttgcatgctttacttgtttatggttgatttaagtttgtttttgtttcttaattaagctggactaattaattaattaattaaaagtgtgtattaagtgtgctgtttgatttcatattttgtttaaaataccagaagttcataactttgcatgagtgagttttgcagtcaatttgctgcttagtgatgttcatagtttttcttaagctctaaaaacgttactacattctccttgatatatgttactgcattgggatctttggttgatgatattaaagtaccctgatttgtaaataactatctctgttgatatgatgttttagggatgttatattgtaattaataaacaagtgttgcttcgaacgtttcatttgctaattaatttgagagtttcaatctattacttatttattctgaaaataaaaatgtgttttttaatttctttctattttgagattttgtcactgaccaactttatgctttaccatatatatagctttgaagacaatgaaaagttgtatgggaaacttgtttctctctaatatgtttcagtttttctcattggtcatcaattacattaggtagagcactagaagatttaagagcctcaatcttcaatgaacttcgctcatcagacggtgcgaaacgccagcaacaacgattatgtggccctgcgattgctcttaccttcaattttgtggttgctgttggcattatttttgtgaataaattggtttgtttttataccagaacctattgtctttctatactaaaaatttggaagtaggcatttagtaatttgctcagctttctttttctttttgtcaggtgcttaaaaatgttggatttcattttcccatactccttagtttcattcattatattgtaagctggctattgatggccattctaaacgcattctctatcctccctgcatctcccgcaaaatcaacccgttcgtctactttattcgctcttggatttgttatgtccctatctactggccttgcaaatgtcagcttgaagtacaataggtcagctattgtattactatatactttacataagtgaactaaagtattctcttcagtcttgactcacgaagtttagtgaatttgtgaatcagtgtgggtttctatcaaatgtccaagatagcagttacaccatccatagttctggctgagtttgtactctataagaagaaagtttctctctttaaggtgctctttctcttttttttttgttttctgtcaatatgctcactgaatttctggttacctggagtatttcatctgctgagtgataatattgaaatatggcattaactcatatcctgctttacctatatggtggcttggagaaatatgtctttaaaaacattacattcttgcttgtctgacagtctgaaaccagaggaacttatatatttttaatatctgtcgcacgagctataaaatactatagtaatattattttataaatatgtatctgtttaatatgtctcacacttggaaactgcataatggcgttatctgtgtattaggtttttgtacctccaatatggattcaatcattttgaaattgtagttctgttattttctagaacatttaaacgcattaaagatatcctatatgatatgtgtgcccatcaaagtgatccacattacttcttttaggatctatctgtgtaaaaatattgagattttttagttgctattaattgttctcttatttagttaatgttttaatgagtggttttagagtgccacaaatagtaaaaatgttcgtttttttttttccttttcattttttaaagttgttcttgttaaaactttcaggttctagcacttgcagtagtatctattggtgttgctattgcaactgtaacagatctacaattccatctttttggtgcttgtattgcattagcatggataataccgagtgctgtaaataagatcctatggtctagtctacagcagcaggagaattggacagctttagcgtatgtgttgtgttgcatatattaacttctacttttagctaaagaaaggtctgattgatttccttgtgctaatattgctgtgctctttctaactaagatcccttgttggacaggcttatgtggaagacaacaccaatcaccttgttttttctggttacattgataccttggttagatccacctggtgtactctcctttgattggaaccttatcaacacaagtgcaattctcatgtctgcttttcttggtttcttgcttcagtggtcaggagctttagcacttgggtatgtgtatctttgcttatgtttttaaaatatcctatctaggctgtttaatttcttgcttttgattctttgtggccacattagttttagcttctaatccttctaattaatggagagtgtaaagagtttgggttcttctgcatgacaccatttagttttaggtgatttagtataaaatgtgaacatggatgttcagatagtgtattaagaatgacatggtaaggttttcaaaaaaaaaaaaatgacatggtaagcatatgatggttgtgtgtgttttcagtacggacagtgacaagcttgattcttggcttaataagtcttgttgttacctttgttctatagtattacgcgatcttcacgcctagagttttgtccaaagtgcagttgtttgtcttgatgttatgaaacagatatgactgaatgttttgttttatatcttgagtgtaccattttcatggaaatattaacgagttgaatcttgatttgagtgtatggctctgattcggttcccgatctttcctcttcaaacttatagggctacgtctgctgtttcccacgttgttcttggccagttcaaaacatgcgtcgttcttcttggaaacttctacctccttggttccaatcccggtctaacaagtatcggtggtgcatttacggctattgctggtatgactgtatacacttacctcaatttgaaagtacagtcaactaaagcatcatctagacaaacctccttgttacccaagtccaaactcagtaaagagaacagtggcgtaaatgatgggaattacggtagggaatctgtttaacaaacaaattttttttgtctccgtacacgataaaaataaaacttatccactaatttgtcattgtttgagttgactatttatagattgaaaattagttaatctgatttagataagtgctcttcaattttgtgttaataccacaagagtggtatggtgttacttgtgagtttctggcaataccttttttctaggggcaccttctgtagattgttacggcacatggtgttgtattcaccctggattgagcattgtacatatcaatagccattgcattaatttatttcttctaacttctgctactattttgtacaacttttttttattagtaacttttgagactcgagcatcaagtaggtatgtttattgtgtaatacttttggtcctaattgagacgtgtcaaccaatcaaaatctcgttcttttttatgggagggagaagtgtgcccaggtttcttggtgagatgattgaaatatcagaatttgaggctccaattaaagcaaacattctgttgaaggtgaatttgacaatgattactgagttgaatttatttacacgtcaaagtaattacatctcactccttataatgtatcttataatagatttattattatttttttttttaaagagaaccttataatagattttaattgtacaatttttcttaagagtaaaattttgtggttcatttatatttttttgtttctttttatgtataaaactagaaaataaaccactctttgtttgccacctggataaatttaatccgaataaatttactaagacatatcttaaatacttcttcatcttaagactcatttgccactcggccgatgacgaggctgtcacgtatattgggacaaaagcaggacaatatttatccccaagtcttgctttgtaactttgtaaaatgagacttgagacttgcctttggcctcggggagtgacgtaatcaatattctgcacgcgcgtgggctatttattacttataatctttctacctcatttttggcaggtaacgatttaattcccatctgttcaatagaacctttcattaatgttattgttaaaggggtactcgagcatttcgatcgcctcttttttttttttctaatcatctgccaggctgtattgacctaggggtgagcaacggtcagttttttacacaaaatttgaaatttagttttcggttttcatggttataattcgaaaatcgaccgaccattatacaaatgtaaaaaaaatcaaccgcaaattttattttatttttttttaaaaaaataatttttaaattttttataattatttgaaaactaaaaaaattagagtattgtatcaaatataatttaagaataaaactttcttagttaaataaataatgtaaaataattttttttaaatttgttcaaattatttgtgttactaatatggtattgagatatattaaaaaacttgtattattttatgaatgtgtatatataatatgtaaatgcatcaaactataataaaataaagcaatgaataattgacactttaaataaaaaagatataagt

SEQ ID NO: 112354 - DNA, 1876 bp, Cannabis sativa
agtaatagttgagaaggtttagccgcaaaaaaactctaataaaaatgtgtaactctaatctccttttactcttaaattagaaaagatgttacttgttatcttgaaatttgcaaagatgacgtggcacttggcaataagttgacatgtggcaaggagattgacactgggtagaatatgacaccagtttgttccaactaactcatatgatgatgtcgaatggccaaccataggtattcgccgaagatatgtccagacattctttaagtgattccacaataatggaccaattagtattcctgtttttatggaatttgatttaatagatagagaaaactgtgggatttacactcaaacatttcctaatttatcttattatgcattgagaacagagagaatactttgaaatatttgtaaactttttaagagaaattaagaaattcatgtggcctgaccttgtgattttggtattctttctaaagcaatacaacaataaggggagtaggctattaccgctgaaagggaccggacctttataaatttcgtgtgtcgtttacatttttcacaatctttgttattgttcaaatgcttacattatcattttattgactccgcatcctcgactagaaatgaggtcaacattttggtgctttcattgagagcctgaaatatcatctttctctcataaacatttgatttccaatcgacacttgattcgacaaccatggttttgacaagaagatccacattgactgaactgcgtgatcctatggctacaaatcctaacgttcaggcatttgttgtttcaggggtagacaaccccaatactcgactacctcctcaaggccaccaacccacagtccctacaagtactaacaccagaaccattggggtcactatccacatcattggattcacacttggtgttcaagaaactgggaggaccagtactcaatatgctgcaaagactggacccagcatttgttagccgtttgtaggagaaccccaaatagatttggggataatttttagttggaattgagagatgcactaagacaagtccagacgcataccagcacactccaccataaccaagaggaaacacataccgttgtgaaccatgcattcaaacagcaacagcttgagttccaagagtgatggactgccaagctcagtcaacgcgtgcccaacaataaataaattgccgctctagggaagtaaccaacttgatcaggaaatttacccaacaaactgcgggcaaagacaggaggtccagtcacccagacgagacgctatagtagaggagaaggtccctacgtcctgagcaaaggattaaaatatgggctggaggaatgccaaataaactatgaaccttctagttctagaccccaggattaaaccattggtcgccctgtagatgatcaagttttgcctagtcactacctcagaaggaacgactagactaaattttgatccaaacctgagggaaggagagaagaagtacctcatcggccaactggaggttctcggggaggtggggctatataatcaggatgaaaggggtccaagttcatggtcagaatagtatgccaaccaacaacctcgacaaggtcattcaaggtcctagagtgggcagtcataccctagcaggaatgatggcagggccgccagtgggccccgtaatgataattgatggcgtgattatcgtcgggataacccgaccaatgatggtaatcaaggtaacgcccataatgaaaaagatcctcctaggccagtaaggtgttgggattttatgcacccatttcaatttaatctgatttgttatcaatgaaagattacaagtcatttatgtttacatgtagttttcatatttatggtt

SEQ ID NO: 112355 - DNA, 2945 bp, Cannabis sativa
tttttttgaatgaaagctgcaatttcattaagttaaaagatcatattcattaaaacggatgtcaaattaggagagactgatgttatagtattagaaagttattataaatacaaagttggatgactaatcatataaattgaaagttgtagtctcccttccatacaaagagagcgaaaagaccaaagtggcattgcttaaatggtttctttttccaatttagttccgccactaatttcgtttcactttcccaaataccatttcttttcaacacggaaaaaatatacatatatatcaaatttctgttcatacctttatagaaaattttttgaagagaaaaaaaaggtaatcaatgttgtttctatctcttgttgtagataggaactattatatttcctcaaaattaggaactatattaattaatgagaagaagaaaacaattaaaattataaaagacttttttttatatatataattagaaaagaagatcaccttgtgatctctttctcattctttctgtgccattttatctcatcatcccttaattaagtaattgatatgcatattgagggttcccatcccatctgtcacaacaaattaacctttttaaataatgaaacataattcttcccaaaaaaaaaattgtactcaaatttaaattcttgacccaaataaattagaatatcaataaagacattcttatggctacaccaatataaaataaaaaaatgataaaccatttttcttagttcactattttccatgcaatttcacactataacaaagtgatctgatattggcttggaacaactttcatatataattaaactaaacttatggggtaacatttagaaaagttgcaaatggcttcgaggcagtaattattggtaaagactaaagaaagagtaaagactatggaattggaaggtgataattctctttctttttctcctttttatgtgtgtgttaaaggaaaaaagtttaatattggtattggtgtgacactatcatcatcattatcatcaatatcattttattaatattcaattctacgcttcacaccatatgaataaataaataaaggaaaatatatggtaagagattctagtccacatcttttcttgttgttaaattttatatagtttatattatttgagtggtactgtacctgtacagagaagatggaattggttatgaacattaaggatgatccaatagtaactaagcatgtgaatcagaaagaaaattcattaaagtttctcttcactcacatgaacatataataaaatctctctttcatttttttctttctgatctctttcactttataatattttttaagtaaatttaatgcatcaaaaaagaaaaagagttacaaattagaacatgtgactgtgtgactatgatgccaattgcctaagtgtaaaacacatgtaaagtataaacattgaacttttttaattaattttatggtaatttaccaaataatctgactaattagccaagtgaatccaagctgtcatcatatatacacagaaatacgaccaataattagcaatataataatattgtcttggtcaataagcatatgccatataatacccattatataacaaaccccatttctttttatcttttttaatcaaaatatgtacaccatttcttttcccttaaaaagtttatgtcaaaaagtttaattaaaaaaaaaatcaagatatagacattcctctaactaaagtttgatttaatttggactgaaatagttaaccaaaggaccaatactcgtgattaacttagactctttttatgctttttaatctctttatttatctctctatttttttttagaacatagtcattagtaattggagagagaaagtactttgattataacttgctcaattcccggatctttggttggatcacccttttttgctgcgttttatacattagatcacacagtgcataaagttgggtcgacccgatccgacccaaatttatatgtaccttggctttgaggttaaatgggcaaaacgacaatgttttcgggtgtggtgtggtcactattaatgattgagatggatctcttacttttataatttttgcaatataggaccaaacttatttttctattaattttatattactgttttcttttacttcaagcgttattagcctaaacatttaattgaaaaatgaaagagaaaataactaatttgttgcaaattgatgttatttttctattgggattgcttaacttattggttagcatggtagtgggacacttggtcatggagaatattggaatagatttttgaagaaacaatgtataaatactacaacatataattgaattaaaaacaaatttgaaaacaagtgattatgatgtcgattaatatagtttttttatatataggataggtcaagaaaaaataaataaatttgacgaatttcaaatttggtgggtcaataatatttaattaaaactatataaatttttaagagtatttgttagcttatctttatcacataacaaagaacaaaaaagttaatcaattactttacatgtcataattctaatattttcatttatatatttgcggacaaaaaagaccaaattggttgtgtccttaccttattatagagtcaacaaaggtaaaagaaaagcaactagctttgaaaggtataataatacaattttatccttgaggaaagtctgccataaacatactacgaacttaggccttaataatatagccaccaaaaaagcttatcaagaagatggcacaaaagaaaaaattaaaacaaaaaataaattgagtaatttatagtataaatatttgaatttaatttgaaataaaaattaatttttaaaattaattttttataataattaaattaaaaagagtaatttgcggcaaaacccctttaactatcaatttacttgc

SEQ ID NO: 112356 - DNA, 10378 bp, Cannabis sativa
cacacacacacacacgacacatacaatgtagtgttgtgtgagattgtgatcaactctatctcaattacagtgtttcatgggttgagaatactatacaatacataaatttgttcatcttatagaatttaataccccacactattcttgaccgttgaggctggtttggaagattgcgatgtgaattcattagtgaagttcttggattggatgatcgtaattatactaaaagatagtgaggatgccctcgtagggtacaagaggtattgtctctttgggcttatggttcatattggataaaactgtttttatcaaatccgctttcgctttctaactctgatatggactataaaaacaaacaagtctttgctttcagagtttcagagttagaaaatatttcagtttattttataaagagttcaacaaacttagtagcttattcatttcaagaatttttaattgcagtataaggaatgtcccaactaaattgctatgatgtttggtaggcaaatttgaaggttaataaaatttataactacccattaaaacaattgcagtagcttattcgttttatttttctccaagttatccgttttccatgacacgtgtctatatagtaagctacaaacttaaacaatttaatagatataaatatatcatgtcaccaaccaaatcactgcctgaaattccaagccattttttttgtcaggattccaagccaatttttattaagcaaactaatgactaatgtgatagcatgtaggtggtaacgatatactcaacttagcttatgacaatgcggtcgaactgaggcttgtggcgactatggagcttctgaccacatgtttgttatcgctatccttccaactgaggtacccaaaaaccactgtctctttcaaaattattggaccttctataatcaatttgaagctttgcttctcgttcttctcttggaagaccagcttatctgggttaacacaaacattcaaacccttcatgggagtcacactggccacgtaggttgactttccctcgcctacattagtaacagtccttcggaactcccgtacttttttcatagtggattctgaatcatttggattgaaaaacgctatgaaggatggatagttaagatcaatcgacggagtcgaacaattcaatgaggttgacatggtaatgattttgatttgcttctctgtatagtttagtgcacaaagaagattaacataatcttgagaacctacttcgtaaattagccctgggtcaagtgccttgttagggttaatatggcctgctcccatggctagcggagtggccggttcattacccaagcctatgtctttgatggggccaagagtattatcatagttttatgaagtggtcattatagctgaatgtatggcggaggggctccagtcccgtctcgcacctttaataagcgctgccaccccggctgcatggggacacgacatcgatgtccccgacaacagattgaaattactaaaaagtgaatggttgttaatggttgctactgaattgtttgatggccacgcagccaagattagcgatccaggagccattatgtcgggcttcaagatcttcggacagctgggcgaaggaccccgagaagtgtagctagttgcactaggagccggtttaattccaagatgtgttaggtgaaatcccatggtggcttttggttccgaattggtgttgacgtaatctttaatgatttcgccgtctttcaagttgaaaaatatagcagggaatgaggtttggatgaagagctctaagtcggtgttgttggtaataaaaacagctccagctacattagcattctccacattactaaattgatcagataatgaatcattcctgtcttcacaaaccacatatttatgcccgactttcttcagtttatttggattatcacatttatccatatagataatcgatattagggatttggatgaattcccggggaatacggaagaccccggaatggaaactccattcccaaggtttagtgttccggtgaattgcctgtcaatcgtaccggccgcaacggttagaacccaaggaatcccattgtgcagagtgctaaagtcaggtccttcgtttcccgctgacgtggacacaaaaacaccattgtccctggcagcgaaggtggctattgccacgggatcctgataaagaggaaccgaatctagtccaaacgataacgacaacacatcaacaccatccattattgcttgatcaatggctgcgataatatctgtagtgtaagcaccttcatcccacaaggccttgtacatagcaaccctggccagcggcgccacacctctcgcggtcccctcagcatatccaaagtacgaggcaccactcacgtagttccctgcggctgttgatggtgtgggtcccgtgaccgtctgtgtcccgcgtggagtttacggcaatagtaatgtttgggagtttggcggataggcctttgttaaagaacctagcgccaattagttttttgttgcacaacgatgagttgaactcggtcccgctctcacattctcctttcaacctggttggaatatcggacattccctcgtcaccaaagcttttgctctctggccaaacaccagtgtccaccaacccgattattacgtctttgccgtagtgggattccggccatgctcctgtatctggattgaggccaaggaattgggacgtgtgagtcgtgtcaggcttaacgggtaagtctttgatcgacgaaatatagcctggagctccctctaaagctttgagttcctccatcgaaagacttgcactaaaaccttttatgacatgagtgtagctatagatgagcttagaagaagaggtaatgtgagcattttctgacagagttgacgtcagcgtagctgagtaccaggcatggttattggaatagactttgggcattgctgatgagtccatattgattatgtaattatcagtttgagccgagataatagcgaaagttaaggaacacaataagaaaggaaaataccaaaaactattacgagaaaccatgttggatatgagaagttggaagggggatgagtattattctttttagtagtagaaaatacttaagtggatgatatgtattgtgatgagattgaagattaattatttcaagtatgggaacctataaaatgagtgatcaaacatactattcacctttatttttctcccaacatggaccacaaggtatcttattgggaatgggacccaccacctccactagttccgttgcttcgaattcataatgccatgaaagttgcaatgaatataaaatgtaaaaggctgtccactagtcacctgactatggcttgacaaaatacattagagagcaaaatataagggtgttatattgttggactgaaatagatgttcttttaaaaatttgtatggatgttattttttttttatataaaaattaaagtaaataaaattatataatttataattaaaataagcaatatatttataatttagtgttttaagggtttttagaagtaagaatgtgaaaaaataatatagaaataaaatattataattttaaataatataaaaaaatttagaagctttaaaagaatctttccattagagatataacggatcaatcatataacatatttaaactactggccatatacccatgtgattgctaaaataagtttttcttcctccttctgaagtcaatcaaaaccgtcaatcgggtaatgttgaaagggatatcggcaatatggaatatatacaaatttatcaattgtatggaccgcaacgcaacacgctgtcatgatggactgcactactcaactccacagcacacgccaaggaaaagtggaagcagtctctataatcgcaacggacacgtgtctccatcattttgttaccaaatgattgatcgttaattaaacttataatgattctttttggattcaaatctactttcctaaaaaaaaaaatatctaatctattgttatgcaacacttgtaatattatatatatatatatattttttttttttgagaatatcactcttattataaattaaaatcatttacaacaacagaaaaaatagaataggaaatttctcttatccaaccaatgtcatcatgcaaccctaaatcaaatttagctaaaccatgtgctacttgattaacagtgcgtttcacatgggtgactataactccagagaaaaaggataaaagacaacgaacattcataataagatccgaaaaataagataaatctgtcgaggaaacatttaaggctgaggagactctcaaagcatcactttcaatatgagttagtgatagttgtaattgcaatgcccaattaagagcatggaaaagtacttttgcctccatctcatcagatctgaaacttcctcgatagcttttgaaaaagcagcaacaaccattccattatgatctctaatgattgctacgacccccatttttttctgctccaaaattggtagttgcatcaatgttcaatttgaacccattttcatccgtggtggctgccatttttgaacctgcttggaagggactgatcttggcatagcagcaacttgattttcatttacagtagcgtgtaagataagtcttttggcacgtatgaaatcttcatggtaacttgtcgcaggttgccgtggtacaccgccatgaaaggccctattcctatcagtccataacccccacaacaagcaaataatgacctcaaaatgttcttggttatggattgtagatagatgatgtaagtaatcaccattaaacatgcattgagcatgtttaaaatcaatctgaaacttagaaagcttccatattgctttagcatgtttacatcggaagagagcattgcctattgattcccaactcgaagcacaaagtgagcattcacctgaatctatttcttgaaaagtgcagcagcagttggtagagtacattttgaaaaactttccaagcaaaaatatggatcttaggaggtaaatttaggttccaaaaaaatttccaccaatctctatgttgattggaagttgaggaattttgttgttcttccaaatgaaatccttatttgacagtgtaagagccatttgtagtgtagtgccaaattaacctgtcctgatcaacaagtatcttagaggaattgacaatatacgttacaagtcaattggctgaaactacatatttagcagagagacattctaaacttgatcctcagtaatgaagctcgatataagcattgaaggagggccagaaaaactaacaggttaaaactcattgtgactcggtatccaaggatcatatccacttgcataatgaagaccattaccaattttatatcgcagccctttaatcaacaattctctaccccaacaaatgctttgccatgttaaagatggtgagtggccaatgttagcatctaggaaagatgagtttgaaaaataccaacgtttgagtaaacgacttagtaatgaatcaagcatatcaaagatcctccatgcttgctttgccaaaagtgcctggttgaagtgaataaacgatcggaatcccataccacgttcatgttttgatttgcatagagatttccatcgcttccaatgtatttttgtgccattctgattacttccccaccaaaagtttgccatcatactctccaactggttacaaaatttctttgtaagcctaaaacaactcatattgtaagttgggatggattgtacaaccgctttcaaaagaacttccttccccctaatagaaaaaattttctcattccaagcatggagtagtttccagacattttctttgatatgactaaaacctcttgcttgtctcatccagagtaagagggtaaccccaaataccgctcatgacattcagttattggcatttgtaacgtttgagcaaaaaaattctgggctgtgaccgaggtattaggagagaaggacatcacagatttgtcattgttaagaacttgccctgaagctttgtgataaatataaagagaccttttatttgataatgcagaaagttgggtagtttgaaaaaataataagctttcattagcaaagagcatatgtgataccgaaggagaattgcgtgaaaatcgtaacccttcaaattacctgcttgttcttcagattgtaataatctcactagtccctctgaacaaatgaggaataagtacggggataggggaccaccatgacgcaagccacggtatggttgaacacgactaaccacctcaccattaagagaaaaaggaaaagagctagtggttatacacctcatgataagagatgtccatttggaatcaaatcccatcttaagcatgattgcttcaagatactgccattcaactctatcaaatgcgttactcatgtccaactttagagcagagtacccaattctaccttgtgttttgtgtcgaagatgatgtatgagctcaaaagaaactaagatgttgacagtgattaatctatctgaaaggaaggccgattgggtttttaatattacaaaacatagaacttttttgaatctgatgacaattatcttggaaataagtttgtaaataacattatacaacttataagacgataatcactcattggagctgggttggacactttgggaatcaatgtgattatagacttgttgagctttaacatgtcaagaccttcattaagaacaccaagaaccaaattagtaacagatgacccaacaatgttccaataattttgatagaacatggcaggcatcctatcacaaccgaggctcttgtcaggactcatagatttaagtgcttcatacacttcattgcttgctaatggctctgttagggacagattcatgtcatgagtaattgtggctcggatggcagaaagtgtttcctgtagggaatgagaatcaacaacatctgaagtaaataaattgccatattaagagcatataacatgtggcatatttgctttaaaggtgacacgaaaaccttgatcattcattaagaatttgatagcatttttggtcttccttgatgtagcatgagcatgaaaaaattttgtattttgatcaccacattgtagccaatcaacccttgatctttgatgctaatatttttcttcttgttcaaggaactcgtccaaaatagcctcaaattttttttaattctactgcattgtttaaaagagttgcactctgctgcatttgtgagatgtctcttttaaggtgaccaaatttttgcacatggcattgttgtaatgcatcagtacaagagtgtaaattgtgcaagaatagatcaattcttccattaatattggtagaccaatgctgtcgaattatggcagcagcatctggttcattcaacaagatttttttagatctaaatcaggttttcgtttgttcaaagattagtaatgcactcagacagctatagcacgatgatccgacgattaatagtccaaatgcaatgttgtcaaaggttggaaagtgttgttccaaagatcattagtgaaacaccaatctaaacgctctttaattgcatccactttatgtctatctttaacccaagtgaacggatcatcttcaaaacgcagctcgtttaaggaacaaaagtctaatgcatcacaaaactcgtccatttgtttttcattctgcaagcctcccccatgcttattttgattagaataaagtttgttaaaatcaccaataaccttccatgggagtaaaggagcaacgtctttaagtcttttcagaagagtccatgtagtacttctgttatgtaacgcaggagccccataaaaagcagaaaagcgccacttaggaccatttgggagagccatgtaaccatcaaacacatttgtattgaaatattgcaaagttacatctacatcatctttccaaagtaacataagaccaccactaaaccctactcttgggacttcaagtccattgttgaaatgtaaaagattacaaatacgagaaatagaattattagctaatttagtttccataataaaaagtacagtggggggtttgctctttgactagaaaacgaagtttgcggatagcactcgggttccccaatccatgagcgttccaactaatgatttaaatgtctgcttgaaggactggaaaccagcctccgcagtattgtcttgagaaccagcagaatccatggtatcatcagatgcttggcggtgaagttcatcttcaattgacaaggaagaagtggtaacatttggtgtgtttcctctgcatcttttcatcgtttgccttagagaaatgccatcatttgtcttttaatttgcatatttgggtgaacattctcctgctcctttgacaaaccaacaacagtagtggcgagtgatgtggaatcaaccatagaaaaaggagtttggatatgcttcaactgtttattcttggaaggaacaacaactggttgggtcaatgggggataagtggcatatgtattgttgaggataggcagagatggcataggtgtgtaaatagcaaatagatgagtatagttgtttaaatggtcatctgtagaattttccacgggcttgatttgtgttacattcctcactgtttgaggaataatgatcgaggattggtttagccgtgagggagcaaaggtaacagatgggtgtagatgatgcacgttggggttagtaaccaaattttcactagttagagacctattcccaatggttcatagcctgcattcttttcaatgccaggatcaacaacattggattgggaagattcaccaccaaacaattgacgaggttgtggcattcctcttattccaattgaggtatggctgaagtgaaactttttttttgcaagacaggtcaacaaaggccaagtattaccttttgaaaaatttgttttataacgatcataacttgaagttggaagtgcagatcctttaatgaaaggtttgtactcgagttcgggttcttcaccattgtcaatcttttcaagataaacaaggcatttattaaaaggacggcctattctcccacactccatacaatattcaggcaatctttcatagaaaaaataaatttaaaatatgtctcgcatatgagataaagagatcattcttcccctctttagaggctttgaaacatcaatgttaactcttattcgtaaaaaaggcccccaacattcatttaaagaatccttgaaaacatctataaattcaccaattatgttaccaagagaagtagctaatgtcttggtcttgccgaataagggtaggcgataaacttgtatccaaaaaggaatgaatttgaggtcttccaaagtgaagtttttcccaaccttcggagtatgcagcacaatgtggtggttttgaaagtggtaaggctctcggttcaaaactctgattttgtcaccttcgcatccgaaagtaagtaagaacatgtctgaggattctgaaactttaataggaaatctcccgtcccagtgttcagccatttgcttctacaatgtggatagccaaacctttttcttagtaagaatttttgcatacaaaacaaattcgactattgctagtggagaaacaacttcaacatcatggaattgaaagacggattcttcatcttcagtgagtgttatttttgatttcatcttacgagtgagtggatccattagaagaagagaaggggagagaaggggtataggagtaaattgactaaaacaaacaggaggcaagatcattggaggaaaaccagcagaaggaagaaaataactgctataaaattgctaaaaacagggcattttgaagaaaaaaaactgcaaaaaccatgaaggacattaactgccacagagcactaaaagggcagacgctctttgtaatactacattcattgtattgattttttcttttctccaaaatagaaactaaatattcaaagtaaatacccaaaaaaatcttaattcaagctatattaatataaactttaaaaggattaaatatatatttacgtaatttttattatccatatatttataatattttctatctttataaatttttgttgcatggttcttttctaatgctgttaatttttattatttatcttctaattttttttattattagtttttcaaaaaaaaaaaaaaaactacattctagattaagttctctctctttttttgttttttttatttacaccaaatattaattttttttccaaattttacatttatatttcgataagaaattttgggagttttcatttttataatctatggcattgtatcttgttcatagtggttttgacaagatcaatctctgtaaagagctaatatgcctatatccaccaaaaata

SEQ ID NO: 112357 - DNA, 4295 bp, Cannabis sativa
ttttaataactatgcatttagggataaaattttaaggtattgtaagtatagaatttcaaatttcccaaaaaaaattgcaatgtgtgaaatggattttattgttgttacgagtaatgtcaattttttcttttttctgaaatggagtcatttcaattacttactcattaagttaatccgttctggtgtatacttttgataatcctaaccataatagaataataaacagaaaggaagctaagcagattctcatacagtcgaaatggtctaaatatacttggtaattatctggatgaagctattatacaccttgtaacttcacacaatcatgcacaacggttacatacataataaataataataataataataataaacattgaggaaatttcgagtattttgtgatttaattacaacaataaaatcatcaagactttaaagtaaaataaccaatttacattattgttgttaggataaaagctcatgggcgaggttgttgtgaagaaaatgaagtctcccgagtctttcttatcttaggtatgcacaaatgtcttctttcttgggcaaaagtctatcgtcctatcaaaattgagtcccccttccactaattatgtattcagcagagtatcaaagggcataaggagcttaagaaattggtcagctccgctctattttggctccaccttagcgacactagcctttcgtaaggctctccttttggattggatttgagatacgaattcagcgactacgacatggagtttcggggcaaggttatttaatgaagagatatttagaccagcctttcttaggtcccgtatgagacacttttcacccttctgaaaatgagttggacacagagaaggtactgtggatctcagtattggtttacaacacagcagagggcctgactgcatactggacaatacaaaatttttatttactaaataatcagcaaaccttacccaaaaggttaatgatcatgttattattcctattccttctcctgctctctccaaatctaataatgatcgtgaatctgacagtatccatttccaaaaactctcttctcttttaagaggagggcaaatgatcatgatcaggatgatgatgatgttgaggctgcgacgtcagatgctgccattaacagtattactaataatgctgctgctgctgctgatgaggaggctgctgttaataataataataagaagaagaagataccttttgaaaggatttggagtaaggatgacgaggttgaagttgagattttgaaacgtcttaaaaggtattgtgtaaagaagaatttccatgccactaaagtagacatgacaaaattttacgcatatgctagaagaaagatagcaatcatgagttcaataagacccaactggcagataaggtgcgcaggttgaaaaattcttacacaactggcagataaaaagtacttggtcaataagttattttcaacctgcatctgccagttgggtctagttgaactcaagataactcatctttcttctagcacatgcgtaaaactttgtcatgtccactttagtggcatgacaaatgttctttgcacaaaactttttaggacgttttaaaacctcgacctcatcacttttcaaaaggtttcttcttcttcttcttcttcttcttcttcttcttcttattattgacagcaacctcctcctcctcatcatcagcattattagtaatattagtaggcagcatctgacaactaagcctcaacatcatcatcatcctaatgataatcattcgtcctctacttaagagaacaatagtttttggaaatgggattactgccagattcatgatgatcatgatcatcactattagatttggagagaacgtgagaaggaataataatgtgattgaactagtagaacttgagagataatcattcaaacaaagtaaactattaaatgcagggtaaattcagtctagtatctctagatagataaaaagtcaacacctgagtttcataacatacaaactaaccgtaacttagtgcaacaaataacaccatttatctctcatgaagtccccaaacatactccattggaatttaagtaacactaactgatatgatttattcaaaaaagatcccctctcacattacataaatattctgctacctcgcgaggtgtttgtacttttatattcaacttactactctccatcagtgtgcttttcatgtatgatgtgactcaaaccaaacatttccttcatataaaagaataccaacaaacacacctatccatctcaattcattaattctaagtcatagcatacagaacatcactccgaaaacttcctaactcataacaaagcattatctcaactaagttcttgacattttgaatagattaaagcttcattactagtctctaagaaattcatttcagtggtaaaatcctttcatttttacccctcacatggcaacgacgaaagatagtgaatcaaatcataatatcaactaagttcttgacatcttgaaaaaggattaaatcttcattgctaatctctaacaagaaatctatttcagctgtaaaatcccttagaagatttcaaactcttaccaacaaccaaaaccaataaatttcatggaaagaaaactagtctttttctccctccccacacggcaactaccaaaaaatactgtatcaataaaaaataaatcaaaaaacaaaaaacaatagaaattagaaatacctcttgatgacatatgtgcaacccttgtatagcttctgttggggatcggagagtatatgggcatggcagaactttgtcaaggccataggcctgtttttacagccagccacttggcaccttttaatgtcatccccaactccggtggcagaagccaaccctagcttcccgttctctccgattccatccgtaccattaggagggaggggctcgtcttccttgaagggactcttaccgtaggtccaatagtattctctgtgcttggacttgagatcctccatcaaagcccagtaatggtgcctgtaaagacgagcaagttgcttgactcgtcgagcacgacgttcgattacctctcgctgagtgagccattcagagttagagagggcggagtcacggtcggagccatcgatattcatgggagaagtgggtgaaggagaaggaggagagtcaaagcaatccgccatgggtgattgagtgagtgagtgagtagaatactgagttgaaaagaactacttaataagcgctaaacgagttgttgtttgtgtcttctagtacagtgttaccgacatttgcctttctttctatataagaaaaaagaacaaataaaataaataaatataccttcttgtttcttcttctattattgatgatgaatatgtaacatactaatattcgtgttcaaaacaaactcaaatctaatttgaacaaagaaatcataaagacacaattacaaaaactacaataattaccttatattttcagtagaacatttttacacacagaggcacaaaccaaaactctcataggataaaacaacaaatatgctaatatcaccatcaaaatcactatgcataaaattaaaatctgtttggcgtcaagtttcaaaatcaagttttttattcaatgcttttgagcgcattgtttgttgtataaccccaaatcttatcatctgcaaaaatattattcatacatacgtatatacatagctgataatacattatacaacaatatcaaaacaaataacctgatatcattgtacaacaaacaatgctcaaaaagcaaagtacaaaaaatttgattttgagagttgacgccaaacagagccctaattttaccaataaatggatcaataaatcttttcattctgaaatgagaacaaaaaaataacgaaacatgacgaacagcggtccaagcgagacaagttaaccctaatttacaatgtgaatacaagagaaacggaagaagaaattaaaaataataatgaccacaatcaattcgtttttcccaaaccacagcacaatagaacatatctattaataagaaacaaaaaaaggcgactaaagaggaaatcaaatctttaaattaccttcacccggcagaactcggcgtcggcggcgactttttggctgagagaagagagaagatagagagagagagatcatgagagagttgaaagaaggggaaagtaaaatgataggtttaggaatagaattgggcttggttgggcccaaaacagatagatggtaaataattgaggaaattagatgaggaaattacactctata

SEQ ID NO: 112358 - DNA, 4418 bp, Cannabis sativa
  modified_base (3048)..(3053): a, c, t, g, unknown or other
  modified_base (4261)..(4277): a, c, t, g, unknown or other
tttttttttttttttgacggttgtaactacaaatataacaatcaacccaagttacaaaattcaatttggaaagaagtgtcgccagattagcttcctctcaagtcctattgctgctttagccataccatgagcatgaacattaaaatgtttgggtataaacttcagatcaatagtagggattatagacaaggagcgccttatatcttgcaaaatatcagaaagagctgagagatccatcttcttggacttcaccttgcccaccaacagttgagaattttggcaagaggaagatgaatattctggtaccattgcaaacctgctttaagagccaaagcttctgcctttaatgaattcacctttgctggcataggaattgaaagcccagcaagtacaactcctttccaatctttaattacagctcctagactgagttttccatcggtagagttaatggcaacatctgtatagagctgataaaaccctttattaacctgctggtcttgatggaggacctgttttttttgtcatttgcaatctttcaaccttcttgagttgagctcccttgtagtccatcaagtacctaacactctaattgactaaataatcaacagtagacaggtgagatttgccaaagatctttttatttctgttttcccatatggcccataaaagacataatagcaacataaattcatccttagttaaatcaaaaaaaccagataaaataaaatctctaatatctttatgtttattttgaaagtaaaactacttaaaagaagaagatttctaaacctgtctcgctctagaacagtctagaagtgcatgagaaactgtttcacttaagttattacaaaaagaacaagaaggagcagaaagagcttttttggaaaagaggttagaagctgttggtaggatgtgataaaaggctctacaaccaaagattttaacctttggtgggagacttaaatttcagaacttcttcgaccaatgagtcatgatattaatattagaagttgaaggagggaaggaacctgcattagctaaatgataagctgattttacaatgaacatacttgaagagttcccaatccaaataagtctgtcagatctctcaaaaccccctataggaacttgaagaatactatcaacaatatctttgtcaaaatactgagatagtttattaaggtcccaatgagaattttgagtaataaagaaattgaccctgtcagaagaaggtgcatgatcatccttatatctaagatatctaacatttgggattcattgatcattgagagtacgaatggtactaccatccctgactttctaaataagccctttcataagaagatctctaccccaaagaagagtactagtccaagtaaaggaagaagaatgcccttttttagcttctaggaatgaattatgtctgaagtatttagctttgagaattcgagataagagagagttagggtgcagaaagactcgctaggtttgcttagccaaaagagcttgattgtgatgtatcaaagatcgaaaatccaaccctccaaagaatttagaattacaaagataagaccaagccttccaatgaatttttatagattttcccatagatccccatcaaaactgagccatgagcttttcaattttttgactaataaaaaaaggaagtttaaaacaagacatgacgtaggagggaatatcctgaataaccgctttcaaaagaacttccttgctagccttccaaacattcaagtgagaactgactctgtcaaggatgaaattaaaactggttttcttagagcgaccaaaacattgagggacacccagatatttgctaacaaaaggcttattatttaaccctaaattagtataaaaataattagagacctgtgagggagtattaggggaaaataaaatagaagacttgccaaagttaactttctgaccagtggcgaggtggtcaagctgaagagcctctttgagagcatcaaatgaagttaaggaagcatcagttaataaaagagtgtcgtcagcaaagagcaagtgggaaatagaaggggcagaacgagtaatggatatgcccttgaaattaccaaggctttattgaatcttgagggcagaggaaaggccttcagcacaaagaaagaaaagatagggagagagaggaatctccctgtcttaagtctctagagggaaaaaatattaaacctgatggaaaccgaggaaaggcaattactaatgagcttaatgaatttgtcaaggaagttaagtttattaagaatggccaggacgaaggtccattccacacggtcaaagactttttccatgtccaatttaagaccaacccatccaagtttcccttattttctatgaatgatggcatgaatcatctcgttagcaatgaaaatattagctaagatgagcctatcaaacaagaaagcactttgggttgaggatataatatcactcaaaactgcctttaacctattagcaatagttttggcaacaatcttgtacaaagtagtacataaactaataggtctaaagtctttaagagagataacattagttttctttaggaatgaggacaatgagagtatatttaataggggacatattagcattattgttcaaaatgttacgaatggttgtggtaaggtcctcccctagaatatcccagttcttttgataaaagtaggcattaagaccatttaaaccgggagatttgtccccaaagatctgaaacaaagcctctttaacttcaacaccactgaatggggcatttaataaaaggtaatgctgatcactaagtctgttatccacaacagagagagtcatgtcaatagcttctttattaggaccttgagaacaaaaaagagtggaaaagaaatggcaaaaataattaaaatatcacaaatacaataaagcttgagtaacgcttgtcaaaaatacaataagccttgaaaataaatatgaaaaaaaagtttcaagtttacacaatacaataattagtgggcttaggttggaccttcacatattggaccnnnnnnaatataaaaattagtatttttatagtatgcagtgcggtgcggtttgaaccgcatattaataattcaaaaccgcaatctgcaccgcaccgcaccacgcagtttaagaaaaattcaaactgcgaccgcaccgcaaagaatttcaaactgtattttttttgcagtgtggtgcggtgcgggcgatttgagcggtttgatgaacacccctacttaatatatacactttatatactattttcatttttattcaattttttcaaaaagaaaaaagaaaaaagttagacgtgtatgactattgttaatgtcactctatcacgtcgatcatgttaccaactgttgctatggtatactgttcacgcgctcatttttttgcagctttatttcaaattttaagttgattttcagtattagaaatagtttacatttcttttttttttttttttgactaaggagaagaattcgttaatcaaagacaaaacctatacataaactcacggccacaaacaactggtcccagcacacacacctgccaacaacaatactgagttaggcgcaaaaataagcctctctcaacatgatttaacctcattttccttagtctaaacaatttaatcttgaatatatctttgatgtcatgtacaattctattaatagaaaaacaacaactattatgtacacaattgttactattttttcaaatcaaatacaccgcggcagcaaaaaccagcagcaacattgcagcaatattcttgatcttaccttaatcattcaaagtcagccaacaaagccaactcctgtaggttttaggccaagcttcaaacccaatccagtcaaagattcctcctacaatagctttagaagcaacacagtcaaagaagaggtgttcatgactctctttctcaccccaacacacaggacaactgtcaaaatcaagctcaatttgaaacatagtaaacatgtctctcgtgagcaactggttatgaaccgattgccacaatataaacctatgcttagggaaggaaagattgttctagacaactctataatatttatcaggctccaactgaataaggctcttatacaataagcaagcagaaaaattacttctacaagtcgcaactattggaatatgttttactaggatctagatttactaacaagtatgtttttaacaccctaaatataaatttctaaaacgatgaaaataaacnnnnnnnnnnnnnnnnnaaccttacattggttgcagcggaggagggtggctgtgaatggatgttggtcggctgagttggggatggggtgtggctggagatggtgaagacaaagatatcgatggtgggatctcataggaccgaagattggggggggggg

SEQ ID NO: 112359 - DNA, 3461 bp, Cannabis sativa
  modified_base (43)..(77): a, c, t, g, unknown or other
acaagagtacaatataagaagaccgtattttctgtaaataaannnnnnnnnnnnnnnnnnnnnnnnnnnnnnnnnnnaaaccgtatttttgtaatttttttcttgtttttgtatatttgtgaaataattccaaaaagtaaaagcacaaatttaagcccaaatataaaaacaggttgacctatttaaaaaatacaagccaacacgagtaaagtacgacacgaaaatactgggcctatgagccatgtcgggcctaccctttaaaaatgttggctcattacgacacaatttatatttttttgtgctacggcaggacacaacctattttttgaaaagtgtaaataaatataagttgggccaacatgacacacataaatttactgcactgttaacaattcataaaaactggttacctatccataaaaactttaatttaagttaacaattcaaagtttactttttcaaattaaactggtttgtttatgttaattaatgtctattatttattacgatatcaaagtaatttgtaagtttgtattttgttagcttaatcaaaatacatatatgattcatatgtagtataatatgagtgactaaaaaaatgtgtattttttaaaaaaaatattattatttagtatactagctagaagcctagaaccatttaataagtacggtatcatgctctattatatagtatatggtaacttatcagtttctgaaataacctccaaaattagtcaattatatcttaaataataataaaatatcaaatataacttaaaaatagtcaattggtatataagaagtttgcaaattttgctaatatgagtagtaagttcttatatattattttatcttattaatttttcaaaataggtttgaagatgttatgcctatattttaagcactaaatatgaacataacatgtgtcacataactcaaaaagaaataaaaagatagtgaatgcgatgaataaatgaatattctacctcaaaaataagctacggagtaaaagagagaatagtcccacaaaatactatcaatgtaatgatttacgaggatgagaagatcaaaagtcaagtcctcgtgacatgactaaaatgaacgaggcaagtaaatagcaggaaagaatgagttaagtggaaaggatagataacaagttctttcaaagtttgcaacttattgacccacatactcgtgagtatgttgaaagactaagagaaataagcaaaatacaacttatttaaagagacaaagtctaaacaactaccttggaagactatagcgaggacaaacacttaaactaacatcttgtaggatacaaccaactatctgtaagcatcacagagtaattgaagccataactagaatgcatcattttggtaaaagaaaattgcttccaaataagaacaaaaagcagttaccagcagtcattttattttattcacatgttttaaatatgaaacgtgaggattgtccacatttcatgaatggttacctagataagatcaaagaagaataactgttattcctagaacccctataaattattgggacagaacctaaggggaaagagatcgatcatttttggaaggagaaaccctgtgagattgagtgaatattcgtatttagacctccgtactcaaagtactttctcaaaagatatctagaaataatattgtctcgtggagtatatagatttaactagaaaactacataaaaaactgtgtttttttttttatatatatttataagttataagtattaattctttatttacaaggcttcatttattgttaacaaaaatttgagttaatattttggtgctttcattgagagcatttgtgaaagtaagactcaaaaaacatctccccgttgtttcatcacatcatggaaaacacttagcatgatgagcttgttatggaagaagaaacaacacgacgactaggaaaagagccccagggggcacagacttaaaccaacacaggaagggatccgactgtgaggaactacgagggatgtgagcctaaggaagaaattcttgagagaaaggagtcaaatgcatatgatgtcgcaagatatgttcccattgttgaattagaaaatcgacaactctatcgaaggctcgtagagtccaaccgaaagaatgaagggttggagtgagccatagttgtagccatatcgactcaaaatgatgcaacacctatacatgaagagaaacttgcatgacgtccataagggagaccccatggttcacgaaccagaagggcacagggacccaacaatgaagaccaggaaccaaacaatcccactcacccctgggtcaacaactagaggagatgagggacattcctattgatgggcgaagccccaagaatcagggtgccacaacttcgtgataaacgcgagcaaggggacactagacgtctcaaaaaaatgataaaaatgtaaacaaacaaccgtcgaaccggtctggtcatccttcacatccacctcaaggacgtatgagaggagaaagagatagtatatatacatacctgaataggggtaggttcactaattcgttcgaaaggagaagacctactcgtgaatcaccataagtaccagaagctaatataacccaaagtagatcaaagagtcaagaacaaactcagtcttcaaggtcgcgtgcgtggaaaaacccactgcatggggaacgaaaacctcgatatgaattttgaggagaaaaaaagtatgagtaactttcaaagttaccaatccgagtgtatctccccaagtcgatcactgagcagttacgatgacagacaagatcgatgccaaaacatacttgatcaactcgacttgcgagatagtataaattgaagatgctctgatctacacgaacagataaataggagtgcacccgatcttagggagagactgaatagaaatgctcagtgggaaaatgaacaaaccaatcagcacgcagatgatttcatctagcaaaggataattcagttggaagatcattttagaaaatatcatcattgagaatatggaaaacttccaggttatgattcagatgaagatcaagaaccttttcaccttgatattttgaactcacaattctcgaaaggattcaagaaccctcatgtttcacaatatgacacaattatagatttggtcgttcatttgaataactttaatacaataatacaagcaagttatatttctaatgaattacattgcaaattattccccacatcattgacaagagcaacgagtagttagtttgataagttcacaaatcattccaacacctcgtggaaacaattgtctaaataattcaaaaagtaatttcaaacggcaagggatagaagaccgaaagcttaatccttgacaaacactaatgtaatatccagtttatatacatatattagtatttggtatattaagtgtgatacaattatattattattattatt

SEQ ID NO: 112360 - DNA, 3597 bp, Cannabis sativa
cacttaataacatatgacttattcataagcctgaaaaaagtccaattcttttgctcactgagtcacttataggaggctagaatttaatattaatacggataatataattatgctgaatatttagttacattactgttagttaaacaaatgaatctgataaatttgtatgtaaagttagtttaaaattattaatatatggattaaaaacaaataatagcccataccaaatacgggaatatgaattaccatgcccatgaagacattacaccctaccaaacagctccttagcagctggtatgtgaaaaactcattttcaatcaggtttcagttggtctacaatttcacaaattctaattaatgcacatccacacaacaagatgggaataaaatataaatcattttatcaacaacaacaaaatatagataaaaatcttcagcaggaaacatcagtgaactacggagaattttaaaaagtacatctgatttttaaataatacaacacatgaatagaaaattttttataaaccccaatttaatatttggtgcttaatttaactgttgtatgtacaaaaaaagtacctaaatgttaatttagcttgactaccaatccaatagtcaccttcaaggcacgatttttggttacatgccccatacaccgcgagctgatgccactctatttggtcgcgcagtcaattcgtataatatcctggcaaatgtatcagaatatctggcatctgtaaacaatatctctgcaaaggcattctcgaaagctagcagcaacggcctgttctgtggctcagacacgagactctccaatatcatagacgcttttctacaaatttcaggaattggatggggtgtcttgatcacttttaacaatcgatcaatggccctgacatcaagtaccatgaaacaggtatatgatcaggtcggtaacaaaatttttgtttcagttcaagaatagatgaaagagaaattctaaccatcgctcactagcaagttttaatcgacaatccatatttacttcagcaaggttataaagtgcaccaacagcagctgcttgagcatccaatgctggaaaactcagaagatcaaccaagcgcttgtgtatctgcacagttcatgtagccctgttatataatatgaatttgattatatgtgtgtgaaaaatagactttccaaatcttaacctgagaaacaaagggaagaagaaaaggttcattgtcaggatttattattaaacgaccaagtaactcagctgcggcacaatgccaggctttgactgaagatcctagaatccccatgatggcttgaactgcacgtttttctctgtttgacaattgattatattattaaccagaaaatagaaacaagagtagcttagtcaaacacaatatgtgcaataggtttcttacgttatcttaatgtaggatggctttgatgagctgaaaattcgaagatcaagcagcggagccaaatttacaattgtttcaagagcatttgtgacaagttcctcatcctctataaatataagaaattccatacatttaagagtgtaagctaaggtcattttacgctgataggaatatataattatcaaaattcaagaaccaagaggcaaccctgccaagagcctccaatgtgtagactctaagtaaaaaagaaaaaaaaacaaactttttaagcgaatcaaaacaacactttccacttaaaaggaaagctaatattattgtcaaaacctaccatccatattaatatacatttatggtcctagctataccttgaactccaatagttatacacctttatttagatattagtatagaattccttaaaatcagctaatacgctttacattccaatacatgcacagaataaacaataaagattacccacataaaaggtatttgttcaagacaccattagccaagtccagtagttgcagtcttagaaaatacaaccacataactatctcaatatttgataagcatttatatctcaataaaaaaaaagatataaaatcatattcattccaagcaacattttctcacctgtaacataatcttctatgcactggaacattgtttccaaacaatgccgatgttgagccataataacttcattttctggcatgaaagagaagttccggatgacatttgaagcggcaacagcaccttgctgtctctctgctctcccctcttcatctagattaaacaaaccatcttcattagcccaccactctgaagtgcgaggtttatacacatttggtgatgcttccgaatgagaagaaccagatcccaagctaagatttgaacaataatccatgaacaggttatacataaacaaaactttctatattcaaatctaaatattcactcaagaagaaagcatatcatagactcacccaggatgtggcagattgccatttgatcccaacgcgtcatattcattaccaaatcctgttacaaaagcatttgcccctaaagttcttactctcggtgcctttacaagatctttcggaaccgctatatcacgccagtcatcaatctagaatcattttgcaggaattttaacacaatgtgagcttgacatgaacatgatggtacaacaaagtcaagtaaggtcctggcattaaaattaaatatggaaactctctaaattaattctacgcaaatgacaaattcaaagagtctaagacatacaacttgaagtacagcatcaagtaacccaggaatcttagtaagaggagttgaatctctgcgcatatcatccttttctttgaaagagagtaatgtgagagtattcaatgcccatgttagctcactcttcaatccactctgaagagccaaaactatccttttactgttttgatctgaagggagaacagtaaaaagatggtatcaggaatatgatattagaaaagaacatcacttaaatttccattcaagctttccaatgccactataatcatgaaataacgataatggaaaatgcttatgaaaacaacataagaatcaaaatttgattttatcaaaagcccattactgattagtaaacgtcctcagcattcataatcttccttttcctttataaaattttcagcacattaaacacgagtaaaagagttaaattaaacccaactacttattattattttttcaagagaccaagataacaactttaactaaatcccagaagcacgagagaaaaacaaaaattaatcgaaataagtgaagaattagctaaggttctgctaaaactcaccggcgaaggagctgtgaacatggagagacggcccaaagagagttgatggagcggcagtgtcggcgacggccgctagggcggcgctgttgctggtgctaccaaagggacgacctcttttcgccggtggtccggcagaaccacccgacgctccacccgacttgccttgctctcgcttctgcatagtgttctcgacccctcacactcgatgattgcagaaagatttgaatttgggatttagggcacatcacatttgtcacaaaatactataccaatttcacccttcctttgggaaaatttgtcaaattaaccatttaaaatattaaaatttataaa

SEQ ID NO: 112361 - DNA, 7237 bp, Cannabis sativa
tttatgtaaataaaataaaaaaatcgtaaaaatgtttaaaatttcgtgaaaccgtatttttgttatttttgtgcatttgtgaaattaaccctaataaaataagttgagaaatatttttatttttttattatcaattaaccaaaaatagctatatattaaaagcaattcaaatatactaattttataagtttattatcattgactcagagtatcaaagtatcatataataagagaggcaaaacgggtagaattgttaaaaaaaaaaaaagtaaaaataaaaaatataggaaaaggataaaatttaaagacaccacctaaaaaatatatacaacctaattttcttcatttataattgtaatagttgtatgtttgattgagggttatatctattatagttcgtatgtttagtaataaaatattagattgagaactatcgaaataagaaatgtgctgtttcaaagagtattagataatgatctaattttcatacccaacaatttcttttcagtgaaataataacaccattgatacgttcttgaatatttactgatctttgactgctgtggagattactcttattgttgggcgtttgaattgtgtgttttgatgtatttgttttcaattttggaataaagtttgtctttcataaaaaaaataaaataacaacattgatgcttttttgctacatcttgtaattttctttcttatatttttttgaagaactatttaggtgaaatattatcttcatactttttgttctaatttagtaaattcaactattacacacatcattattttatatttgcttaaaatcaaccaaccatttatctttatccatgcgggacacatgtatgaatgaacttattaatgctaaaaccaactatgagactaaacagagagacagtgattagtgatggaaaatttacctgccgggaagtgaacccaccccaaatggggaggaaattacttgccttaatgggtaataggacgggagtggggtacaattttatatacttgaagcgggtttaaggcaaggtcagggtgatactacccaccccatattcgacctagatatataattttcaaacttttcatatagttttctaattattacgcattatgataaaagttgatcattaatttttcttaatttactttgtaataaaagctttttaaagtaaatatctttattattattatttttattttaaattacagtacattattttcttattaattttattattgttaattaatgagtttcatacctaatagggatttttttaccctgaatccattagggattaagcggggcgggggcagagatggggatggagacataaatgggaaacagagacggagttgagaggtgcattacccactaattacctactctattttcatccctaaatgtgattttctaatgagttataccattgcagttttctaatcggattggggcactgtccaactcctcaactctaatgacccttccaatgtccaattagatttgcaagacatagtagggagatttggaatgtaaattggatctttggtcaacttgaaccgtttctaatggacagttccctgcttcttgagaatgtggatggataatactctttctaactgttattctgtgtttatttttgagtctattttggtaatctattgtataggtcaatgggggattcttggttcagttttccctttattttggtttaatcttatcctttatgctctatttggacacaagttatcaaaaaaacaatttgtgttgtaaaaaaattgtagcgtgtaactgacacatatacaaataattggtagctaaaggctataagcaagagtttggtgtggactacaaagaagtttttctctagtagcaagacatgatgcaatcaaattggtgattgtattagctgctcagaaatcgtggcctatcttccaattggatgtaaaatcaacattctttaaggagaccttgaggaatagatgtttattgatcaacctcctaactatattaagattgaaaatgagtatgaagtatataaatttaaaaatgctctttatggattaaaagaagctccatagacttggcatagttgtattgaagcttatttttaaggaatttttttttttataaatgtccatataagcacatactttttattaaatttggagatgaaagaaaaatgttcattctttgcttatgtgagaatgaacagatttataatggaaatgatagagccatgttttgaaaaatttaagcatcattggactagtgcaatattttctaggcatagaaatggtgttatttgatgacggtatttttgtttctaaaaacaatatatccaagaaatattagacaagttctaaatgaagaattgtaatactggaggcactccgactgaagttggtttgaagcttataaaagatcctcaaggaaataaggttgacaacactctatataaataaatagttggaagcctgatgtacttaacaaacacaaggtcaaatataatgtatagtgtaagtcttattagcaggtaaatagaatgtctaagtgagatacatcttcttgatgcaaagagaattttttgatacttgtgcattacaattgatttcaagttcttctaataagagggagaaaaagtatatttagttggttttactgatagtgattgtgacagaagaagcacatctcgttatgtttttatgataggtttaggagcagtttcatgatcttcaataagcaaaaaattgtcactttatcaacaactggagtagaatttatagctgcaacaactagtgcttgacaagctatttggttgaggaagattcataaagagttacatttcatgtaaaatggagccactataatttattgtgataatagctcgacaattaaactcattaaaaattatgttctttatggtagaaacaaatacatttatatgaaataccatggaagaagttattattctcgtttgttgtagaagtgtagaataaattgttgatatattcactaagtctttcaaattgcctccattttagaaaatgaagatgattggtgtatgtcttttgaagatcaactagtttgagagagggaaattttgcaaacacaaaaggaatgttagaaaacaatatttattatccgttaattattgtgcaaaaagaaaacaaaacaataaaagtacttgcagtttttgtcttcttcgtacttgaatcattcatttaatttttcaactattacactcatcaccattttatatttggtgaaaattctttacccatgtgggacacaagattgtaatgtaacatttcatttcgttgtacaatgtgattttccaatgaactacaccgatgtgattttcaattcggattaggtttgttggaagtgcccaactcctcaagtctaagcacccttccaatgtccggttcaatttgcaagaaatagcaggtaggttccatttcgtgacatacattggattggatgtacagccctagctctagcccataatgttgcgcaatgggccaattctactaatacctttggacctttggtcaacttgaaccatttctaatggaaagttccctgtttcttgcttttaaacttttagttttattgttctgcttctgttctgtgtttggtttgttttcggtatcggccaatcggggctgctggtgcagttttccctttcttctgggttaatcttatcttttgtgctccatttggtctaaagttatcaagaaaaaaaaacattgcgttgtacaaaagatcgtagcagacacatacacattatatagacagaaacaatgatagcttgaaaaatgcaggggagatgccatgacaatggcttctaccctaagttgaatttatgtgtagatacagaaaatctcaattaaattgtacagcttagcaagctttattaaaccaaaactcattctaagtgcaacacccagtagaagaatatgacttttatgaagcaatcacaagtttatgataaagattttgtaaaaaataaatggcaccaccatttccaatgtcagtttcaggtgcttaaagaaagtaccatctaatttcaacaaagttcagggtagaacatttgaacaaatgattttctattctgctctcgattggccagctcgtgaagagagaatgataccgacaataagaccgtacaaagccaaagcttcagcaaagatgagaatcaggatcataccaacaaagagttttggctgctgtgcattagctctgcacaaccaataaaaaaggaaacaaaatcagtactggtcgattatttatggtgcacaactgcatattagcctttaaacaagtatcggtatagcataaagtgtctgacacacagcttatacagatagcaaggtataaatcatcaaatatggtagagaatatcttcattaatctgtcaaactaacattaaagctctagctcagataaaaaaaaaacattaaagctataataacgtagcaaacatacaccaccacaagaattacttcagcaacaatcattaaggcactacatgattacttatcatccgcgaccacagaaattagattttgctatctttggactaaatatgaacactcgtgtgtaagcatttagttaaagttactgaaattaacagctaatattgattaaattggtggtataactgtataacaaaactcaataggtttggcgctactgtaaggtaatacatggcctggcttattttgttctcctaaaagattttgtcatttatgttaaatttttcaaatcattaaggacttataacacatggtggaaaggtagatcaggccaaaccgaactaaagaattgttgtctaatagtatgtacacataataaaagatctagataaacataaaccaatatattggaaagtaaaagaaagggcatcctatatgtcttgaaacatatcttaacctcaagttcaattctctacaaactattgctgccggggaccatgtagtcacaaacacatgcaaattttcttattttaattggatagttatgaaacttttaagtaatttcatggtgaagattgtatgccaagaccgaagatcttataaactcaaaaagttaatacatttaaagcttaatgacttttggagctcaagtctaaataatcggtacaaattaaaagacataaaacatatcaacaaccaaagaatttttaatcatcacaaatcaatcaccatccaaaagaaaataaaacttatgattattaaaaggtcccatcatttactattctgataaaagcaaagcaacttggacactaagacatacaaatagtttaaaaagacaatgacataaatttcattatgtagaactctggaatgacaaatgagaaaataacaactaccacactacaaatttgaatcagcaaacaaagcacagaagtgataaacatcaaagcaggctatcaccttcaactccatgttgtctaagaatgtgacaaaggataaggatttaacaaataaaagactaacaataccatattaagtcaaattcaatgaagtaatcacaataccaaaaagaagctgtcaaagcacataataccaaaaagaaaaacacaaataaacgtgatagagcagtacagtgaagaaactcacttgaatggagattttgcacacacaacattcatcatatcaaatcaaactcattaaactataagcatttgcaaggtacactatatgatatgcttgacacaatagattcaaacatattattagatcacaacaaatccaaaagaaccaaacattacacagttgaaacatccaaacaaaaagaaacaaatcaaattccaatcaattcttgctaaaaatctaacattaatatcataaaaacaaagattaaaaaaaaagcagagaaatgtaagagaacagacctaacaccggcatcaccgacgataccaatagccataccagcagaaagaccagcaagaccacaagcgagaccagaagatagatgtgcataaccatcaaagagataataggatttggctttagggttaattccagtactgataataacagcaataatcaacccataaatacctaaaactccagccataacaacaggaacaatcgatttcatcacaagttcaggtctcatgacacccatggaagccacacccactccactcttcgctgttccataagccgctcccatacctaattcaatcaatcaatcaaacaaacaaaaaatcaatgagaacatctaattcatcaaataattacaagaatcgaacgtacatgagaagactagggcagctgcggcgccgagaaagccgaagaagggagcagtttcatcgccactgaaagtagaagacattgtcgttgtagggttaggattagttgttgattaagcgatttgatctggaattggaatgggaatttgaaccggaatttggatgaatcaaaatcaatggaattgagggagggagggagtgagtgagagagaaagattggatttttgtgtgattgagagatcggaaaatggttcgaataggacagaagtggtgctctggcaatgccaggaaacttcgtgctttggtccctactcttttacatattaattgggcctttattgggcctatatatggatccacctaactcaattcatttctacacttcttttaacaaattttacatttcaatttgggtggaaaatactcgacaaatttaagggattatttccaaaatacacaaaaacaactaaaaaattttttttttacataaatatagtacgaaattttaaatatttttacaatttttaagattttatatacagattatatgaattttttgaaagattttatgttataattttattattttattgctagtcattttatttgtctaatatttattttcttctcgttttctatagaatataataaaaatgtgaaaaaaaaattgaacgtgaaaatataatttttttactaaaaatagtattttaaatctgaaaatgtattttgataaatatatatatttctatttatgtatttttaaaaatttatatatatatataaaacataaatttacatttatattttgatctgttacaggtaatatatgttggttatttgtttagtggtagggagatacttataatatacggaaatttacatggtataataacttttactatttttttataaaaatactgctagatggtattttttatttttttattgtgtttttttataagttt

SEQ ID NO: 112362 - DNA, 1242 bp, Cannabis sativa
tattttgtcatttaacaaaacatacggtccaatctataacttttacaaaatacagggtctaaaatagtatttacctaataattaatgcttcttattatgtgcggaaaataagatgctctccatagttcatgaatcaacgttgtttttattaatatctaacgatgcccattataaatggaaacaatatatttttctatttatattctcttatgtaaatatatatgtacatgaaaataatcaaataaaattcagagtcaaaacttaaatatggaagaaaacaaaaaattaattttattattataattctttttaattatttaacaataatttgactataatattttatattgaaatttctatatatactagttaattataattttgacttaagttgatttttcataaaataataaattgtaaattctggaaatgatttcatcaaaatattgtcaaattattaacaaaataaaataaaagttagtattgttcttattattaattatatacaaatataattatattttttaaaaaataaagaaagaaaacagtagctagtataattaaattgcaccttccttgaaagcattaataattattataatgatttaaaatgaaattattgaatctccattctccaccacatacgttccaaactctttccctaaattttattatgcatgcacatgagaggggcagaaaacgcgttaatgtaatcacaaaaaatttattcgatctataacttattgctatctcatttatctttgcactacaatttacaaagtttacaacccaacaactctagtctcaagtcacgtgggatatatggattaaatataagggttctaaaatttaataattttagtttaaattttatataccttagagccggcccttgtgatgccatacaaaaaagagtaataacaatcgtgttgtgggtagctctgttaccaggccatgctaactaaattgtgatgcgggtatgtctgaggcggcttcaaagtttaaggttcaatcatgtcgaagttgagtccgattgcaagcgggtcatcatggctctatccaacaaaattactttgcttgctgagtttggtaatttattttggattgcattaatttatgctctagaattaatgcaagttattaggtttatgcattgtaaacgtttggttaatactatagctcataaattggctagagaaatttgaaattctatatataataaactctaatattatttcccta

SEQ ID NO: 112363 - DNA, 1843 bp, Cannabis sativa
taacatgcctaagttagtgagggttttacagttaaagtctggctcaattggaatgtgaacggtaattcttgtaaagttgttgaagtggatttccaaaactaaaaatatgaccaacattcataagagaatgattttatctatcctagcaacggtagtctataatctttggcaagttagaaatgttactttatggaaacaaaagttgtggtaggttaatcacacagtctgaagaatccaaaatgattgtgaaatcagattagcttgcgttttaccttgtaagatttctaatgaggataggaattgttaagtaatattaaagggtaattgtactggggtatagaatataccgtttgtttgtaattggagttttaatggtttccaattaattgattaagcaatacaatgatcttattcatcaaaagaaaaaaagatgaatttctctcaggttgatcacttgataattttttcgtcctttaaacagtggtcttcgctcttatttataagatttctaatatgacagttattccttttgaacttatattaataactgctcataaaatccctacgtttcatataattacagcgtgtggtaaaatatataattgcatagtaacagtcatttagttttatccagttaacaactattttacaaagaagccttcttacactgtacgcatcagaaaattactattagtaattttatatttaagtctcaacttaaagaataattaaatgcaagttaaaagtattaattgttaaatagaaaacaaacaagatcaaaatagcatatattgtaattattttagagataactgagtagagaatatacacattacaaaagaaaatacaggatatacaaaggatagatgagtcaacacataaaatatctctaatgcgagacaaacgtaaaaaaaccctcatggagaagtgctaaagtaatttgcgagcagcacaatgtaggaaggcttcttggtgaaataatcgtttattagataaaaccaaatgcggttacttggcagttatgcattttatcacacgttgtaattatatgaaatatgagaattgttcatgtttcaagttattaagataagtgtaaaaggaataacttccatattagaaaccctataaataggaggcaagaccagtgtacaaaggacgataaaattatcgagtggtcaccctaagcaaaattcatcttttacgtaaatatcttgtgtaaattattctattatttattattctctaaagttttattaaagtttttcttataaaccacaaaaaatatttcatttattgttaacgaaattttgagttaacatgactaaaaatgcatcattatttatatgttatcaataaaatattcatgattaaaaaatattagtcacattagaaaatttaccatttgttataactaatagtgcttttactcacaatattttctgtgaatgaaataaaataaatgaaaattttaaatctaaatagtactttttatttataaatatttttttactgtgattaaaactaatatttagtaaaaaaaaaaattataagatacttttttttagtgctttgaaattatttctgtttaaatatatatttttaggatattaatgtccatcttactttttttttctatatattatataaaatgctaatttaataataaaaatgaggaaaacaaatctttaacttgtagactttatttatttgtataaataaaaagttgaggaggacaaacatttttggctaattaggatttttgcccattgaactttgatatgtactaaatcatgcctcgtgaacttttaaggtcgttgaaaatcctcctaaactattgagattg

SEQ ID NO: 112364 - DNA, 7273 bp, Cannabis sativa
  modified_base (344)..(350): a, c, t, g, unknown or other
  modified_base (527)..(558): a, c, t, g, unknown or other
  modified_base (7207)..(7212): a, c, t, g, unknown or other
aaataaaagataaatggttgaaaatggaaaaattataactagtggggcccatctatatggccgaccacttagtgtataatttacaattatttatcattttttattacatataatttaatcctaaccctaagtgaaatagtataaaaggaataggatggtctcattatccaatagcttaacctaatgcttcataacctagtttacattctgtcagacaactatagtttcgagacctccttcattttcttctatttttgaatctccgtcattgttcttcattaaattttgagcctatagtgagtgagtgcatgcccacccgtagcaagtctagtactcaatcatannnnnnnagactgtgaagaatccaaacacctgaaggtgaatcgggctcagatcttgataatactctgtgacagaaaggaacaaggattagagatctaagttggaggagtcattatattccgctgcaacaaatttaaggtttcttaacttcatatgtgtttaaattttattgttttagaaattcnnnnnnnnnnnnnnnnnnnnnnnnnnnnnnnntaaatctagatcctggtaaatataatctaacactcttcccattagtcttgatcgtttgttactcaatccaggaatggttccttgacttttaccctttcgttcatggagccgtgatgcttccaccactcaaattatttttttggaaaaaatcactcacttagagctcacctggagatgctttcatttcgcgaagaaggagacttcacaatctcacacttctccttcgagttttagttcttttacaaagttgactctgggagccatgcccacaaatgctttaaacttaggcatttttcttactttggtccttgccagcctagcattttagcaaattatgcgacctgatgagctaaacttatgtgaagtccacggagatgtgtaagaaagaattcatgcatattttatcttttcaagaactttggtcgaatacgcgtcttatctcccagaggaaataattcaagcgtctttctctcggggagacttagttgagaacgtttctagcttctggttacatgtgtacagatgggctaattgactttggtaaatggacgtaagacactgttgaagttgccagtaatcgggcgtaccgtacacctcaaatgatctgggaattttagtctcaaattctcggtcatatccttggattccatcttctgtccttttcaagttttggaggaggagagttgagtgtggttatgcctagtttcgggaaacatactgttcttccaggccatatcctccctctccatgatcactaggaggggagtttcttaaaagtgtagcagttatctcctagctttcacaggaaaatagctatgggggttgtaagtggaaacacagttgtattgttgtccctaactgatccctccgtgatacgaatctcgtagaggaaagcataggctccttgtggcgcagaaggcttttggtttcctgaagggaaagctgggcctgaaccttgcgcagacaatttattttaagctgagatctgtttcagtaagcgaaagtcatgttatattttgtaatggaaaactttcgactttcgcttaggaaaggctaaaagtgcacgagaaatttggacattgactttacttgcaaaaggcggaggaagaatatctcagggtgagcgagagtcatgtcaaattttgtaggaggccagctttgacttttgcggaggaaggctaaagttgcccaaaaactcaagcttagactttgcttgaaaagatcaaaaggagaaagcatcatggggagtaaaatagactttaagcaatctttccattttgagaaggagggttgaagatgtatcatacccccagtaatatttcttgcacgaaaatgacatgcatgcgggagccatgttgaatttttatgaagcaagctttggcttccgcgaaagaaggctgaagttgcataaaaattaaagcttacactttgcttgaaaatatcaaaggaagaaagcatcacgaagagtaaaacagacttcaagcagtccttccattatgggaagaagggctgaagacatgccatacccccagtgatctttcttgcatgaaaacaacgtgcatgcgagagtcatgttgaacttttatgaggtaagctttggcttccgtgaaggaaggctgaagttgtataaaaattcaaactcacactttgcttgaaaggatcaaaggaagaaagcatcatagacactaagatagacttcaaccagtccttcaattctgtgaaggagggttgaagatgtgccatacccccagtgatctttctttcacaaaaataaaatgcatgtgaaagtcatgctgaatttttatgtagtaagcttcgacttccaagaaggaaggatgaagttacataaaaattgaagctcagactttgcttgaaaggatcgaaggaagaaagcatcacggagagtaagaaagacttcaagcagtccttccattccgggtaggagggttgacgacgtgccataccccatgtgatctttcttgcacgaaaaacatcgtgcatgcgagagtcatgttgaaattttacgaggcaagcttcgccttctgtgaaggaaggctgaagttgcataaaaattcaaggtcagacttcgattgaaatgatcaaaggaaaaagcatcacagagagtaagacataattcaagcagtctttctattccgggatagagggttgaagacgtgccatacccccagtgatctttcttgtacgaaaacaacgtgcttgcgggagccatgttgaatttttatgaagcaagcttcggcttccacaaaggaaggctgaatttgcataaaaattcaagcttagacttcgcttgaaaggatcaatggaagaaagcatcacgaagagtaagacagacttcaagtagtccatccattcttggaaggagggttgaagacatgtcataccccaagtgatctttcttaaacaaaaacaatgtgcatgcgagagtcatgctgaaattttatgaagcaagcttcggctttcgtgaaggaaggctgaagttgcataaaatatcaagctcaaacttcacttgaaaggatcaaaggaagaaagcatcacagagtgtaagacagacttcaagcagtccttccattccagtaaagagggttgaagacgtatcataccccctgtgatctttcttgcataaaaaacatcttgcatgtaagattcatgttgaacttttatgaggcaagcttaagcttctgcgaaggaaggctgaagttgcataaaaattcaagctcagacttttcttgaaaggatcaaaggaagaaagcatcacagagagtaagacagactttaagcagtccttccattccgggaaggagggttgaagacttgtcgtacccccggtgatctttcttgcacgaaaaacgtcatgcatgtgagaggcatgttgaatttttacgaggcaagcttcttcttctgtgaaggaaggcggaagtcgcataaaaattcaagcttagactttgcttgaaaagatcaaagtgtgaaagaatcattgggtgtaaaacagacttcaagcagtcttcccctttcgagaaagagggatgaagatgtacaacacaaccaatgatctttcatacacgaaaagcaatgcccatgcatctcccaagctctgagaagctttaggggttgcatgcatgcatcccaggatctgttgggcagtctgtttcctatagtgaagtgtaaggcctctaatggcttctggggcaaaaacttagactccttgtagaataagaagtggactggtaggagcttcctatctggtttataatgtctcgagttgctttctctgatgtaacttcaggtttggaatcatattaggcgacagaaaccccttgagcgaactgtgccaaaaattgcccgcctcaacctatagtaccgtaaccacgcttgactggtggcctagcagacattgacggtactggggtctcctctcagcggccgccattacaggatcaatttccaaataacttcactacctaccgtaaaggcaaaggaagtagttgttgaacaatagatccgaccctggcgtcagcaccgacgctggagtctcaagctggatagagtctttgcatctgatgatccctcttgagttattcgtcataaccgcattgcatcgtagcctctttgcctagccccaacacctcttacaccttgccgtatttgcgtggttacaccttcgtgaacggcaaaaagtgtgggtctagatataccaatggccggtcattcttacagggagttggcttgccagattcgagcttttaagggcaaatattggtgcagcaagcgttctaagaccgcatgtgtttgtcctttgtatttttctcttgaggatctagcgatcgggttctactctgggaaatgcctccgatctgcccatttttggccttcgaccggacctcagtaggagatcaggaggtctcccttcttttctcgcacaggttctctttctgacgggcttgcatcagtaaccgccatgcattgtttttcttcagctctcaaagaaagcaccaaaatatttaccgaatttctcagcaactaaatatttttagagcttaagaaggtaataatatagtaaatagtgaaataataaacaataaatttttacgtggttcgggcattagttatccttagtccacgagtccattttattaggctctttggctgataattgtttatacaaatagagatagcatggactaagactctttcctgccttgttcctcttgaagaagaggaagcttagtaggaatattttggagttaatagtacggttacaaacatgtgtttgcttgaatggcgaagaatgggtcctcaattcctagggagaaggtccttctctcttgtgctttttgtaaggtatttataggccagcttaatgtatacactgccttggatggatcttcgtagggatgaaatcctaccattggactggtaggtggcacattttccatatggcatttaagggtgtcaaatcgtactgactggataggctgggccttagacgcgtgtcacttccgggcttctcttatttgaatttctattatccctaaccgttggattatttagctcagtacacaaggacacacattctctgtatgatagcatatcgtgggagacaacctctgacatattacatgaaaaagcttggtcactaggttcgtagcttgacactcgtggacgaagccgacacgagctgaaggcatacccgggattgaggcattctcgaaatgtcttggcccttctgggaaaatccccactctttgcggtaatgcatggtgttggttcctggaggtaagggagactttgtttcatggatcccttccgtgtggttagcagtcagggaactcctcttcacggaacctcttcctgtgaagttggtgcctttactttcccggagtatcaattgagaaagttgatccggctaacgagtccttagcctttttttattgaagtccacgtgtcatgtttacgaaaacatggataacaattacaaaatctaaaaggcttgaatcccacattgttaagctcttgacttcaaacagtagctatggtctgacacaatatccaatttaaagcaagcttttatctttggaaaacatccaaccatttatcattcataaacacatgattatgcttggaaaaaattctatcaccaacctcatgcttattagaccaagtaaagtgtgctctcaagcacttgaattcctctacttgacctaaggcaagtcaagattaattatctgtaatatctttaactttaatttgtctcccaccatttctatcttggaagctaaacatagcattaaagtcggcaaaaatgttataaggattagtcagctgaccaatactcgctcacttagcccaaagatctttcctctcccctatagagttgctaccataaacaactgtagcaaaggaaaactctttttggtcacaaatcttaaccttacagtgaacaagttgagaatcttcaaacacaatgtcaacctgcctaagtttgacttgccaaatcaacaaaattctacctgaaatgcacaactagaatattgttcccaattagggaaattattctcaaagataccttgaaccttctcgtgtttcactttagtaaaaacccaaccttattcatcttacaaatatcaagaataaatttgtgcttttcctttctttttattcatacccctcacattccactctactatattataaacatccatcaattattctggatagaattagtaacaatcgattcatctccgatttcatgcaaaattgcatgcccattaatgctattagctttactagaagctacagtaaacctgttagagacgccctattcttcactaatttctatcgaatctaaatccttacccgaacttccttcatctatagcaatactagcattaaattccactgtcttctctgttataactacttcaacagataatttttccataacaaaatcaacttgttgcttaacaagcttctcacctttatcaattgaaatttttttcttccagctcacacctttctccttgttgcaattagccactaagtgacccaactttcacacacagaatatttggagggaagccattcgtactataccaattgttcaacaaattggtcctattcattgatgtaagtaatagtttttgagggtaatccgagatctccatatctaacaaaacccttgtgtattataccattgatctactctgtcactttgtccatcattaatagcttaccaatcgtactcatgatagcactaagattattctttccccagtattgtagtcccaacttgtttaacctaatccaaaccaggtttgacttcaccattctcacagagttcatgtcagttgtccaagaacaaagaacatctggtttttttttccaaaatgaatgactcccatttctattacaagtctctagtagcttcatgatggtctacaaagttgaagggagaaaagtatactaaccttttttactaggagagaaaaattctaattattctggtgaggctatagatatcttcatgatgaatctccaaaattcacatacatgcaaagtactggtactcaactttttaattttacatcatatgatcataatatataggataaatagtggcataagtacccannnnnntaagtttgtaagcggcataaacccaatgttcattttagcggcataagtacccaatgtttat

SEQ ID NO: 112365 - DNA, 11009 bp, Cannabis sativa
aacaccacacagtgttaacactctcatggcgcaaaaaaattccacataatcctgtcctagaaatgaaattttacgggcaacattttaccattcaaacatgctaaatatcctagacctaacttaaattaagcatttttatcctaaatacgaaataacaaatagtgaataaagcatcgagatacttgcttggtatatgagtagggaatgagagattgtcgtggaaatctgcccaagagtgttgaacccagttgatcacgcgatcatagccagcctgagtgtcgaagttctcatcagtataggggtggattagttcaatgtctaaaggctctgcctctggaaagcgggtcgaacgtaggtttataaaattattgaattaagcaattggagacttcttgcatccaccactaaggacgattgcgagtttgaagttttttttggaaaataaggctctggtttcaagtttaaaggcaagggattttgaaagactaagatggtgaaaaaaggaagaaataggttttgtgaacctatttatacttcggtcaaaatacgtgtggtttgaaatgaatagcctaaattctttttctaaaaagcatcatttgatctgatggatggaaaattgaaaagatggcatttaaaattcacccatggtgtttattcttcatcattacatgcctcgagtactgtatgcatcaaaggagggtcatttcaatcaacattccattattgtaatttctcccaagaaacaagcccccaacacgcgcgtgttgttaacaacggcattaaaggcaccacatgtgtgtcacgcctgtggtaccttcaaattatggccctgtacttgatgacaactcacggggatgcattcacgatcccaacaatcaccacatgtcaaaaactcatctctaagagatggaaggagactacaagctcccagatcttgaaaaatcctagaagcatgggggtaaatgttatccgtatttctgagcatgtgacacatgacgtttaaatgaatggattaacctcatattctcgctaagtgaaatcccccactacaatcctatcatagagaagcctcacggaatcgagaacaagtcaagatcaaaggataagtggaagcctacctcgccttatcctaacttcccggacacagaagacatatcgtctctcctagacccggagtggtctaaacttagagtctgcccggctgatacccggatgggtactcgaagggcctatcacgaaaactaattacccaagagtgtcgcggacgtctacctttggtgcaatatggattgcccaacgatggttatgcttttttttaacacaagatcagatcttgtcccatgtgtccaggcacagtagtgcacacacctcatccatatttttgccagacggttatatcaaacctctacttttaaaggtgaaaccttttggtgacacgcaccctctacttttaaaggttaaacttttgagggacacgtgtccacgacgtacaatggtctccaattatccagctgctgcacgcacgagcacaattttttccaaggggcccaatagtttgctctcttttgcatgtaatttaccccattagcagacttttagcagaaaccctaggcgggtcatgggcatgtccatacccgcctttagcttataaatacatttctatttccatacgaaggagaaattacaacctaaatagtcgaagctctgccaatattactctaagtcttcttcttcttcaatagaaactaagagtacaaagttagaatttcctgtaaaatattgtaaaaacactaactcgtagactaagattaattaacacatgaactacgtaaaaaattttatatagttaatttttatattttaatctttctttagtttttaaatatttaattttcaaaaatctcgataaaccattataatattaaatttggatttttttttaaaaaaatattttgaaaaaaaaaacaaagaaggattcttatttatatttttgttagtaaagtaattaagactcctaggagattaggagaaaaaaccccaaataataaaacaaaaaagaaaacgttggtcggttggtctttgtccctaccaagcctcaaatttttattgttttattgttttataatattattaaaaagaagagaaagaattgagtgaaaaagctgaattgaataggaacgaaacaaacgtcgcccacgaaacattgaatgaaaggtggaagcaggaagacgaggaaaggtgttttgtaattgtatgtatatgtatatctcctcctctttccttctcctactactattactcatccaaacccctctctctctctctctctccttcccctgcctattcggggtccctattgccaccacgcttttctctcctttcttttcttcatttcaccaaaaaagaactcctctctctctctctctctctctcgaccaccacaggccacacccaaacccgtgttatgttgaataatgcaaaagctctgtaatttcaacctggatttctgattctataattcatacaaggtatgcatacatatacatggaatcatgttctttcttgggattcttcgtttattgcgtgtattgtcgtttttcttttccttttagattttcctttattttcttacatctgagaaatgcgagttttgatttctgtacccgtttttttttttttttttggttttctggattcgtctatcgtttgtcttcacgtatatgaataggtgtatgagtttcgattgttgtattggccattgaatttcatgctaacttgttgtttatggataatcctgtgaattatgaatcagtgttcttttttattcggttgaaacgaaggtaaagatgtcgagttttgtgggtgtcattgtttctgatccatggctgcaaagccaattcacccaagtggagctccggactctcaaatcaagagtaagcatttggcttttgtttttcattgttggttatgaattctgcgtttttagttgactttggattatgatactggttcctaattttttccttaatatgataaattagcaatcttagtaaaatgtgaaatgtgttgcattggttttagttcctctcagtaaggactcaatcaggtagagtcacggtgggagatttgccatctctctttgtgaaaatgaaggccttcagtgaattgttcaccgaggatgagattaagactgctttggaggaatcatataaggacgcgggagaagaaatcgattttgaatccttcctcagagtaagtcctttatagatgctcattttattagcttattgcttgaatcttatgttttgtgtaatcctgcaatgctaaattttatgtatacaatcaataggtatataacaagtaagcttcagtatcatatgaaaaggaaataagtgtgtggcactgtggtagatatcaaagtgcataataagcatcattttctcatgtttttggaagatgaaatgaatagaaataaacaactcttataattgttgattggcaggctcatttgagtttgcaaactcgggctacagaaaaatcaggtggttcaaaaagttcatcttcatttcttaaggcaaccacaacaactgtccaccatgcaattaatgaatccgagagggcttcttatgttgcccacattaacagctttcttgctgaagatcctttcttgaaaaaatatcttccaatagatccgtccacaaatgcattgtttgatcttgcaaaagatggtgttcttctgtggtaggtgtgctagaaacaattgaaaattgtgattagtgattatcaaaaaagaaaaagaaaactgtaattagtgtactgtcctacttttcaaatttgatgatgccaattactgcttcatgcagcaaacttattaacgtagctgttcctgggactatagatgagcgagcaatcaacactaaagcagtcctcaatccgtgggagaggaatgagaatcataccctttgccttaattccgcaaaggctattggctgcactgtagttaatattggcacgcaggacttaattgagggaagagtatgttactgactgctagattttagttgaagttctgtttgtaatatatttttcttggatgatattagctttaaaacttctctctaatgtttgttctccttggtttttactctgcagccacatcttttactaggattaatatcccaaataattaaggtattcttactgtttcaatttgaaatcttagaacatagaagctattcattaaaagttgaggtaatgaggtcttaatgatatgatttttttcattcggtgcatcagattcaactactagctgatctcaatctgaagaaaactccacaacttgttgaattggtggatgacagcaaggttatgaaatttctattttatatccttctagtttgataagttcattgaataaactttttttcacaattcctttatcatatattctataatttatttacttgagatgctatattacttggcaggatgtggaggagctcttgggtttatcacctgaaaaggttttattgaaatggatgaattttcatctgaaaaaggctgggtatgagaaacaggttacaaatttctcttctgatgtgaaggtaagataatgcctctattttttattggctgttcactttatgcttaaacttaattgctgtaatataattttaagccaatatttaaacatgattcgttaagcttctgagatgtcatgttttgtattcatgaatcatgatggtattatactcgtttatatgcaggatggagaagcctatgcttacctccttaatgctcttgcaccagagtactcaggtcctgctacattggacaagaaggatccagcagaaagagcaaatatgattctcgagcatgcagaaaaattggattgcaaaagatacctgactcctaaggacattgttgagggctcgccaaatcttaatcttgcatttgtggctcagatattccagcacaggtaaggagcaacaattgttgtttggttttctgtaatgtcttggagctattccccatcgggcatgacaaaagttgttaattccactttattctgtgtgcaggaatggattgaccgttgacagcaaaaaaatgtcatttgctgagatgatgactgatgatgctcaaacttctcgggaagagagatgttttagactatggattaacagtcttggaattgctacctatatcaacaatgtttttgaggatgtcagaaatgggtaagcttttcattctctcccggcttcttaatccccgtatatgaatctgcaacatggttgagccatgattgagtgtattcctttattcgtatgtttctgtagatgggtccttttggaagttcttgataaaattacacctggttcagtcaactggaaacaggcatcaaagccccctataaagatgccgttcagaaaagttgagaattgcaaccaagttatactgattggaaaggatttaaatttctctcttgtgaatgtagctgggaatgatattgtgcaagggaataagaagctcatactgggtaagtttgtaagaatttcccagtaaatggtgtcttattagtacaatcctactcatttcctgcaaccatgcttggttggtatgtgaaattttggaattttactgcaagtacttggattttatccatggatggtagagttacattctttttcagatgaaactccatgtaattttattctaccaagttttaagccttgaatttgatttttctgttgaaatgacgatttaactttggctattatatatatccagcatatttgtggcagttgatgaggttttctatgctcaaactcttgaaaaatttaagatctcattcccaaggtaagaaggggaaagagattactgatgctgacattctaacctgggcaaataacattgtgaagaaagcaggtagaacctcccaaatggacagtttcaaggtaaaaatatgaaaaatgacatcttttgctatcagttttcatttaccatttggcctgggaactcatcatatatttatgctataggataaaaatctttcaaatggaatcttcttccttgagcttcttagtgctgttgaaccaagggtggtaaactggagtgttgtcactaagggggagactggtaaagtttcactatcaactaatctttacttctagcaccttttccatttatacatctccttagaatgataatgttttttatgtttttgcctttttattaaccattctattttgttattaaattgtcagatgaagacaagaaattgaatgctacatatataatcagtgttgctaggaagcttggctgctccattttcttgttacctgaagatattatagaggtaaattatttgtgccttcatggatatgaattattatactgattgcctcttttgtgtaaataaaagtaaagagtttataacaacccaataggaaagctcgaacggtcaagtttgcagtgtgctgtttgctccctcaaggtttgaggttaaagtacctcttaagcacttaacattaaaaactattgtcgtgcccttgtttgccacaggtcaatcagaagatgattctcattttgacagcaagcatcatgtactggagcttgcagcaacaagctgctgactcagagaatgcatctgatggatcgcccacagcttctgtcggcagtgaaaatgaagcagctctgtccaatgaggtctctaacatggcccttgatgatctctcgccagaggttggagatgagaaatcaaagatggaaaagattgagccctctgaaaatgttgaaaatgaagtgccctctacaaaagatgaaggactagacaccgaagataaagagtagccaaaacatagaaatgttttttttttcccttttccatatatattttttaattattttctcaaatgaacaggatctagaggttttttaattgcagtttacaaattcttgcttgctctaggtggaagagagaatggttaattttaatttgcttgtgaaccacagaaaaaagaaagttagaaaaaagggctcttgtaaattttgattatagatttttgtttctaggtctattctttgaaaggaaattacattaattttgccgaataatatgttggctggagaatgcattattttcttgtccaatatcattgtactgatgacagacagtatattttttcattcaaatatacaccattcattattcaatgtcaatattagtaaataatgatgcaaatcagcaatatgtcaatgtcccttgacccaaatcagcatgttatgagttatagtgaagtctaatgtgtgcttatgcaaggctggggttaacagaataagaagaaacaagattgaaaaacatcagtaaataatgcatttttatatattaaaaaaatggtgtgtattgataaaatgttatagtaaatttgaattacataaaaactaaacaagcactcaagaagacttgcaactccacttttcttttactcccaacattgcaaaactacagaaacacttgaacaatacacatttgtaagaacaaaatagaaacctaaaaaaagtatttcattatccctcattcggcattattgcagaatgaggtactgatcttctggccctaaagaactacttttaaattcccatcagcagcagtttcccgttctgcaacaagcataagcatctcaaggcgtttgtcaaaaattaatgcactctcatctctcgcatcaagatcagcagcctcagcttctagccacttttctcgtagatcatcaagaagattgctttgttccgtgttcacctcagctcctggagcacttggcacagttgttcgtagtgaagaatctccagatggcggcggcagtgtcaatagcattgctcggaattcacaagtttgagcaaatgtctcaaagttgcaagccatcatgtctagacaatattcccgtaccttaagaacaccgtacctaaaatacaaatgtaataacaaggtattaggtatcttgctgcttagtttttaattaagcctccaactcaatttggttatgagaggtatctgaaaacttaatattatcaagaactgaaatttgtagaaaggaaataccaaccagaatatttaacagaggaagatagcattccatttccagatgtcattagttttacttacagcatgtaagtgcaatgttatatgctaacaagcctacacaacttacggttttttgggtgttttactgggttatattctaagaaatatcacaatatttttatagtgatctcatgttaaaatggataataactaaaaagtgtcttacatgtctgataatatcaaccattggcacagttctgctggtgaaactctttccaagtgtggcagtagcacatcagctacagcacgcttaagaggaaataataggtatctcgaagcagcatcaaagatttcctcagcctgttcaattattacaataaaaataagaaaataacgtaaactgaatgcatcttcaacttagcataaaaagaaacttcaaaggcagaaaaccaaaaagagcgactttgaggttattactattactacatgaatggttataatatacctgctcagggtttatatcttttaaactatcagtatacctgcataaaccagggaaccattaaaaatgagaatactgtagccaaactagtacagaaagattaggaaggaatctctaatacaaaaatttgacaccaaaacttttgattttcataatcaaaagaaacaatatgaaaagtagtaatacttctcattctaaatgttagtgcatcttcagaattctatagttaaaaaaatacacttacataaactcaatcattttctcaaacgcctccatgctcaaatcatgttcctcaatacatggcagggtatcaaaaggtagcccatcttttccttcatgaaaatctttcattcgtgataatcttgctctaaagtactctgatcttgatgccaaaaccacttgatggcaacggaaaatctttttatcaattttaatgcaaacatcagctagatcatcttcaaaattacttatacgcattctatcagcatgagatattaaatcctcaacaccattaattaagttaggatcaagggtcgaattggcgagggaaagttgaagtatgcaacgtaaggagctagggagacggtcttcttcaggaagggatataccctgtaagatgaaccgtttctgagagttgtcgacatcttttaatgctttatagtcagcgaacttttgatgaatcaattctttctcaacaatcctttgtaaagattcacatttgcatactttgcatatcctcaccagatcttccatatcatcaaccgcaatctcaagtctatcagagtaaaagaaatggatgaggctataaagagcaggataagacaacttttcccttgccaatctcacttccttacggtgtttccaatcattctcaaactttctcttaaaaaacggtgatcgaacgctcaaaattaccctgtgggcttcaatgggtctaccttgcacatgaaatatgacatcgggagggaaatggttggaattgaaagccagactggatggattacctactcacaacattacatgtcaagtaacacattggtacatctaaattccatacgagaaatcacaacataagacacgctcagtggagacagacaccaaactctgacgctattttccacaattataatgcacttccatggcacattcactaatcaatgccaacagattgtgctgtccttcccaattgcactaatcaatataaggaaatcacctaagttaaatttcgtaaatgtgtaagtaaacacacgattgtatagagatagtgagacatagtttgagtcattggaatcatcattctgtcatgtataataaacaagccttcaaagtcggaacattcccatgattctttaccctattcctacctaaaatatcaaacacattcgttcgcatgctattgttgaactgtttcgataacggtatagcccaataaccattcagcttctcagcaaccaaagctttaatcatatgtacatacaacactcaaacacagaatacgacataactcagaaaatggagatagaacgcacctgaaatctgaaactgacccatatcaacctgctccaagtacaccctattagcaccgcagctcaagaaagtttcccttagagcagcctgcaagggagccaaaggcgggggccttgcctcaaaggccttcaagagcttccgaaccttcaaattgagagccgcgtagtggcagcggtcgccatcgaaggtgtgctcggaacaaacggcgccgctctcgagcaacatccgggcggcgtcgaggtggccggcgagacaagcgtagtagagggccactgagtcccactggtcacgggcgttgacgttaacaccggactcgagcaagtaccggagccgatcaacatcaccggcgcgggacgcctcgaaaacgtcgccgttggggactttcttgagtgggaccgaggcggaaaaatcggaagggtcgaggtcgatcccgtcgagctcggcgtctaagctccacgcagggcgtgcggtggcggacattgggttcgtttggccccacccaactaagtcctttttttcgtacaaagtgtattttgggaagttattaagtggagtgaggtgaaggaagatgaagagggtgttgcacacaacacatataggaggggagggagattttttttttcttttcttttttaaaggagaggggagggagatttatttggctattaaattattaggaaattatagcatatggcaataaataatagactagttagtaaataagtttcatttcaaaatttatagcaaaatgactatattagattttttcttaacaaaaaaaaaactttaatcaaaccccagcaaatacattacaacagaggtagaacaccactacaaacacacggttgcagcaacaacagccccaaccgttagtaatattattacaatggaagaaaatcaaga

SEQ ID NO: 112366 - DNA, 6644 bp, Cannabis sativa
gacctccaagactcacacacccatatggccacttgagctagcctcacgtggttgtatagctattcttaatcgagacaaaaataaataaaaaaataaatagaaggatgggctgctggctgccttgttgatgttgttttatcactcgtggcagagaagataaggccacatgtttcatgacttgttttaccacagcttttggtgatggggcctactccatcaatcaatactatatttttcaaggtttatacctttaatttttattattatatttcaaagaaaaactaagtaatttttaaatttaaaatagagaatcacaagcaaaggccatatatggaaataaacccaacaagaccattattttaaaccccttctagttgtactaataaaaaaaggttaaattttgatactttaattaaataatatttagtgtatcttttggtaaatattcaaatatttatataggctttagagagcaaactgaaaaagcttagctagttgagcaaagcacagctcacaagaagtgaaagtgagggaataattcttttcttgagcttgctaacactgttttcagccttaatgcttttttcagtttattactgttgatgtgaaatctcttctaagatcataattcacatacacatatacaaacacaaatgaccttttaacagttcttaagttggctttaaccttgggaggtaatcaatcaatcccagcagaaatgtcatcatttacaaaatttatattcttctaattcatttaaaattgtttattatttattctttatctgaacatgtgagttttccaattttatataattattgctttattataatcttgttttggtcttcattctcttgagtagtatatgatggtacacttagaattttctttatagataccctcgctgaaaatctttcttatatattgtttccatgtgggtggtaacaacacagccaataggtttatggtatccatggctgcatatatctttgattttggatcctaactgttagtgggtgtgtatgtttttcccttttattttattttattttatttttgtttttctgggttggacatttgctgatgaatatgttaatgttcaagcttaaatctttgtatttccatctgggttcttaagaatttgaagaacccttttagctgtcataattttgttatcattctcctattgctcctcttcatactgacattgctttatgatatttccagtcgagaacagatgttgggttgaggtgaagaatcgaccaggtttaatatagaaactctttcagccatgaaggtcttcttcttggtcaacaggcctggccctgctcttatatgcttgaaaagaatatttcttttgctgattttcagtttgtgggcatctgtacaagtaatgggtgccactcacaattctactgttccttcttcaaatcaaatttctgttgctggaaatagtagtgtttcttcttcttcttcaaacccaatggctggtactggaaataccagtgtttcttcttcttcttcaagaccgagtgttgtgaatattggagctttgttcacttacaattcggttattgggaggtctgctaaaccagcgatattagcagccattgaggatgtaaattctgataaaagcatccttcatggaacaacattgaatgttgttttccaagataccaattgtagtcaatttcttggaactattgaaggtaattcctttaactcctcttgcttggtttaatcgaagagaattatttttttttttcttgaatgaaagagaattgcatttgttagattagtaagagtcaaccaaaaaggaatttgacatttggtagttcagattttaggccaggccatagtgccttcaaaggcatctaagtataaacttgcataaaaaaatggtactttatttgttggttgtgtaacatactagcaaatactaccattgtatcttcaaatgctagaatagtactttgctcatacttgctatgtttactatatttgcatacaatactaaatttgtcgaaatttgaaggtatttgccctggaaagttgaattctccttgaaaaatcacaagatatttattggttcccaccaactatttagttaccgatgatctgatttgaatgtaaattctgtatgtatgatcatttgagcataagaggccttcttaaaatttcaacatatgatgttgtttgtaatggataggcacaagatattcatatgaactgaattttgtatatactggaaaattacaatgttgtagttgttttaaaacgtagtcttggggcttgccatgtttcatattggcattttggtactgtagtgtattaaatgtaacaataggattgacgtttcacttagaatttctactgctatacagtatctgatatcgatgccttctctaaagatctgatcattgtgacttttaggtcttttaatattctttctgaaactgaattttgtttgtatgcccttttaatgagctgtgataattaaaaattctcactaactatcaatatccatcaatttgtggatggggaaaagatttatctggatcacttatatgattataagctttccctctttattttttgaagtaagaaatctaatgatattaccctccctgtagctttggagctcattcaacatgatgttgtagctgcaattggcccacagtcctctgggatatctcatgtcatgtcacatgttataaatgagctccatgtacctcttctgtcatttggatcgacagacccttctctttctgcacagcagtattcatatttagttcgtactacacagagtgactacttccagatgtatgcagtagccgatttggtggattatcatcaatggagagaagtaattgccatatttgttgatgatgattatggcagaaatgggatttctgttttgggtgatgccttggcaaagaatcgtgctagaatctcttacaaggctgccttttctcctggagcctcaataagtgaaatccatgacgttttacttggcgtaaacctcatggaatctcgggtgtatgttgtacatgttaaccctgactctggcttgaatattttctctgttgcaaaatctatagggatgatgggcgctggttatgtttggattgcaacagactggcttccttctcacctggataccttacgactacctgatcctaacataatgaatcttttacaaggggttgttgctattcgccattacacgccagatactgatcttaagaaaaagtttatgtctaggtgggacaaactaaaacatgatggtatttcaggtttcaattcttatgctctttatgcctatgattcagtttggttagcagcccgtgcacttgatgtatttttgaatgaaggtggtaaaatatcattctctaaagacccacaattacgagatacaaacagaagctccctgcgcttatcatcactccacatttttgatggaggctcacaatatctaaagacaatccttaggacgaacttcacaggtgtgagtggtaggattcaatttgatacggataaaaacttagttcatccagcatatgatattctaaacattgatgggactggtactcgtaaggttggttattggacaaatcattctggtctgtcaattgctgctccagagattgtatattcaaagcctcccaatgtttctaccagcaatcaacatctttacagcattatatggccaggagaaacagctaagacgcctcgaggatggatatttcccaacaatggcaagccactgcgaattgcagtgcctaatcgagttggttacaaagatatcgtggctaaagataaaaaccctccaggggtaagaggattttgcatcgatgtctttgaatccgctgtagtgctattgccttatgctgtgccacgacaatatgtgctatatggagatggagagagaaatcccgaattctctgaacttgtacgtttggttgcagaaaatgtgagtatttggcattaaaatgtagcttttaacttagtggtgatcaaatttttgaatatcagtggtccaacctatagcagagttagcttagtaattatttttaatacactatcttacacggatacctacatatgttagtgtgtcttcacatttactaaactttgttatcttttaatttgatgagggtggtttgggtttggttttcttaacagaaatatgatgctgctgttggggatattacaattactacaaatagaacaaggatggttgattttacgcagccttacttggaatcaggacttgttgtagttgctcctgtcaaagaggcaaagacaagtccatgggctttcctcaagccatttactttgccaatgtggattgtgactggtggcttcttcctttttgtgggtgctgttgtctggattcttgagcataggtctaatcacgagtttcgtggtccaccgagaaagcaaatcatgactattttttggtcagtacatatttccttcttttaatcctttatttgtttctaggattagagaaaaatgttttatttccatttaaggcttccgatgatgtctttgaatccatgtaaatgcaaaatggaactggttgtggctagggtgcctataaaatcaccagtaacatgtgaaattttccatatgtgcttctacactttgaagatcatgctgtaaaattctccactatttcgtgctgtgtagcacaaaaaccttcttgagtagaaagactttggtcaaataagctgtctggtcgagtttagttgaatgcatgaacatgtactatgtaagtttcacagaaaatgctttaaacatatgtagttagataatctagcttttagttttcacctgatatcttgccatttgtggagtacgtttactgaccttgtttttgcctttcaggtttagtttctcaacgatgtttttctcacacagtacgtacttcattcttagtcttccattcacacacaccaataattaatctcttcaacaacataatggatcactaacatgatccccttcttgcacattacacaggagagaacactgttagtacgctgggacgtttggtactcatcatatggctttttgtggtgttgattatcaactcaagttacacagctagtttgacatcaatcctcacagtgcaacagctgacatcaagaattgaaggcatagactcgttgatgtcgggcactgatcctattggcattcaggacggatcatttgcttggaagtatctcactaatgagctcaaaattgcagaatcaaggcttgtcaatttgagaaacgaggaagagtacggtaatgctcttcggcttgggccaaaagttcctggtggagtagctgccattgttgacgagcttccatatgtggaggccttcttgtcccataccaaatgtcaatacagaactgtagggcaggagtttacaaaaagtggatggggatttgtaagtactctctaaatctaaaaacaatacatgtaaaatataatgtggttcaatattgtaaactaattcagtttccttgctttcctcaggcatttccaagggactctcctcttgcagtggacctatctactgccattcttcaactctccgagaatggtgatctccagaaaattcgtaagaaatggctgcaaacagaggactgcagcatgaaccctgaagaccaagaagcaaaccgactgtctctcactagtttctggggcttgtttcttatctctggtgtggcctgcttcattgctcttactacatttgccttgagaatatgttgtcagtaccgaaaatttgtccctgaggctgatgtaggcccggaagaggttgtgcctggaacaccaagacggacaattcgagcaactagtttcaagaacttgattgattttgtagataaaaaagaagcagagattaaacagattctcaagcgaaaccgcagtgagcaaaatcatgctagtccaagctctgaagtaaacttccattctgctccttaagaaaattcttgatttgccagttctcttccaggctaatacactacactgttagaacaaatctcattatactgttatacatgcatgatccttccactgatacaattaggcaaatagaataaaaactgttatacaagagagaggaacttaaaaagcttccaaatcccagttcaagaccattgtttacccctaattcaaggaacagaaattttctccaatgtagataataaatatttatatattttgtttttcgtttttactttcatgtctttcttttggaccacaaattttcttgaaaatgtgagtgaaagttttccacaactattctttctttttcaaccattatggttttcacaagaattttgttgatgtagaacagttggttaactaaaatagtattacaattatgagattatagcatgattactttgttatttaaagttgtgtttggctccttaaaaaattcatcacataacttccaaccaaccaaacttatttcgcttagcgaagacttttgagaggccagagtagacctgttcttgctttatcaccatgtacaaccacaaaatacaatagactttctttcatggtgttgacatgcctccaaacctgaaactacaccacataaatgtacatttatatatatatatatgagtgcaatcttaat

SEQ ID NO: 112367 - DNA, 3923 bp, Cannabis sativa
  modified_base (41)..(70): a, c, t, g, unknown or other
gtctacctattagtaacctgctattacaagttaaaaaaaannnnnnnnnnnnnnnnnnnnnnnnnnnnnnccattgaatagtcacccatatatttatacatacctttgttccattgggtacaatgttctgtaagattctcagtctttcatttatcctttctcttcttttctgcaaacatttaatcaataatgtcaaattaatataattaagagaaattatagagtatctgtacaataatagaatgaaaataataatctatatatgtgatgagctagcaaggatagggcttaattttattgattagtacgtacccttgcatagaggctttggggatcagtggctgaccctctagtggccctagtttttccgttcaagttaacggcgccagataaagatttaacgtgtgaaatctcatcgccgttagtaatattctcctgattagtaacattattgtcttcttctgagctgtaactagttgaactatcaacaccgttaataatattcatatttcttgtcttttccactttcccatttgtagtagtactgtccctcttctttgactccaaatttttcttacccttttgaacctgttcagtcttcacatatatctatataattttaacgtccacgtacatttaataaaactatataataataataacaacaataaatcttgttatgtaaacttacattatttcttgaagcacgggttttcttcttattcagcttaattttatcatcaggaacgacgtcgtacttccttttagccggtaataattccttaccagaaatgacagcagtactggtctcttgttggtttattttataatttttatcaccacagtcatcataatcatgaataatttgcttcttatcatcatcatccattagaaaagttgtcatggagagaacattattattattgcgatctatgctaacttgctgattgataatgttattatgatgataagaatcggtatagttataactattatttatcaacatcgaattataattgtcattactcccatggccttgatgagtactgctagaagtaatagtagtatcagttgtggtgtaacaactactctgatcttgagaaaggaattgaagggttgagttgagagaatctaaggtttgaaagagaaagctttcatgatcatgatcatgatcagtttgggacgtattttggtaaccaaataatgctccctcaacattaatattattagtgtcgacgtcgttattattggaaggaataaacgaacactgaccaagaaaatgaggtatgaactcaagatcttcatgatcttgatcttgaccaccatcaactaatgaaaaaatgctggaaaaagaggattcccagtctccatcggggaaagatccggcagactccatttttgctcttgtttaatttacagtacgtacgtactacttcatgtatgtgtcgagaataataatgtaaagtttagtttattggtatttatatttgtgatctattaataatatggcatgatctgaggatgtgctttaatgtttaagcttatttatagccgacattataatgattgcattttataatataactataatattaagtaagagaaatagttggaccaaataggcctcaagccgtgtaaaattaataatttgtaatctctttaattatgatgatgttaattcaaactacaatattatataattaggacatgtttgggggtatgtttggagtctcataatcatttaagtaggttaagtacgtagtttgagatttaaggagtttgacttagatttgaatatgtatgtatatatatatatatatatatttacagtggtgcatctgatgtttgttgataatgatgagtactaatccaaatatagactttgtttggttggatatgaattttaccaaagtaaaaaaattgagagaaaaagcaggcaaaatattcaagaaaatatttcctaaaattttctaagagattcaatatattaatatttttctcaattttatacataaaattataatatttttttaaaatttatatatagtgtgaggtgatggagggattaaggtggggattggtggaaggtaatgaaattgaatggaatgaaaaataaacaacttttattttattcttttatttggcatgtttactttgttagaaaaggaatgaggtgtaaattattttccattgaattgtttactttcacttagtaatagaaaaatttagtgggacacaatatttttacatttttactatgttaagtttacaaaaatattatgttaaaatttcaaaattacaaaaatattgtgtttcaataaaataaaaaaacaactcaaaaacaaccttagaacaacttaacaaacaacatgaaaataacaaaaagataactataaagcaacaaaaaataataaaacattgatataagtgcaataagcaaaataatattaactcctcaatatgtttttgtattgctcttttttttttcatagaatttgttgttacaactttattcttttaattttttttttgaattagtgatagttaaaatgataatttattttttaaaagttaaataaatagttacattaataaaagaaaataataaaatcttatgatttcaaaatgggatatatgtcaatatctactactgcatatcgtgttaattaaaaaaataaaaaatcttatcattgtatttttaaaaaaaatgtatcaaaaaaataaactaaatatgtgtatatctatatttacaaagaaacacatatacaacaaaaaaaaaaattattaggaataaactaaaaatatacattataagaaataaacatgaatgaaaaaaataactaaaaaataactgttcaacaaaaaaaattattaggaattgttatccgcgtttccgtaatgagacatgtggattctatatcagcattcccgacccatcagtggaaccctcattaatggtagtgggcaaaagcttatcaaagcaggttcatggcggataagaccattttttaacaccggcgcttatttttcaccggcgtgatttctcgccggtaaaaggaagttttaccgacgcagttactctacgcgccggtaaaaagttctttaccgaccaagcttcccagataatctttgccggcgcacaactgcgccggcaaagctttgccggtgcagctagggtacttttgctggcgcaacaatgcgccggcaaaagctggttttcttgtagtgtgaccaatgatctttgaagaaagctggatgcaaagaaggaaaaggctaaggctaaaaaagtaagaccccatggaaatgatctgaggaaccacattaaaatgatcgtgtttgcagaagagaatcttctagtaataaaactcaatgtctcaagcataaggttgagcagttgatgaagatcactgagaagatctctaggaagcaaagttgtgtcatgtctaattctgaggaagaggacacggagccttgtgtgaaaagaattattgatacaccatttccagatcatttcaggatgccccaaatggaactgtatgagggacggacgaaccctagggaccctctgtccaaatacaattgcatcatgcaggtcaccaaggcaagtgataatgttaagtgtttgtgttttttttattaacattgagcaagtccgcgaaagactgtggaagagattatctccaggatcgatccacaactagaaagatctacaggtgatgttccagaaacagttatagtagccaaggcttatgacttagaagctagctccctgacaagcatcaagcaacaacaaggagaaaccttgaagaaatatatccagcgtatgatggatgtggctagcaaaatgaaagtcagtgatgatatgaaaatggtggctctaacatcaagacttgcaactagatgttaggttttgtgccctaaat

SEQ ID NO: 112368 - DNA, 3079 bp, Cannabis sativa
  modified_base (38)..(63): a, c, t, g, unknown or other
  modified_base (1072)..(1072): a, c, t, g, unknown or other
aggtaaaaatgatagattttaaaaaagaaggtaaaaannnnnnnnnnnnnnnnnnnnnnnnnntagagtgtaatttcctctattatattcatacccaacccatcatgctggttgataaacagattgggccttagcttcgaaattgattctaacaaggctgggctaaaaagtattgggctagacccaattttgaccactacaagtaataagtcatatgtttttacatgcttggaaattattattggggttcttataaaaatactaaattttgggtaaaagtttataattttattgtcacacgagattttttatacaaatattgtctttttataaaacatccgtaaaacaacaatggaacaactaacaatcgtggagcaacagtgaaaacttaacacaatacacagtataaaatttacactgtattttaaaaaaaaaaattagccccattgtaaaaaaagtaaaaaagttagaaatttcagtatgtggtgtaagaacctcattgttatattttaagtttgtaagtgacataaactcaatatttattttcagtaatataggtactcaatgtttgtaaaactgtaatttttctctaattttatttgtacgtactctgttactgtattaaacagggtacctataatgcttaaattctaaaatcattggatctagacagaaacatatagtatcaactacttctaaatgtttttctaataaatttaaaacagagttggtactgacaaaattgaaagaaatttacagttttacaaatattagatacttatgccgctaaaaataaacattaggtttatgatactaattagtttagaacactcccaataacttttatactctatctttaaatatatcacaaaattttacattctttattttacaatacacttttacattgcgtcataaatcattttcttaaaaatatatcactataactttattttttttttaattttaatttattttattcatttcaaatatatataatattaaagaattgctaaaaagcaccattggtgcttagcaccctccttgatgtcataccgttattggtgtaatnaagtatcgggtctcatataacttatgaacataacttttaggcaatatcgctaactaatcatgagacgccacctatggaatgtgctgggcactactggtgctcaatagcaatactcataatattaatatatagtacacacatcctcatacaaaaataattattaaaatccaaaacaattagtaaaatatagttagagtatctgttgtagcgtattttgttctttaattttttttttaaaacttttctattttagagaaattgttgtgagtgttcttagtatttaattaccaatatttgtcttcttcttctttatttttttggaaaaggcttgaataactattattatagggcatggcatatgtgttcatgacaacaacataagaatattattttataagttggatacccatactaataataatgagttttaataatatattactattttctgtgagatttttttttgggaattatattatcctaataaaatataaagtggctttgagtatttttgttctttttctgatacataatattgtatggcattacactactttaatacaagtcggcaactgcatagaaaaggtttttatgaaaagtacaaataatgcattttcttctgtctcataaactaggtttttttatggactcaaaaactaggttaatcattatgaaagtaaagaaagttctgtcaattgagataataattgtataacatattttcaatttcaaattgatggagccctagtctagatatggaccaagtatttgtaattttgttaggaatctaagttgataatgtaacgtacccgtttcaagcttttattagacagttacaccttacacgcacgttttctgagaaaatttctcagaaggtcacccatcttaaaattactgcaagtcaagcacgcttaactgtagagtattttttcgtgatgggctactaaaaaataagatgcactttgatataggtagtactaatcaattcatttaagcactctttaactgtgtagtctcatacttacacaatttcagaatcatgccacttgaccttcctcaagtaatgtttgcacaaattttatcctatgtttcccagtacagatcacgggactactgactgctacaaataatatggagtcactatagttggacactaaaaatatatataaaaatggacacgaacatgattggcataaactttctctaagaactcgcaaaatttcatatcatgtttagtatattgttagtgtgttataagttaaattaatatttttgtgtcattgtgttacaaccaaaagtaataaataaaaaaagattgagaattgtgacaaaagaaaattgtttatgaaaaaaaaaaaaaaactctcgaagctttggaaacgtgggtgaatttgaagcctccacgtgtaggtagccatgaaaatcatcaaactttgatagctacaagaaacggtgatgttctttcttcatgatcatctctctctgtctttgtcttttctctattgaattaatggaagagatcagatcctcatcctcagcttctccgccgccgactaccacgaccatcgccggcggtggtgatcataataataataataagtcgtcaatgggagctaaaaaggggtgtttatctttcatagtgtccttaaaagagagtttttgttatatgaaggcctccatctttggtctggtaattaattataattaattaattaatattcttaattcaactatattatttaatttatatatatacatatatgtaattaatattatatgtatttatatatatataggctaagaaagtgagtgccaaaaatgagagagaagcaagtgaagctgagcttaaagctgcaaagatgcaagttgaggctgctgatgctgctgagcatgccaaagccaaaattcaaaaatctgcttaattatttactttttttttattattattatttaatataattaattaaggtctacgcagatattagactttgtttttttttttttttt

SEQ ID NO: 112369 - DNA, 2327 bp, Cannabis sativa
  modified_base (1149)..(1153): a, c, t, g, unknown or other
  modified_base (2151)..(2159): a, c, t, g, unknown or other
  modified_base (2277)..(2302): a, c, t, g, unknown or other
cttttcttctacttcatatatatatatataagcatatatatatatagttaacacgctatggcaaccaggtagaggtatgtatgtgaaggaactaagcccgaatcacttcatgtttcaattctatcatgatgtcgatatcgagcgagtcatggaggggagtacgtggactttcgatcgcgcacctttaatattcgaacgagttaaatagggtgaaaatcctagggctattccgctaaaccgattggacatatgggtgcaactacatgacatgacagcaggttttatgtcagaaagggtggtccgggacatcggtaattacatcaaaaagtatgtcaaatcagatccaaataatttcacaggtggttggagagattacttgcgggttcgtgtctctctccaagtggacagaccattagaaagaaagatgaaattataaaagaaaagtggtgttgtttgtatggtgaaatttaaatatgaagatttaccaactttttatttcatatgtggagtgcttcgacattctgagcgatttattgaaaggctatttgaaactcctttacatctcattgataagccatacgggttggaactaaaagctttaccaaggaggagacactacaatatgggagctcaatggcttcgttcaggggtagctaagaaaactggagagtctagttcgaccggtgatgctcaacagaggaaattcggcgagagacaattcagtaatggtggaaatcaattacaaggatctcgtatatcacaacctgtaattgggggaggtaatagtgggattttggagattggtttggatatgcatgtgtaaactcatccaaaaaatttacggagtgatataattggcaagtcaaaggatcaagtaatgttgacagaattagtggaaattaataaggttcctagtctacaggtggcagatactaagagaaggaagatgcacatggtggaggggtccaacacatatattgaaggggaggtatttgagcccattcattataatgaagatgggccgattgggcatgtggacaacaacatagatataattggggaagaagaagatgtgtgtatgggagttagtgatcttcttcttcttcttctttttcttcttctctctttctctctctcttcttcttcttnnnnntcttcttcttcttcttctctctttctctctctctctctcctcttcctcttcttcttcttcttctgttactatctttctatctctctctctctgtcgcaggttttcacatgcagtgctagcactggaccggagccaccatctccaacccccctctcacctcaggggaagcctcaaaaatcccaaaaccccaaaagagaatagggattttttgggttctgagatattttgggttttgtgactttctgggtttcgattgaggtgagagaggggccggagatggtggctccgatccagtgtcgacaccgcatgtgaaaacttgagagagaaaaagagtatcgggagaaaaagaggaagagagagagagaaagagaaagagagaagagaaaagaaaaagaaaaaagaaaaaaaaatataactcgattttcaaaaaataaaaaataatcaacgtcacgactttgaccaaggcctataattgtcaaatgagttaagacatctttcttgagagtcccatgccacatctaggggactcgaaaatattaaccaaccatttggtgttgggtctcacacacctaagtgtgcccaaactagggttcatgggcccgcgcaagcattttcatcctagggacctcaatctaataaggaaaccaataatgatttgactcattttggcatgagaagcttagacttgtgcataaagttagaattgcattgcatatgctcttggtacttaggtacatcttattgtgacatttcatctttcatctggaataataaattccttctagactaagtcatcaacataggactctagtattaacattaatgtaaaatacttgcttaagattaagtaatcactagagatacataaaatatttcataaggactaggaattgtgcctaagtctttcgaatattgcaaggtttcccttattatcctcatgattttgataagttattactatctgttatcccactttttgcactctgacgtggcatcannnnnnnnnacacgtggaatcgactccgagtatctgctcgcaggatatagtctgaacaggatacctcatatgcatgctcgaagcaaagcgattagcgatccacacagagcgaccaacacttagcgannnnnnnnnnnnnnnnnnnnnnnnnnaaagaaatccctataacttggggat

SEQ ID NO: 112370 - DNA, 3411 bp, Cannabis sativa
  modified_base (187)..(188): a, c, t, g, unknown or other
aaataagatattaatataattaaattattatgttaactaaccaactaatttttaaaatttagggttgttgaaaacaaccttaaatatcttttcaaaatttaaaattcaaaaacatgaaactaatttaaaaatatctaggtttatttgaattatttttattaaaataaattaaatatctaataagatnnatgatttgaaaataaccaaatagatattttcaatatcattttcttatcttataatttaataaaattaaaataataaaataaactaaatttaaaatagatatggttagacaattattattttaaaaataaaataataaacaaataataattatccaaattatatgttaaaatatcatcgcctaacttgcctaattcatttaagcatacactaattcgactatcatactgctaacatgcttcctatcaatactatcatatttaaactactaaatcacataacaacttactgaactgtgacttgagcttgtgcctgatgattatttgacatatctagctagtcttcggagaataacctgacaactttgttaccaaattataatactctactagcttaggcacgctactgtgtttctttttcttaattactatgctaacattttctaatcaaaggggttttaaccaaaaagtgtgtttaataatattttcataagagtattcttcggcagaaatacctatgtttaacttctgatttcaaataaatacctcagtttatttttttatgataataatacctaacttatatttcttgaacttttgtaggtacctggccgttaagtgtcaagccaatggccacgtggaagtccctgattagtctaggtcattatatttttattttttatttacaaattcatttaaatataccaataagtaaatgacacgtggataatgacttgacacttaacgaccaagtacctatagaagttccaaaattataacttaggtattattaccgtcaaaaataaaatttagatatttatttacaaatgagagttaaacttagatatttacgtcgcaaactacttttttcataataaataaaaccttactaaatatatacaataattacaaaaatgtaataaaaccttactaaacatacaccataattacaaatatgcttacaaactggaatcctgaaatttatttttcaaaatatacataaagtacaaaattttcttaagtgttgtctaacgacatccaaacaaagcatgtgctctcacgaagataaaactatccaagtctaaccatcgatatatgtagaatcttcaccaagctcacactcactgctcttcagccttagcttttcctcaacctacacatggaaacataaccgtgaactgactgatttagtaagaaaagcacaaaaatacaacttatatctcacctgtagttaagcatccatacaccaaattaccataagtcaactgccgcatccaacacgtataactaagtctcaaacttttttaactattgtatgattgacaataatattagcctatagtcaacactctagtcgtactgatgtgatagaatcaatccatactacaagtacaattaaccataatattaaactgcactcagttttctagtcgtactagtgttggtaacattaattcttactttctgtatttccaaatatatatcccgccagtatccaggtgcaaatctatgtacaaaaatattgctcttattaatcttctatctaattataaatatgtactatctgataccttctagtattactagatattagtatctaaatgcaactccatgtacatccatattgtaatctctagtatacaaggttagctatatcataaaatatgtatatgtaaaatatgtgtatatgtgcatttttcatactattcttaccttaatttcgtaatcaagtgtgtctgtcaacctgagaggaaaatctgctcttcgatcagaggtcgcagtaagtgtcacgctaaaatactttttggaacttaaattcataatatgaagctttcctatcgataaaaagtataaaaataccctaaatattgagaaaagacaaaaatcaaggtactctcgggaaactccaaccggtcaactagatttactaatcggtctaccatttctagcagacccaattggttgattggttctatttttgcaataatttctgcaactcgagagtttttagttctaatccttcaatacctatccaaactagcttaaaacttctagaaaaacataatagggtaatcaaaacataattcaaagctcaagattactaatagctaccaatacaaaaatccaccattaaagtttaaggttgacttcttaaactcaaaccttgacttcaacctagggtagttgctattacttttaattcaaattgaaatccaacttaagagcatgtcacaaaacagctcctaactcatccatatatcattgaattaagaactcaaaacttaaaagtaaaatctatccttttttcatcaaaattcaaaggaaccagggtcttcggagctttaccttaatttagcttcaattcctcttgaatcactagctgagaactcgttaaattctgttcttaaactcttagtttcccatgttcttgtccaagccaatagagagataagagagtaggagacttttgtttatcttggcatttttctatttcttctacagtttactaacttaaggaaaaagaataatttaaacataattaattcttaaaacttattcttatataataaaaagaataactaataaatttttaaaatttattggcaaaagactatttttctcttacttaactactaagtaactaccatgtgtaggggtaaaatggtcataatataatttttgcaaaacctcaaatttaactatccataaatctttcttggtaattctagaatactatcttctgctattataacattattgaccaattcgttgagttcccactgctactgaacacataagcatgaaaatatttaatttcaaatttaatatatatagcaaacctagaatttaataaaatttttgtaattgaaaaattatatcacaaatttttatttctaataataagacttactttcataaaaatacacatatatttataattaactgattaatcactcataatctaataattagttgctagttttcatgtctaatcatacggttattacaactacatattaaaaatcttattataatttgataatgtaataataagttgattatttattagtaaatattaaaattttaataattctaatatttttttataattgttatacctcaaaaattggctgatacttcattgaaggacacgtgtcaacttggaagaatataaatcaacaaatataatgataattatattagaagatattaaaatggaataact

SEQ ID NO: 112371 - DNA, 3191 bp, Cannabis sativa
aaactattagaggcggattttccgtcgataatactaaagttccgccgggaatactaaatttaaataaaaatttaattaatttttaattattcaaaagtaataccggggaaatgccttttccgccggtaataaccccattaataccagcggtttggctccgccggtattacttccgccggtacatgttgtagtgaaggtattttagaaatgtcgcacacactatacatataaatatcctcacctgtgggtattaaagtaaatttccactaggttttttgtgtcgatcaataattaagcttcctgaattataatcaatgtcatacttgcctccaaattaataaaattctttgatctacttttcaaatacataaacaatttacatattgattccaaaattcaatattttaaataatgatataacatttataaaaatgttgttataaatattttaagagaaacttataaatatcgtaattaatgtatatttaataacaattttattataacattaatataataattatgaatgtcattagttatttttaatgacagttcttagcaacttttcgaaacaaatgtcatcttaactttctaatgacattatataaaaaaaatgttatatatattattttgtcatgaaaaatacatttttcttgtagccattgtatttttctgaatcctgtaatgaaatattttatgatggcttctatatttaaggaatagatattagttgtgatcatttttttcgttgccactttcttctacttttatttgaaccagggtgatccatactctttagtagttaatacaaattttttatcatctaaaggctatctaatgttcgataagtatggatatgctttacaactaatatatctaacaatgcagatagcagcaaacgtaggtacataactgaagagataagcaagattggtaaaggaaatataactgcacagatctttgcctttcgcgagttatgtgttgcaaccaaaaactttcaccctgacaatcttcttggtgaaggcggctttggaagggtctacaaaggaaatattgaaagcaaaaatcaagtaaattctctttggttgttgactctctcttttgttatcttatgtaagttttacttaccgaatcctcttatgtcattctatttctcaggtagttgctgttaagcaacttgacaggaatggattccaaggaaatagggaatttctagtagaggttctaattttaagtcttcttcatcatcctaacctagtaagtttggttggctattgtgcggatggcgatcagagaattttggtttatgaatacatgcctaatggatcgctcgaggatcatcttcttggtatgctaaaaaagcttgtctcattgattccaacaacttatgtttatttctctagtaataaagcatctagtgctatcaatttttctctacatgattcttaaacaggtcgtaaacatcaagttttagcttgaatcaaactcaagttagtttattctataaatacttgtgcccatttagtatttgaattagtcccacatttataatgtgtgaaaataaaataccagttgattttgagatgaaactctatacatcttatcctacacacacccttgttaaaaattaaaaagaaaattcacaaatttcccgtgatacaccttaccatccactcccctttcatatctcaaattctagcatctagtaatattatttttcaagtataaatactatggaaagagtttctaattgtgttcctctacagaactagctccagataccactgctttggattggaatacacgaatgaaaattgcagcaggcgcagcaaaaggacttgaatacttgcatgaacaagccaatccccctgtgatataccgtgattttaaggcatccaacatactattggacaaggagtttaatccaaaactttctgattttggactagcaaagttgggtccaactggagataaatcttatgtatcaacaagggtcatggggacctacggctactgcgcaccagaatatgctttaactggccaattgacaacaaaatctgatgtttatagctttggagtggtattcttggagataatcacaggaagaagagtgatagaccatacaagaccagttgatgagcaaaatctagttgtttgggtatgtttaaaggcctttgtaacatcttatagcagaaccatcttaaagcttgatcaatcttcacaacctattttcgccaaggcactagttgaacaataataagtcttgttaagtttttttttctttttttcttttttaattaacaaaaataaaatttaagactccaaacttgtcgttttctctttttgtaggcacaaccactattcaaagacagaaggaagtttactataatggctgatccattgcttaaagggaactatcctgtgaaggctctataccaagcacttgctgttgcagcaatgtgtctacaagaggaagccgctactcgaccgctcatcagtgatgttgtgacagcccttgaatttttagcaacaagcaaaagtgaggaagaagtagtggaatcaacttctcctaataaagatattgatggagattctgatattgatactgatagatcagaagatagcataagggaaagaaatagtatatgatggaagttttattgcaacttagatgaagttctacccaattgttgttgattcaaagatcgacttgtttaatgtgtggtgagatgagaatcttggtgattgtaattgattggttgtggttgtgttggttaaatttatgaaaaaagaaaccaaaatgagtgtgatgatattgaatgagtttgtgaaattattaatcaagataactaggactatgacatattaagtgtgattgcaattcctaagaagagagttcattgtatgtttgtaactaagtgtgagagagagagagagtacgatacttgttacaataccacattgaaaacactcatgtatgaaaaatcgacctattagaaattggatataaataaaaggcttcttaacctcctcctcatcctattttttttcacaagtttttgtagcttcttgaaataatcctgatttgctatgtgttattccaatttttgcactctgacgtggcatcacatgatggtgacacgtggaatcaactccgggtatctgctcgcaagatatagtctgaacaggat

SEQ ID NO: 112372 - DNA, 2769 bp, Cannabis sativa
aaaaaaaaaaaaaaaaaacccaagtacaagttgtgaggacttttttctcaaactcttgttacccccacagacattacctttttttttttttttgagggaagacattaccagttttgatgttgtggaatgtggaaatttctaatgtttgaatgtgcatactgtcccccctcgaaaaaaaaaaaaaaaaaagaatgtgcatactgtgctaattgttctccacgacccgcatagcttacttgcggaatcgagcatttttcattatagtcgaccttttttgtagcttttaaagtagcagacatttatagcaatcgagtatgatctatctcaaaaaatcaatatttgcttaacaggaggttatgtaatgcctaattttttcatttatttacaattggcaagattctctttgtctgcaaccatccctcgactcaacaccagaccactttctcacccgagacaattaaggagaatcatctacccaaaatcaagttaaccaattcccttcaccaaccatatctaccactcaacttcctacaacttccgttggagttaaccccgctttttctgtcactactgctatatctcctgatcttactttaggaaaaaattatgaccataatgacaatcatgtggcaaacttgtttgatgtttttaccccatatattggcaactttaaatgctctcagactttcgccacttatcctctatgtcctgccctctccaagcattcactttgccaatcaattaacatggatttgtctcctaagtatgttgaaaattctgctgcagcaaccatatactcatccagctgatatgctattgaagaccaagaaaattgtcatcccaatcgtacattcaaacgacaatttgataacctctctttaaggaaaactctcaagagatgtcgtggctcaagtgttcatagtccttctccttcctcggttgaagtgactacaaacctgcaagtttcagatgtcaacaatgattcttctggttctgaggatgcttcagcggtgattgctcagcaatcctgctcttcatcatgaaaattgttagttggaatgcacggggcttggggagtctgagtgcattctgtcgcctgtgtttgcttatttgtgagcaaactccccaacttttgtttcttatggaaacaaaattaatttatagttgtattactcgttttaagcaatgtttaaagtttagtaatggtcttgaagtacctcgttcgggcctaaagggtggattaatgttattgtggcatgatgatgtaaatgtaacccttttatcaatgaattccaattactttgactgctacatttcttttgatggtggactccgatgacatttttctactgtatatggttttgctgaagctaaaattaaaaaacatatttggacgcttttggaaagactagttgatgtatcacctttgggtccatggttgctcgtggatgatttaaatgagatattctctcattctcataaaaactcaggccctctaaggtcagacaatcaaatgatggcatttagaacaacaattgatctatgctctttacttgaacttccatacacgggttcggattacacttgggcaaaaaataagagaaatcctcatgctttacaagaacgtttagattggtgcttcatcaataaagtatggaatgacaggttgaatttgcctcaagtctctcacttggattactatggatcgtaccacagagcaattcttattgtgattaattttcaagaaatcaacaatgaagtaaggtatcgctctcgtttcatatttgcgaaaatgtggcttaaagagaatgaatgttcgaacatcatcattgcttgctggcaacattcccatggaaatcctattgatgttttaactcagaatctctctgcgtgtgcggctggtttacagtcttggcaccatgccgaatttggttagctcaagaaaaaaatatccactgctcaagctaatgttactgctctcatgaacacctctaatcctgcgaaacttcatgcacaacaagttcaaaaggttgaatcaattttagatgaacttcttgctaatgaagagcaatattggtagcaacgttcgcgtatcgactggctacaatctggtgatagaaatacccaattttttcatgcaaaagcttcagcacgacattccaacaataagattcgatccttagctgatgaaaatgggaatgtgctcacttcaaatgatgatattgctacacaggtttcctcctactttgaacatctttttcaagctgaagaggaagactattgggccctgcaacatgttctgcaagtaattcttacaactgttactgatgtgcataataatttcctactgcaagaatttactatagatgatgtttttgaagcttgaaaacaatgtggaaatggtagtcctggtattgatgggatttcagctttgttctaccaacacaattgggatattgttggtagtttggttacaaaggcagtactgcatattctgaatgagggggggcagtttagaagcttttaacaaaactctaatccccaagatcaaaaaacaaaagactatgaaagacttctgtcctattagtttgtgtaatgtgatttacaaactaatttctaagtcattggtgattcgtctaaagtcaattcttcctcatgttatatcggacacacaaagtgcatttgtaatatctcaataagcctaatggtaaataattagggtttatatttatattatgggttaatcaagtaataagtgggattatgatc

SEQ ID NO: 112373 - DNA, 9477 bp, Cannabis sativa
tcaaatgcatataaatatatatttgaaaaaaaatcaaaatatataaaaaataaaatattatataaaataagtttttacatgattataataaactagattataatattatcactatcattataatagattttgacaacttacagtactttaaaatttataatttaccaaacacccaactcagtttttttctgcatacagctacaactactttttcccacagcatagctgtgccaaactggcccctaatcagttagctcattctacaataaatctttttaaaccatcatcgtgattaattaaataccaaaattttcatttaagagtaaataaataataaatagaaatttcaccccgtcctattaccaatattgtattatgccttctaaactatttttgttactcagttttgatccttttgttatttcttcgcctatgtggcgaacaaaaagttaatctcacactttaagtactgacatgtcattgccacgtgtcatgttaatgccacgtgtacaattcaattttaaataagagaagataatggtatgtgaagaaatttagataagaaagagaagtataattacaacatttttgagttgcaaatagcaacaagtgttgttattaatagcagcacagcttataaatgttatgatatctcatgaaaatgttatgcttggtgctgcttttgaaggagaatgaagaagttatattacaatgactagagtagaggagaggagagtggagaggaattgagacgatgaaaatgaagattaagcagtggcggccgcctgttcttcgtattgtgaaactgggagcagggtgcaggtgaggttgcggtccccatacacattgtcaacgcgtcctgaaatgacaataaaaactttattattaacaatttaagttatgagaattgagaagactttacgcataagaatgagtggtcacccttcattgccaattcaatgtgtgtttaatattaataaatgatataagaccaagtttcattgatcattcttctttgagcatatgacatggtagacagtgtttagcaccactggtgttttttagcattaattctcttatctagatgggaagacattacctgtggtaggccagaacttggaggatcggagccatggagcggggaaagctgcgtattctcgggtgtatggttttgtccaagtgtctcccatgagcaatgatggtggatgaggagctccctgcaaatttacaaccttttatatattgcaaagcaagtgaaagagagcaataaaccatagttttcaacgccagctagacctacaacattaggggacctggaaactatagcaattgctatgtaagtacccaagaggggcttgaatctcggatcttgtgggagcaaaatcacatgcctgactatttgagcgacccatgttgggtagtttttttttaattattatttcgtaattaggctcgatcagaaaactataacaattgttatgtaggtatccaaaatggactcgataaaccatacaatattaggagacttggaaactatagcaattgttatgtaagtaccgaagagggactcaaacctcggaccttgtgggagcaaaaccaaaccacacgcctgaccatttgagataccctttttgggtagtttttttattttgaaactaggcttgaccagaaaactataacaattattatgtaggtacttagaaaagactcaaacctaatcatagtttgttagttataatgttgagtgacaaactattaaaaaaaaagattaccttgagcacattgttgtgaaggtcagcttttccattctcaatctgagcaatttcttctcggattgaaataagagtgtcgcaaaacctgtctaactcagcctgcaacagcagaaatttcacttgatgaggataaaataaaatgatagggaaaaaacaagtgttttttagctttatgatggagcgtactttgctttcactttcggtaggttcaatcatgagtgttccgggaacaggccacgacatagttggtgcgtggaatccgtagtccattagacgcttggcaacatcttcaggctcgattccagcagtgttctgaattttcagaatgaacaagaagagtacaaacatagatgagttctaaagctgaaacaaaataagtaaataagaagaaaaaaggaaggaagaactaccttgaagcctctcaagtcaataatgaattcgtgagcacatgttccattgacaccgcggaaaaggacagggtaatagttctgtaagaaataaacataagcgaaaataagaaaatcgcaaggccaagaagtttacaaagctccccaatataataattaagaaccgaaaaaactaaagcaattattatgtaggtactcagaagaaactcgaatctcacaccttttatgtaagtgttaatttatgaagttgaataatgaaatgacattacctccaagcgttttgccatgtagtttgcattgagaattgctatctttgatgcatcagtgagtcccttagatcccatcattgcaatgtaggtgtaagaaatcggcaaaataagtgcagaaccccaaggtgcagcagaaatggttccaagaggcttagactcatcgggggcaggaatgccaccggtaggtatcttcattataaaaaaccgagtttgttgaaaatgtgataaggagaaaacacaaaatattctcaattaaaaagcagtgtatttagtatttaccactggatgtgaaggcaaatatggtgccaagtgtttcttcacaccaataggacccataccaggaccacctcctccatgtggaatgcaaaatgttttgtgaagattgagatggcaaacatcagctccaatccaacctgggctggtcagaccaacctgagaaaaccaacttacttcagaatttcatttgaaatttactttcacatctaacttcagtagtagttgaagaaaatagctacaaagtttgaaacacaactacaaagatgagctatgcaaatggtaaatgaactaaaaaccgaattcttcgtgtaaatatagcaaccgtttctcatgatgattcttttcggtatgtacattttccaagcatactttgaatctgacatgtctaacatcctaccgctatcacaagtcctcttcacccgaacataaaggacaaaggaaggaagagaagtgaatcaaacctgtgcattcatgttagctccatccatgtaaacttgtcctccattgtcatgaattatcttacatatctcatcgataccttcttcgtacacaccatgagtcgaagggtatgtcacctacaatttttacatcccatcagcatgattcaacttttaaatcaatttgcaagtcagttaaaccttaacataaagaatcgagctttaccatgagagccgataggtgttctttgttcgattcagctgccttctttaactcttcgatgttgatgtttcccttggcatcagttccaacaggcacaattttcattccacacattgcagcactagcaggatttgttccatgtgctgagacgggaataatgcacacatttcggtgatgatcccctcttgcctgcaattttcattcagtgcacattcaaaatggtcagccaactttaattatagaataagagttttctcttcggtatcaaattcaaacatgacaaagaagaagctattttgacaaatatattgttaattcgaacgatcaaaatcaaatcatttgattaaagccttggatgccttgtcatgtttgtaaatattcctaaatgttcattaacatgaaatgaagtgctatgtcaattcctaatttattctttttccgaaattgagattgctacggaacttgaagaaagtaagtgaaaatcaagtgagtagcggtaccatatgataagcacggataaccattagcccggcatactctccagcagctccagcattgggttgcaaggagaaagaatcaaacccggtaatagtgcacaacaaatcacccaaatttgtgaacatttcctgaagatggcatatttaaacaaaaaacaaggtcaattcgattgttctgatgttaaaaagagagaaaatatagacaaaaaaaccagcatttggattacctgatatccttgggcttgttcagtaggcgcaaaagggtggatatcggtgaaaccaggccatgtgactggcatcatttcagttgttgcgttcaatttcattgtacaagaaccgagaggaatcatgctgtggcataacgaaaggtcctttgcttgtagcttgtacagatacctaagcaactcgtgctcggtatggtacctaacaagaaagagaagtttaaaagattagaagattttcccaccaaaaagatgtaaactttaagagtttagaccgagcaaaaatgccatacgagttaaagatttgatgggtgagatacgcgctctcccttttcaagccatcagggacaactgtcttaacttctggtgcaagtgatgcagcagtgaatggaacctaatatgattaaacaaatttctcattaagattctgattagttaaatccaaatgttataacttctacaaaacttgttataacactcacagatttgccagatgcgaaaactttgaaaagcttatcaacatcctccaaggtagttgtttcatcaaaggcaacagtgatctgaaagacaatcaaaactgatatgagtcaaaaaggactttaaggaactaattgattgaagaacatgagagcaaacttacagtgttcgagtccacaactcgcaaattcatctcacttttgtaggcagcatcagcaatcgcatgagcatcagcagtcttaatcttcactgtatcaaagaaaggcaggtcctgaacttcaacagtcccgagtttcttcaatccaagtgctaaaactccagcgagaccatgaactcgttcagcaatagttttaaggccttcaggtccatgataaacagcatacatagcagccatgttggcaagcaaggcctgccaataaaaacataataacaataagagaaaaatcaatcgataaagcacatagcattgcagacacactcaaatcctgtcaaaaatactcgacgccctattttgaatactattttgcaaagaattatcaatataatgacaaaatatatctattttcaccaattcctcaaattttttattaaataaaaaaggcaaaaacactatctaatcctcaaacaagatgaagttcttgtcctaaacctgaaaaaaaaaaaaaaaccgataaagcacttcatcttattagttcaaacacactcatgccttatcaaaaacactcaacaccctgttttgaatactatgttgcaacgaattatcaaatataatgtcatttagcaaggtgaaataatcaaaatatatctattttcaccaattcctctaaaatttgcataagataaaaaggcaaaaatactatcttatccatgaaaaaacataccaaagatgaagttgtagtcctatacctgagcagtgcagatgttgctagtagccttgtccctcctgatatgctgctcccgagtctgcatagccatacgaagagcaggcttacccgaagaatcaacactaacaccaataattcttccgggcatcatcctcttgtactcttgagaagtagccaaaaaagcagcatgaggacctccataacccataggaacaccgaatcgttgagcagaaccaacaacaatatcggcccccaattcaccaggcggtttcaacacagtcaatgccaacaaatcagttgccatcacaaccttaaccccattagcatgagcattcttaataaactccccataatccaaaacctcaccctcagtacccggatactgaacaagaacaccacaaacatcccccgatttgtaatcaatatccttaagatcagcactaacaactttaagatcaaaaccatcagctctagtcttacaaatatcaaaagtctgaggatgacaattactagcaatgacaaaagtcttcttctttcctttaaaaatgttattacacatagccattgcctcagcagccgctgtaccttcatcgagcaatgaagcattcgacataggcaaaccggtaagatctgttataacggtttgaaaattaagcaaagactcaagacgaccttgggaaatctcagcttgataaggtgtgtattgagtataccaagctggattttccattatattcctcaaaataacaggaggaacataagtgttataataacccatcccaataaaagacttaaagatcttatttttagaagctaaactctgcatatgctcaagcatttgactctcagttaacccatcatcaaatttcgaaaatttcattgaatcaagtctaattgatttaggcacagtagcatcaatgagagattcaatgctatcaaacccacataactcagccattttagtttgttcatctggtgttgccgagttatgtcggcgagcaaaagtgtcactgggtttcaatgcttcaacagaaaccgatcgagtctgctgagtttgataagacccaaaagaggaatctgatctaaacccacttcgaacacgagatgaggaacaaggggacaacgatgaaacgtacctcgaaggtgtgtaggagataggagatggagcttcattttgacggtactttttggcctctgaaactaatcgtttcagcatagccctgttagccaatcgccgagctcgctccattgttgtgagcttcaacaaacaacaaagggcaaagcttttgattgaagaagaagaagaagaaggaggaggaggaaattgagagatgggttttggttggttttggaaaaagattgaatctttattatggttattccattggagtgagtgtagccactagccaatggaggttggtttggtaatacacttacccatatggctttttattctaaatatttataattaattaataaacaaattatagtgtttttttggtgcaccaatatatttttatttttaattacattttaatttttttaagactaattaagatttttatatgaactcttctaacagttaaattttttcttaaactattaaaattgtcggatttaaatatttttgtctaatttcatttaattttattaatttggtgattatctaaatactaaatcatgttccccacactttgatatctaagaactgatatgtctcgatctttgacatatgacaattaaattttcatttacgttagacatttttcattaaaattagacaaagttcttaaatttaataatctcaatagttcagagataattttttacggcttttaaagttcttgagcatgatttagtacatatcaaagtttagggagcaagaatcctaattaatttttttaaaattcaaaattaatatgacaatgtataacgtaattattttcagcaatggagatgaacacagataaattttaatttttacatcataaaattatgtgtgattatatttattaaaatttgctggttaaatatttgatagtaatcttttttttttctttaatttgtaggtattttattagtagaatggaaaggaaagtcacaagttaaaagttttttttttatattaaaaatttttgtctagtttttctgagtatttttacatgtccgtaagataaataatgaataaaactctcaattttttgcatgtccttaagatattaaaattttattgtttaattttattgttatttcaacctttattgatttagggtgttgtaacagtacaacaatttatttcttttgtgtcttcgatatttaaatagttttaattttaattttttttatatgacagtgtattataatgtgattatttaagatatcatgaaaaattttgataaatttaaaatatttaacaatatagaagctagaaagtagagttcaaatataaaagttttctgtggatcaatatttttttttattaatttcttaaaaatttataagatattttaataagtacgttgtaaattgtcatataaaacaattaaattaaaataatcaaaaatactaaatagaactatatcaacacatccctttaaaggatccaccataaaattttctaataaaataaataaataaataaaaatgtggtagagttagatttgagtctcaaatccaattttttgtggtgggtggtgtatagacttagcacctattaagaaaaagacaccttttgttcaaatttttcttaaaagattttatcttttacattacaaaactaagtccaaaaaaagaattgtatggaagaaattgaagcaaaagaagattgagtttgaatggatctaattcattttcaattcaatctaaaaaaaacacatgaataaataaaaatgggttctttgttggccaattttctttcacaataggcttatctatccatgtttgtcccaatgaagatgaacacaatttttattaattttttttttttaatttgagaaaattggtaattggacaaccttttcagatctaatcttaaatctaaaatacaattttgtgccacgtaataacattacatgtgttcttggaacaatcaatgtcagatttttcataaaaattacatttttaattgttttttggggtgtatctggtgaagggtatttttggaaattcagaggttggtaagtatagtcatatacgaatctttttagtttctatttaatgtagggacaaccgttagattcgaaaactttactgcgcaatcaacggttcttgatttgactgtctttttctttttttggtaaaattggaaaagcactatgtaggtattagtttgtgtatgaactcattttagacaggtaaattagtaataatttcacttttttttttaacatcataattattgtagttataataaaatagtcttttcatttttacacttcaaaatattttcttttttatttttacgaaattctacataaaaaattttattgcaactagcactgcaacataaatcgcaacaaaaaaaccgtataacaacccacatagaaataaaccactttagaaactcaaatcgtaaatttaaaaaaaaaaataaaaaacagtatatgagataattcccttataataaacgtcttacaatatttttttaaagtttttaaaaataaaaaattgagatgatttatggtactaaatcagtaacagactgcttaatattactcgtaaaacaagaattacattaaaaaaaaattaagatttttcttttaattagataattatgctaaaaagaaagccctaaaaattaaataaattattaaaaatgattatcatttttatttaatgtagatataaatatttttttataccaattaatcctctacaaaataaaaattttgggtcgctaatttaaattacaatttagaaaaaagaggaaattacactctataccatttttatattcctcttttatttttaccttcttttttaaaatctatcgtttttacctctttttttaaatat

SEQ ID NO: 112374 - DNA, 5690 bp, Cannabis sativa
  modified_base (5374)..(5379): a, c, t, g, unknown or other
gaaaataaccattattgttgctgttcaaaaatccttgggccttatttatatctccaaatattagctttcaagtattttggcataaacacgtcataatatagctaatgtgaatgtttttgtttgcttagttttgatgttgggtttattaaagatattgcatactatgtttattgaaatttgaatgtatcatgtaggctctggttctgcaccttcgctttgtgaactgctgttgaatagatttggggactgggatgcaaatagggtggtgtgggatatgttggcattttcatattcaagatgtgagatggttcatgatgctctctttgttcttgctaagatgaaagatttaaatttgcatgtttcattggcaacatataactgtctgttgtataacttgagggagacagacatcatatgggatgtatttgatgaaattaaatcccgtggtgttcctcaaaatgagtacactgattccatacttatagatggtctatgtaagcaatcgaagatgcaagaagcgattttgttcctgaggagcagtaaagaggagcctgggccttcttctgtttcattcaatactatcatgtcaagattttgtaagttgggtctggtggatgttgcaaagtcattgttttgtatgatgttgaagtatggactacttcctgattcatacagttacaatattattattcatgggctatgtgtagcagggtcaatggaggaagctttagagttcacaaatgacatggagaagcatggattagaacctaacatagtaacatataacattcttgctaaagggtttcacttacttggtctaatgaatggagttcggaaggttattcaaaacatgttgcataaagggttgaatccagatcatgttacatttacaatcctgatatgtgggtattgttatgcaggagatattgaggaagcccttaagctacgggaagagatgctatcacgtggttttcagttgtctgtcatgttgtatggtgtacttcttagctgcttgtgtaaaagtggacaggttgaagaagctttgagattgcttgatgaaatggagtccttggggttggaaccggatctaataacctattctatagtaatccatggcctctgcaaacaaggaaaggttcaaagggctagtcaattatacaaggaaatgtgcttgaaaggaattttacccaataattttgctgcccggtctattctgttgggtcttcgggagaagggaaatatatctgaagccaggaaatattttaacactttgataagaatggggttgatgtacgatatcatcatctataatattatgattgatgggtatgtaaaaacaggtaatatttttgaagctgtacagttgtataaaaaaataatagaaaaggggatcactcctagtgttgtaactttcaatactctcatttacggtttgtgtaaaactggaaaacttgctgaggctttcaactttttgaatattatcaagctgcatgggttggtaccaaatgcggttacttatactactctcatgaatgcttactgtgaagaaggaaacatcaatgacatgcttaaattactacaggagatggaagtcataggtgtgaggccaactcatgtaacctacactgtggttatcaaaggactctgcaaacagtggaagcttcaagagactttccagtgggttaataatatgtatattaagggtttagtgccagatcaaatcacatacaacaccatcatcaagtatttttgcaaggctcgggactttacaaaagcttttcagttactcaacgacatgttattgcataatctcaagccaactcctgctacatacaatgttcttttgaatggtctttgtgtacatggcgacctcaaggatgctgactgtctacttgtttctcttgaggaacgcaatgtttgtctgacaaaagttgcttataccacaataattaaagctcattgtgcaaagggtgaggcatgtcaagcaatgagagtcttccatcagatggcaaagaaaggatttgaaatatctgtcagagattatagtgccgtcataaatagattgtgcaaaagaagtctaattactgaagcaaaatattttttcaacatgatgttatttgatggcattgctcctgatcgagagctttgtggggtgatgcttaaggcttttcatgaagtcggtgataccaattcggaatcagagattatcgctgggatgataaaatctggcttggttcctggtaaaactgaataatgataataaaagaaaagaagattctttatcaccttatcattggagaagacctacagcttcactgatacagaacttttagtgagcaaagtaacagtaccttttggagaacaagtaccaagcttttaatatactttaactccacatcaagctggaccattaaaacagtgaatattggagggttaggttgtgtacaaactcgagaaccatttcttcagttcaccacccctgcaggagtaaagaaattatacgtgtatatattttacaaaaatgtgtgatcaaagttcgctgtaccaccacattgaattggttgcgaggtgacgcaacgaacaaggtattcacttaaaagtttcttttttttgtgtgtgtgagtgtgcatgtgcgtgttcataccagaactaaaataaaaggagaaacgaaacaaagtaatgtaagttgacagggagaacgtggaaaataaaggtaaataatgatttcccctcaaaagttgaaagaaactgaacatcagagctaaaatttatccaatagttttgttatgtagattgcaaaggtattagagaaaccctgaaatatttggattttcatcaatgctataaatgattgactattgacagctaacttctgttttttatttttttcagtattacccttctttcaacttttgctataccattcaaaaaaaaaaaatttgctatatcaattgccactataagaagtggtttatccaattttacatatgttttgagatctaatatttactaaatcttgccatttattgtgatatatcattctgcattatggtgaagatattaacttaattagattaatagtcttggcacatctgtgcggattttattgatgagactcagggcacaaattataattattctttacgcagctctagttcaattggccatacaatcttagattcacaaacattttagtacaagttaatatcataatagatttaaacataattttgatattcgcactatcttattcttgtattcacctcctcgtctttcactctctcaagttcattgcttcaccatctcatttgcaacaggcttatggagctgacgcaactctctcacaagctcatccaaatcgttcaaagagctcccactgtcgctcactgctgcaagagccttctctctgaactctttggctttcattttctcaggtgcattctcactcatggatttggctatcgcctttcccagctcagcaggttcaggcactgcatctgctccctcgcacaccctggtagctatacccatgcactccaccagcagcctagcatttacatgctggtcggcctccatgggccatcccaatatcctcaccccagcttctatgccttccagtgtcgagttccatccacagtgacttagaaatcctcccacagctcggtggcccagtatcatcacctgtggcgcccaactctttacaaccaatcccttcttacctattctctcctcgaatccatctggaacaacaccaatccctgctgtaacctgctcggcggtgccagttttcacgacccatatgaactggatcccgctctgttcaagcgcagaagccaaggcctccatttgctgcctctttagcagcttctgactcccaaaacaaacatagagtacggagtcatctggacactcatcaagccaagccagaacgcttgcacaatctagattgttctcaggatcaggtctttccctaatgccaagtgaacttaatgggccaaccccgtagattctccggtgacccaatttcttctttaagtatcttaaatactctccttctaaatcttcgaaggtattaaaaacacaaccccagctggaatagtttgccatgaggccatctctgacgaaatcagtgtctggttttgattccctgcagagccgcactatggaaggcaaatgttcctctttgaaggacggggatccagggaaatcagggaattccacgaccgagcaagaactcttttccaaggcactcaaaacactacaacactgatcaagaacaaagcttaatagaacctgagatgagaagaaggctaccctgggaatattaatctgctgggcaaggtgcagagtccacccaaggaaaaagtcagagataagggcaacagggggattgtgatgggattcataccagtggataatgggctccctgagttttccgagggcgttagatatgggaaagtttccggcattgccgatgtccctgacgttctccacgccggagggtaagttggggtaggctggaaaggggaggaccaaggtgtgaatagtgatggggtgagcagagatgagtgggcgtagagttgggaggttcttgggggtgattataatggtgatgataaagtcttggagggccaaatggtgggtgagatcaaggagtgggagcatgtggccttgtgctgggtatggaaacaccagaatatggggctggtttgagccaccagtcgccatagttttttcgtgccacgaatttagtgtgtgagagagtgagagaaagagagagaagcaaaggagttatattcgatgacgatgactaaagtagatgctgtgatgatttactctttggacgttgactcaaggtggtttaccgttaatatcacgctgaaggagtaagggctttggaataagttttttaattttattattttctttctttctttatacagtatgtgaataacattttacgtcctcattttaattactactaagtattaaaaagtatctgtttaatttttgtcagaattatatagaataataataattagttattggaagtgattgttaaattatataaaagttatggattgatgtaaattatctagaataaatagggtattttacccattgaattttgatagaaaaaaatcatgctctttgatcaaatattctccatctcaacttgggacttcgattatataatttacaattttacctcttgaagtatgtattatcaattttttttagagatgtattatcaaattttgttcatttgtgggtgtacacatcgaaaattcgtggattctgaaacaggtcaaagacgctaatactgaaaattgataatagaaggagtagcacattcatcttatatatcacaatnnnnnnccacacattagcaatgtgggacaaactctaatatctagtaaaagttatacgcgctacgcacgtgaagcaaaatattcatgactataaatattgaaaaaaatactacttacactcaatattactatttactactagatattatatcactattattataattaatcaaatattaattctcacggttaactatttgtaaggtgaaaactattcccactcaaaaatatatataaatatagaaaaattaaaaatacactccaacaaataattgtacaatatatatctatatggtgttttcaacacataaatagtta

SEQ ID NO: 112375 - DNA, 13509 bp, Cannabis sativa
aatgatctgcttttagtttgctcattcctgttcttctcatctttggttttacttgttttggtagtgctttaaaggatgggtttgagcttccatctcgccttggagtggctgctgctgattgtcttctagttctaactgaatatatgacaaaagttgtcacggttccaagcaacaggcagaaatcttctgatacaagtgcaccaagtcaaagggttgagctactagctaccggtggcgataagaaagcaatccattctcgtaaatcattagaaacatcgaacaaagaagtggaacatttactttgggatcatttggaggaagttcttcatctggtgcagaaactacttgctgtaagtttcagtattttttagacttgacaattaaaaatgtagacaagtttataatctgaatgttctaaatcaataattatggtgtttttcatgaaacataatgattatagaaactacatttttccttaatattttggtataaggttcatttcactacaaactgcagtggagccgaaaaagtagacccttacatgcgaaaggattggaacaagtgcttaagtggctgcaagacataaaagatcgctctgatcatcttcaggttgatgcaagttctctaaacaagatatcctcttactctattatatcttatgttgtctaattgtcaatgcattgtgattttcttgtttgcaacatcaaagtcaggattcatgaagacgggtatattgttgctatcttcctgctggaagcattacagcaaactacttcgcttggaagatcgcaaaatgtcccaccaatacaaggagttattggaacagtacttatcgggcctccaggttagataaagctattgctgatgtttattattgctcagtagttgagtttattcaaacgccaaattctggctttctaatccttcccttctcatatggtgtctttagagaacagagtttttttttaaggtattaacaatatttttcacacacaaaaactcatattattcttgtgcacatatatatgtgcgtgcagttttatacaaagaatcaagcgggtggtcaatctgagatcaaggacggctctactgagaccagaaaattctttttgagttgtctatgccttttgctggggcgatttgacaggaaaaaattggaaatcatggttgcggaaaatggaatgcgtataacacatgttattttaccgcaggtagttgaggttttgattgttatttcatctattcaaattattttctagaaaagaaaggtacatatgctgttgtattgttgtaacttttgctggtgcagtgatagagccgattagttctattgagattttagccatttgtatttggctttattaagcttgtttgatgtgtttagacaaacccttcatacttgcgtgtcagttgtgggttgtttgataagataagttagtttgtttctcgcataattccaaacgataacagaagtcaataataacaggtggcctattatcttgcctaccgattctccatagaatattgcttttatcttgtggctacctgaaagtgatgttaagaaaatttccatgttcttttagacaactgagatagtttgattgagtatattttatattcataccttgaaaggaccaggaaataaattattgcaactaaattctactattctagtaatttttttgtagctaaataggataatatgttattggatagaaccttttctgagtagtgctcacatcactttttcccatttcaaagctccattgtgctgatcaagatgtgatagagggtgttgtctgcatactgaaggcaatcattttcaagccacattcttcgccagggaatagtcatactgataacagggagactgatgtggtgcttccgctgctaattaaccttctagacgagcaagatggcacagctagggctgtggttatgctcatggcagaatactgcttgatgtaatcttttgtgttttgttttcattcccgcttcttgaacagtatatttagcagtctttgtttgttattgaacatattttgtgatttttgaccaggagcaaagacacacagtgccttcaagaagttcttcaacgtgttgcttctgaaattgttgagcagaggaagaatggaattgaggttatatctgaacttattcgcatttcgtcagataaaaacaccgtactctctccgtcatcatggtatgactgtggtctacttgctagttttacactttatgaatatgatactttctggttgttcatgtagatatttaccccccttatgactgttgcaggaaagatatagcagagcacttgcttgagcgcctagaagatgaagaaatttccattcgtgaacaagcatccaatttgcttccaatgattggttagttttacagttttatctaagtagaccactagttgaaacaattgatccaatattcatacaatggaggaagagaacaaataaaagtttcaatcaatctccttctatgttatttggatctattttcaatttcattagctaatgtttcctgttgcaatgcatctcatttttttctttcagatccttccatgattttgccttcgttagttcgtcttgtttattcatcggatgaaagagtgcaatcgtgtgcatctgatgcccttctacggttgctcaaatatcacaataagtctgccgaagttatatgcatgctgcttgactgtctagggtattttttaatttcttcttcaaattgccaagttcaatttctaaagtcgtttttatggatctatcatatgataccaagatgctgaatttaaatccaaaattccttactgtctcatcacctcatgcagaaatattagtcaaggtcctaattttcagagaagtgaaggaaatggggaaggtagatagttactatttcggtgttttgaattactagatcctgctattatcccttgtctgtttgcgtacgcatcgattcaattcatcagctctaatttaatatagaagttttagagaatgaaaagctttcttattaaatattactcttcaaatgttagatggtgtgttttcatactttgtaattgctaggtttgattatttttttacaaccattgtaaaccttgagatggactagaaagttagtgaactgtcaactgcatcctttttgtaaatttgttctctctccattttggttcctatttagagcattaagaagtgattctcaactattcttattgttattgttcccataataaatatagttttaagctcttctcctttgtactctttacaggatcaaaatccgagactgatcaagtgttcaagttgatcccagaatggtcaaggagtgtaagactactttttgtaatactttccgtaattttattttgtgtgtatgattggggcagggagcattagttgctgcggtttagatatcatgctcatgaattgatgatcttgtgaagtttcgggagcagttttagggacccagtctcctatatttcaaagcttttttaggttcaaagggatgacatacttgagtttgcaaagccagattataataattttatgatttcatttttatgtgatcaaaatagacaacctcaatctcttgaacactttgtggttgaggtttaagattttgatggttcaatatcgctttgagagtcttttgttaattcataaagcacttgttgatgttatctaaacattgtaggttgaaaactggaacatcttgattggaccattgattgacaagatgtttgcacagccttcaaatgcaactattgttaggtttttgagttatataagtggacacctggtggaagttgctgatataattctcgatcaccttttgttgcttacaaaaggacagaaggagtaagtgttttacacaccaatatatctataatcataatatatgttattatgctttactacaattgcagcccaggttgcataatcatgaccatgaatcatgatattttgttcctaattttgataaacttggtcccttgaggacattctgcaaacccatttctagaaactagaatttacgcatttctttttgttcatgacaaacatattggcttttaacataaagcatgtggccatgaaaaatctctcctttatatatgtataaaaatgtaagatctttaacatgaggttatttctttaagatatcatcatttgaatatgtgctgcatttttgtcaaaatattttgagcttgagatattcttaataatatcgaacttttatagttgtgttttgttgttactcatcgacacttcttttttcagtatggatgagagcagcttctccagatgggagaatagaaaccttgcaagtgatgactctgaaaatgtggagaagttgcttttcgagcacctttgcccattacttattatcagaatgcttccattaagtgtctttaatgacctaaagtcatcaatcatgtatggcaaatttatcaatcaaggttattcatcaaactactattattttgtgatatctcttctatgcatacatactataaatgccactatcatttgtccatgcttttggagtattttacttttctatatgatatgactgctgcattcgtgatgttctttgactgacgctctttctgtgtctgagatgactggttttctcatatatttttaatttttttaagtttagatgacacagactacaagatcttcagtgatgagtgtgttgctagcctccttttcaaaaggttggtttttgcagaaacattactagacttcaaagctgaaatgggcattatgataatgttaatttatgataaatttcagggcattttacaagtttgaatttgaagatgtgcggaaactggccgctgagctctgtgggagaattcatcctcaagtatataattttattttctacttgttattccaggcagtttcaggcagaatagtgtcattcttgagaacatttattatcttgaatttgctgttcttttttccccagtagcccattcagtcctctcctaagtcctcgaatcatccttagtttttatatattatatatatttttaaaatgttgcatatggatttcaccttttagaggcttaatttggaggttttattctttagaacgagactcaagttacagtaatgtatgtgtttggcaggaagcttaactaatgctttaagaagatcttttaaatttccatcttgaatttgtttttttcaagatctttatgtgtacatgattatcattgctttatcataaatcgaccagttaaccttacatgccatttcattttctaggtgcttataccgatcatttcttcccagctagaacatgctgcaagttctcgagatttactaaagataaaagcttgtttgttttcactctgcacatcccttgtggtgattacctcttcttctattagtcatttgtagactgacatgaactctcgtctatgtactttttctttccctaactgctctaaaccataacttctcactttacattttgctgcactctttatgattccaaggtcagaggcaaagattcactttctcagcctgccatgtttgacgtcaggaaatcgctggagagggtgttattatggtcttctctagacggggatgaaggtatgtgaatatgtggaacttactagctaacatcttattattaatgtcttaagttctacggattgttttctcctcagtttccaaagctcaacatgggtgcatcgattgtcttgcgctgatgatatgtgctgacctacaagcttcggaatcattacttaaggactttaacaaaggaaaaattcttattggtgagaggaaaactgattctggttaataactaattcgcagggcatgtttaagtaacatatcaaggactgacctttataaaccaaaatttcaggtgaagctgcatccagaaactctgtcctcgcttatgtgatcaatcaacttacatcttttaagaatgaacctgtttcaaacccccagttgggcggggagataagcacatttggggcgccagttcctcttccatttcgtttgtgcatggccaatgctctcatcagtgcttgtcaaaaaatttcagactctggcaagaagccatttgctaaacaaactcttcctcttctcattcgatctgttgaggtattttgcttgtaccatgttcagaaatagtgcattcttgttgcctcaagttgttaaagtcactttcagtcctttttttttaaatggcttgtgaaatgatacaggcaataacagagtcagatatcagagcggcgtgcatccaagttctcttttcagccgtgtatcatttgaagtctgttgtcggtccttacgcatgtgatcttctaaaactgtctgtcaaagctcttaaaaagggttcggagaaggtactgaagcttagctaacacccgaacttcttatatatgatatataatcaaaaaccttagttctcatctttcatttgacaactgattgcatgagaaagaaactcacataactcctttattctttagattttgtagtgattagtttagctttaaaaatgtcatattttatgaaatcaagtgttgatggattaatatgttgctcatcaggaaaagatggcgggagctaagctaatggcatctcttatgggtagtgatgatgagattttggagagcatatcgggtggactggtagaggcaaggtcagtactgtctagtatatctttgacagatccttcaatggagctaaggcagatctgctcaaaactgctggcttgtatatcatatccttaaattgtttgttgcacagagattatggcagttgcggttagtttctcataattaccccatcttgattatgttaatatgaactcaaacttttttgtatgtacagtctggttttcagaagaaaattttgcctcataaacataatctctctagctatatcttttagcttctaacacttctgcttaggctaacaaccatttactattgtttttcgattaaatgtctcgtaatttctcaaatttaaaactatacatctcttttttctttgttgacaatttagtttctctaagtctccattaacatggttgtctcaaatttgatgcaaaatgaaaagttataaaagattaccatcaatcaagttattatggtttggtcattgttgtcaaaaaatttgaaccaaaatttggaaactatggctatgtgtttttttcttttctttggttaggagagctaaatatatgaacaatcttttcaaaacactaattgataaacaacacaatttacacaaaaatatttcatgttgctatatttgttatgattatcaacaacagctactcgaacgggacacaaatggtgtgaattcgggagtttcaactctgagaggctgccatatggtatgtcctaatttttcttccagtctaccactgccattatccactacttgcccgttccaacaaatatcgtcaccattggagccaccttgttgaactataagaatccaggcactgacggcaatagtcgagcacaccagtgcgtctcctaaaagacctaactctggatagtcgctccattccatcccctccaacatctttgaagatgattgcccatctgatgatcttcttccttttccgactatgatgatgtcatactcttctgccatggttccaatggctttcacaacctcttccacactgttgacaacaacttctccaacattcacaagtggattgtcccttgtcttttggcgaaacccttcaaagtactgatcgtccattgctttctctttctcttccctatcatcaccatcattatcatcatttctattgttgtcaatgtaatcagaagcaatgaagcgcattacagtcaacgcaacagttcgactcctggacatcctctcagcataagccaaggcctcacggtcatctggtccgctaatgaaaagcaccatgaaatgatggccaacttggcagttgccagaaggggaatcggatgctacaggcggtctgtggccacggtccacaagtatagccaccgagcaaggcgatttttccatcactttcttgttaatgcttctaagatgatggttattaattagtccaggattagttcctcctcctgtgcttttcgcattaggctgaaacgtgagaattatgatgttggtgcgattctcctcagcaaggttgcatatgtcctcgtgcatagtgtcgtacgctgatacagtggtgagcggttgaaccgttatgccttctttcttgttcttgaagccatcgaaagctgcagtcgccacatgttgagaagagtccaatagctcgtgatcctttttgtctcctccaacgttaatcctacaagcgtcgtggacaatgagcatagcggctgcacgaccgttgttctcaacgagatggatggcgaaaatgaatatcggagattgttttgtggggttggaggcatcaagaaggttgattatgctgctgacttcatgagaagagtgaaaacatgcaagaactcggagctctgagtctggttgtaagctaatcaaagacctttgtgagcacttttcggagtttctaaagcttctgtgagtgagtgttacaataggaacaacaaccacagtcatcaaccagatcgccaaaatgataatagtaaatgttgtgttgtctaagatctaatatgaaaaagaaaaataaaaaaattccattagaaaaaaaaaaataccacgaaatattaatcaaaacaatattttatagactacttaataatttatcattaatttaactagatacaacaataataagttagaattggattagatatatatttataattttatagcctagtagtgttataattctcctcataaaaagaagtcttcgaattctccttttctaatgtttaagtacataaaatgaaaaaactataaatttcaataaagtttatgatagatacaatttattatttttttaaaattacagaaaattatttttaaataaaacaaattttataataatattaaaaaaaaaattaactaaaaaagctacactaaattaacacaatttcttaggttaatacagtcccaaacttaaaatgagccaagataatttagtttaatcgcaaataattatcttaaacaccaaacatgcctttttttttttctcttataataaatttaacaagtttatttattaaagttataataataagaatgtgtatgtaaaccttttcgtttcgggcagagttgatgacaattaaagctagcaagcctttggtgttcatgagcaatccaagagtcaaaccatcacgaggactcatcttgttgaaaaacacagcagcaacgaaagtacttatgattttaacaacaaaagccaaaacaatgacactaacaattatcactattggaaactgcccattaaatatgtcttgacgattggttcttagcccagtgatcaagaaaaacagaggcaataaaaccccggaaatgaaatcctcaactttctccatcaaaaccctctttagctcccctttcgggatgatcaatcccaacatgaaaccaccgagaatagagtggcaaccacacgcgtcggttatgtacccgcacgccaccacgcccgtcaacacgaaacagatgtgaaaatcttcgtaatggtaattagagatggcgtgttgttcgatgtaccaagtgatggctggccttaaggctagcaagcagaaaatcacgaaagccgaacctaatattactgtgtagacgtgcatgtccttgatggtggccaccaataggacgagcaatacccaagcaatcccgtctgttaccacggttgctgaaagcgcgatacgccctatctccgtgtggaggagcttgaggtcttcgagaatcatggccaattccgagaaattcgtggtgcaaagagcaaggccccagaatatggggccaaacgtggctgcatccgtcctcacccctatgttgtcacctacaaacatacaatgtaaggcgtagccaacagggaaggggaggaggaagcccgccattgaaattgttaaggcctctttggatgtttgggaaattggttttatctcaacctctaatcccaccaagaacatgtagaaaagtaagcctaaattcgcaacagtctctagagtcataatcgttctttggggaaatatgtaatcaaaaccgaacgatgttcgagctatcccgctcgcacctaatagtataccaccctgcattattcacatacaaataattagtagttaatattatgaatgaattgatcatgacaatgatgagttcgtgtgcgcacacacaagaatctcggctgcgattcgcggtagacgaagggtcctaaagaggaagatgatgagatgattgacgaacatgatgaaaaccaattggaagatgaaagccaccaccgataaatggctatcgcttaaaacttgccaaagccctattctttcagaaatagattccctataacacatgacaatattattaaagtctttgctctttaaacaccaatctcttccaggttctagattcgtattattacataacacaattgagtcattcaacgtagccatgttgctggtcccgccttctcggggagtgtgtagtgacctaccacaccaccgaccagactcgaccgactcttttcccagaaagaatatttgggaaaagagaaggttgagaagagttaggagaaggcggtggtacgtaagtacttacgtactttttcatgcaattttagcataataggtgtaaatatatatgttgttaaatataagggagttaaaaataggaagttttggttttaaattagttggttgaaaggtatgtgaatgtaattgaattgaattttgaggttgatcgatcaatttgggtggttatattgagatattgtcactgttaatatattgactcttgttaatattgttgatttatttcttaagttttatcctaattattcttcactattttatttgtacttatcagtttcaaacaatatctagatagatatagtacatctcacgtcagcagtattattttatttgtattattatttttcaattaattataatgttgcatcattttcttagtctaaaaaatctaatttttttagtcattattgtaaaattactaggtggcactctataaaagtgtgtttggttgagagaaataaaaattaataatttttttaattttattttcagcttgtattggaattatttttgaatatggaatagttattttattgaaatagtaaaaaaaaaaaacattctattgaaattgtattctaatattttaaaagtaattaaataaagaaatagaatgaaatttaattattttcattattttcaattaaacgcagtagttactggtttattaaatagttgttcttaaaatctttggggtttgatattattattaaagaaaaaaacaaaagaaagacaataagtgggtcattgtctccctctctatcaaagtcttttgtccttttttgcttatatagatttttaattaaattttgtgtacatgttttcgtattaaattttgcttaatcatttttaaggcccaaaaaaattcaatgttcaaattggattataaattttttgtgggcatgaggccgtgtaattacatatggtgtatggactattttttccattaattccaccgacaatatagtaccatagaaatatgaagcaatttgaaagaatagatatatgcatacataaattcttttaaacacattatctccatttgtggaaactaacatagcagagtcttacattaacaatctgtagaaactaaataacctcataagatatataaactgctcctttcattattaattagttttgagataaaatttcatataccttactagacactcacttaatttaactttctaaaatctaaaccacactttcatattccaacatagtatcagagtcaaactaaatttaaataagtatccgattcaaatcaaaaaatcgattcaagagtcgttgtgagccaaaaaaaaaacatataattttagtagtgtaaagctataataaagactgtataaattgttattttgagagagaaatttcttgagaatttatttgagactagtaaccaagtagtagatttggtatttgtggatctcaattattggtttcttcaagatcaaagtgtatttaacttttctagtcttttcgtatatactatttagtagggccctaaacccacatgggatagtagattaaacatgccatcttgtgatgaaaaccctttggttaacatagagaatgataaaagcttctctctctaagattagggtttgctccattttcttttttccccgttttagggttttttggtgcttgggcgccgctagccgaatctgactggtggcgcctagagtttaggctcctcgctacagcaggtagaaggtagaggttccttcgttggatagctgttgtgagcggaggtgatcaacgtctgccttctttctctctccttaagaccggctctacgatgcccgagttttcaggcaagtagtcgtcgaccatggtgggatggacgtctctgttgaggtatctcaagtctgaggttggtgatcgtggatagctctggtctcatggactggtgggaggcgacgaaggtgggtttctctgggctatctccctttcaattttggggacggcgagttgcggtcgcccttctcaggcaagagcttgggctttagagcgttgttgtcttccttttttctcagatctctatcccttgggttactattcaaacgtcttggctccagtgcacaatagctcgtggttagcttttggagtgttgttgatgtagagggggggactcaggttttacccaaaggaatgtgcttcccttgtcctagcgccctcaccgttcagaacctcattggatggcaaagtgtaggctttttttgtcgaaagatggcattgctcctatgcctttggtctgcttgtcttgggcctttgtatgacctcctatgcacgaggagaaagtcttatgaaactgttttatgttatgtttttatttagtttgtttattttattttgtttagttttgatggtgttgttctttggggtgttggccttagctcttttttggggagtttatctctttagatgctcctgcatgagctatgagcttattgctccttttgttatcggtgtggttggccaacatttgagtcatcttctagtgaaatttgtgtggttcctccatcaaacatgtaaagctttagcctttgcttaaccttaaatgaagattctctttcaaataaaacatgaagaatgattggtattttaacattaatacgtcaataattctcaatttatgtacaatttttaacccaacacaatctatcaggagtgcttaaaaagaataaatatggaacctcatcaactccactatcttagagaaccaccaccaccatagaaaataaatatatgggcattttacaattttgtatacattattttaattaattacaaaatatgtgcaaaaa

SEQ ID NO: 112376 - DNA, 11203 bp, Cannabis sativa
tttttttttttttgagaaaaacctatatccattagataacaccaacaagtacaagatacaattacaattgtaaagatgaattcctccataaagcttcctgctctaagcctaaagctgtcctagctaaacaatgggcagcttcatttgcccctcttgagatatagctaagaaaaactttagggaaataagataacaagctcttaatttcagtaacaaaagggttaagatacagattatgagtgtcattattacaaatataattcaccagaaccttgcaatctgaaacaatactatccggataaatggagtgagcgtgacaccatgaaagagcaaaatgaagagcttgtgcttccattaacaaaggtgaagtaataccactccaaggtttaaccaagtttaaaagaacctcccttgtattggaatgaatggtcataccaaaacccattttgagaagctgtgaatcttgggctgcatccacatagagccgctgggtgaaatttgaagcagatggactacttccagtaggcagcattgcatcttcttgaacctgtgttgtggtgagaaccttcttgttgcagcttttttattgatcaatgtagtttataacctcgcatagaacttgttcgggggaagaagatgacccagcatgtagctattcctgcaattccagagcttccacaacagacaaacaaagaagtttaatggaaattaactagttttcatgctttcatcactaaacattcttcattaacttgtatggatttattatatcttgcagccactgagtttgcctctggaaattatcacttctttgtttgtctgttgtggaagctctggaattacaggaatagttggctacatgctgggtagtatatatgatataattttattagttcacatagataataatttttaaaaattaatcaaattaaaataaaaaataaattattttaaaaagaaaataaaattatatactaattattttttcctttttccttttttactaaatcaataagagaataaaaaataaaaaataaaaaataaaccctaattttctttttatttgttgtgccacttccttctttaccacctcaatgaaaccctaataattctcaaagagtggtgccaccctcgaagctgattggctccaactcctctgctgcttttaacgatgggtaggttagtagtagctccgatgccagtgaccctgtaatctctcgaccttctccttcttcattaggtggggtagtgtttgtttccctctctcctgccatttctagtgcttaatgagtacttcattccccccattgaaccttcttcaccttctctctcccgactcctttcttctctacaaacggaaaccaatgacatcaatgacatatgacgatctagagctctgatcaaagaaacagtgtgtgacaatgacaggatgtgattggctatgggaaggacgatttacattcatagtctccaacattgatcgaaccaacaaatttcatcacttcgaaaatctggatttgggtaagaatcttttttatgatgtttgatttttttttttgaataattttgtggttgttgagatattgtcacgatctaaaattaaacttatgattttttgatgcaagtgtttagatagatatttttggatttttggtacttttgatctgacatttggattttggtattttttttctctaaaatattttgttctagatcgtgtgtagactttgttccagattgtgtaaactttgttccagatcttgatgttcatttaatttttcttcttttatgtttttgttcatggtgatgaaacattccaccttgtggtggtggtacagaactagtggtggtgatggtgattgtgggaataggtatttcgaggagagaaaaggagttagcatgagggagagagaagaaaatggaaaaagaaacaaattttaattttttttttaataattatataattttttgaattttaattattttttaaaaattattaattacgtgaactaataagattgcgtcatgtgcatactatgtccatgtgtacaatacattatgtacacatagacagtctaatatggcagttaacaacaaaaaatagatggaaatagtaaacaactaatagatcacgagttttggagttttaccgctaaaaatgggttttgagagttaatttctagcaagatgacccttttagagtgttatctgtgtttttgaacaagagacatgaggcataacaaagagataattgtcatttaaacccgaggctaagcctttccacatgaggaagcctagctcagacctaagatgggcccgagcccatcgaatatccgaaggcttcaccccaaagatattgtccatccatactcggaagccctcctagccttccgggaaatgaaacaaacaaagccctcagggtggacattggggcacatccagaagggaacaccaagggacactcccggatgtcaaccacgggaggactctcagatgcctactgtaggatgactaccgaatgtttaccataaaatgatgtggccacctttttgacacagaatcagatatattcccttgtgtcagtcatggtagtgtgcacaccaccaaaagtatacatcctttttatctaacagcgcctctaacattcttgtctgcaggagtggcctccatgcaacacatgtcttgaatcaaatggtcccttgtccacatggatcattcacccaacaagctgaatacctactagttggcctcaaagtcatgtattatgtgtatttacccatcattactgatccttgttatcccaaattccacatagggtggtgtgatatgtaggatggtgacacgtgaagaacattgaaaagtctgcacaagtaattttctcttaagcagcccaaccagagaactctctacttaaaattgttaaagttacatctttagcagtgatcatctggatagaatctctacgtaattttctgaacaaatcctgattatctaaagatgttgagtcttccgagcagggtagttcagcataagaagatcttcagagatactttccatgaatattccagcattcaggtctcgatcacatccctaattttgtgggattgacttgcaccgacaataaattataggaaactttcttagtttctatttttagttttatttattttgaaaaacctaattattgtattttctcctataaatagttgagccattccattatacagggatttgaaaatcacactttttagaaagctcttatgttgtaaaagaattgtaagctttttcctaagaattcttaaaaaactcacttggtcagctccttgtgatcttattaattcctctaagtaatacaagtaaaaggggagtaggctattactattatcatggggtcggaccactataaatctttatgttcttatttgcttaatcattcattattattagctagtattctcatcgttttaattgactcgatgccgttagctaaaattaaggtcaacattttggtactctcattaagaatagaaaagagcagtgtttatcactttgatcctctccaaagatggttgtaactaccaagaggtctcaaaccaatgaaacaactaatttgacggctacagatcctaatgtgcaaactcatgttaataggagcgatctaatggtggcaaatcttgatccaatcacctgtctgcctccacgagttccaccattagtaggacagggagtgacaactactctggctgggttcactctgaacagaaaggaaactagaaccactagtactcatactagatagactagcctgagtactggaaatccacttgttggagaaccttgggtaatgatcggtgatgatactgagttgtaaaacctgtgagatgccttagggaatatacaagaacataccaacactcttcaccatgaataggaggatacccgagcagctgtgaactggcattcgaacaataaaaatgccaattccaagtggggatgaatcgacaaatagaaatcatgagagaccaacaagcagcaattgataattgctccatgtaggagaccatgctgattcaacgagcttatcagttaatcagacagcaatcaatggaagataccccgctcatacgagatctaaatagagggaaagaatcctatatctctaaaagaccatagtatgcgccagaagaacgttaggcaaactacactcagaagacccaacgtaatggaccgtccaatctgaggccacatggtcaaactatgggccacacgatagacgagcaagttttgttgacctattatcttgggggaatggtcagtataatttctgtcctcaaatagatatactgaaacaatcaactgctggtaacttccgaacaagaaggccactaggtgagtcagtcttcaaaaggttagggcccatacacaatttaagagacactctaaatgtagaagagaacaggatggacacttaatcccccctaatattcaaccaattaatgttgataactatgtacccggtgaagttctaaaagttccatagattacacaagccggtcaacaagcaggtcaagttaatctagcggtgcaagaaaaattagatcaacttaagagcctcgtgcaaagcctgacctaccaaaaactcatcgacctaaagcttgatcggacatgaggttcacaattttcatcacaaatcaatgcccttgatcttccgcacaagttcaaaatgcccaaatagaaaatatatacaagcaaagaagaacctttgtctcacattaagtactttgaaatgcatattgtaatatcccagaaaataatatggtatttaattaggcatattttattaaatatataataatcctaataatgaagtaagattatgatcttacttaggttaattagtgtgaaattaataaataattaaataaagcgtaatttattaattatgttgattttattagattatatgggtatcgtggataccatttttgaaataaaatgttatcgggctcggcgaccgtgggaggttgacaaagtggtcaaaatatcacgataataagatatggatcgatttgagattaggccagattagtttagaagtttaagttgtcagtttggcgaattagttagaattaccaaattacccctaggtgtgctttcggtttatgggttacttaaagggcaaaatggtcatttgtgagattaatatttgatttctttatcttatatggtttagtttagtggctgagtatttagtattattaggttaagtataaaaaaaagaaagaagaaaaaaaattaataaaggaaaattaaaagaaaatcattatcttcatccttcctcttttgctctaccatttgaagccctaggaagcagctgcaaccaggggatttcttttccattttagctggttttaagcaaggtttatcaaggttaagagtgattatactagaagtaagttcttaacactcctttctttggatttcttaagattagattaagttttggttggggttttaggatttagaggttgtgatgttaaactgaaattagataatattttaaagtttgatttagggtttgttagagcttagtttgagcgaattttatggctgtggtgatggaattggaaaattgagtttataactcaatttcttggttctaacatggtgatttggataaattcatgaattttagtgaatttttgatctgaatgtattgtatttatggtattgaactgttttgaaagggtacaataggtttggtggagcttagattgcatgtcagggtgaaaaaccagatttccccatggctgcccagaaaaccaattgaccggttttacaagcaactggcaaacaagtcaaccggtttgctagcaggggtaaatcttgagttttctcccctagtctggttttggttcggggtgttttcggagtttaaatcagggcatttatagtgatatttgtgttagtttgaattagtggaaaatagggtttgtccagttatgggaattagggtttattccctaaaatttgattaaggtatttaccaaattttgttgtcatgacataagatcgagatcgtcaagccttgtttccactcaggtcggcccgcacgactgatttctggactgaggtaagaaaagtgatatgcaccacttacggttaaatgaatagcggttatgcttattatagtttcaattatgattgagatcttgtgtgtgtgtttgttatgcctcgattatgatcgagggttagaaatagtcattaccgttatgagtaattactcttgatactaccgataggtttcttacttatcgctcgctgtatcgggtaacgatagtaacatacgtagctcgtgaataacgagtggtaagggtgctttatgaagcaccgatattgtatgattataatgacgtgaaattttgtaagcatgttagtatgtaatatgttataattgcgtacatttttttttgtgtgatttatttgattttatattgtttatgggattagtcatttttcttgttgagtctctgtgactcacgggtgctaaatagtgtgcgtaaagtgaagagcaagattgagtagccatgagtttgaggtctctgcaacagtgtacctatcagtcgcggtgccacagcccagtgaacatgatatcccacttttaatgtattttggagtataaacttatttgtaaagtcacttttggaactgatggtaaatattttccaaacaaagggtccccgtaaatattaatagtgaacttttacaaagaatgtgtttggttgattacaaatttttaattatccacacttttattatataattagaataaaaaaataattttataaaagcacacacgtggcgtccttgtgggacagggcgttgcaacatggtattagagcaaccaaggtttaaagattctaaagactgatttgataggtacattggctgcgaagactcgttcgacttatggttcagtaagttttaattgctagtttatttgttaattacatgcttatttgaaatatgtttgttgttagaaaagtacagtaaaggttgatgtggatgtgagtagctagaaatacttattagtattgttatgaattagagtatgttaaacaatgggattatggtcgcaagtgtatagatcatgcacttaaggcgatctggaaggggtaaccgcgagcttgctgggctcggggttagcggagagggtgagaatcctccaccaccaccgaattgggaagagctatatgccgcgatgcagaagaccatccagcaacaaagtgatcaaattcgagagttgagggagcaacgagctcaggctgttccaaatctaaatcttgatcctccggcacctttggtagtgccataagacatagggaatcgtctggagccattttacgagtagttcaggaagcaaaacccgctagtgtttgaaggggttgctgatccactcaaggcagaataataaatgggtataataacatccatctttgattttatgcgggtcgagagtaatgatcgggtcaaatgtgccatttatatgctgcgagagggtgcccgcatttggtacgagattgtgtcacagggtcatgacttgaataacatgacctgggatgctttatggacattattcttcgagaaatattataatgaatctatctgagcggctaaagcgaaagagtttatacgattgactcagggcagtatgacggtgacaaaatatgctaccaagttcgatcgacgggcaaaatttggttcagatgaagtagctactgaggccgctaaaaaagcaaaatttattcggggattagatgaacacattacacgagatgtgattgttgctgccaaacaacgtgggtttgttcgaacttatgcacagatagttgagttgaccgtagctgctgagggcgcaaaagatcagatacgaaagaaaaatattgcaagaagggattcatggaagtagacgtctgatgctggttctggtaagggtagtgaccctggtgatcgcaagaaaaggtccaatgatccatcagctacaggcccaaataagagatttcaaagtaatcaaggtttccatcgtggtggacacgagaatcggcagacttatcccgaatgtctaaggtgaaagaggcaccatcaaggtgagtgtcagcctagggcctgctttcagtgtggtgcagtgggtcacttgaaaagaaactgcccatagttgctgcgaccagaatagaagaatgatgatacacttgttcctactcgggtgttttccctgacctaggccgaggttgatgctggcccctccactgtgacaggtcagctttctgttgctagtactttattgaccattttgattgatttggtgcgacgcattcctatatttcgagtagggtaattaagaacttgaatagacctagtgatgtgctttcaagaggcttaagaaatttactgcctattggagagctggttatctccaacaggtgggttcgatcccttccaatgtttgtggaaggaagggagttgtcaattgatctgatagagttaagtttggaagattttgatgttatactaggaatggattggcttacaaagtacaatgcaaccatcgattgtaaaagaaagatggtaacctttcaaagagagggcgaggacccattcgtatttgtgggtaaagtgcaaggatcgcagattcccttaatctcagtgctgaaggcaagagatttattatgtgaagggtgtatcgatttcctagcaagtgaagtggatactacaaaggaaccactagcaaaaccagaacatgttctagtggttcaagaatttcttaatgtctttccagaggagctactagggttacaactgaagcgggaaattgattttgaaattgatctaataccagtatctccattaaaaacttgtagttgaattcggcatggtagcagattggcttccactagaccaatggcttggaaggctcctttaaaaatgatgttctcagagcttccattatctacgaggattttggaaactcttttatttgctatttgagcctctattaccaaagggtcattaatgggaagtgcacatgcttgacatcgtcttctgtaaaattcattctcaaatttatcatccttgcacgctgggcaagtgatagtaccaggtggcaagcttcactttaattcaactcactcaagtactgcttttgtgcatttcgagtgcttccagcaatatgaggtctaccagaaattgttactacatgaccatctaagattggcaatgcagctcttggagggtacggatttccaagaccaggggctacaactactattgttgttagagtgttctgtacccacctgaatggcttgtgcatttggcgcttatattccaagaatttgtggatgacctattccctgaggaggatttatggctccatcctatcctagaatgaaaagttgttcgtgtgcaactgcctgtcctggatatatgactgggatccttacccaattggataagtgttcgttccgtaccaatccctcaatttcatattataaatagtcatattcatttgtggtgtgaccgatatcaccatgatattctcatttcttgctcaaatctcttctttgttttcttcctttatacattgacggaggcttcctgtaatgcaccatgttacaggtttccttgtacacattttaaggagtatctattagacttgtgtactcagtgtatcttgattcttgggtctttcttttcttcacagactcactttaatttggaccatttgaactccttttgcttcgtgaatgggttacattagactctagaacttccactttttggttcgtttgtctaggagcagcactagatccggtttgtgcagctctaaacccaaaaatactagcctgagcagctctaaatatagaaaaactagtctgtgcagttggctgcacagaagtacttagtccatataccgtaggagtagtaaaagcagttggtggagggtaaatggttggagttgtcatctacaaaggttgggcatttattatataggtggtaggtgctgggagtactccatacgcttgagcgtaagcatcttctagatttatgaatccttgagctcttgtcaagaactcactcagtgtatttgctcttttgcattgaagatctcctcatagcaaagatacagttgtatgtcctgacgttgggccaccattttcatgtcattagtgaccttagttttagcagccacaaccatcatgcattggatggacttctctaagctttctccttgttgctgcttgactttggttaaggaactagcttccaagttataatccttggctgctataaactgctttctgaacatttcttgtaggtctctccagttgtgaatcgatcccggagacaacctcttccactagtccttcatggacttacttagtgttaatgaaaaacatatacattttgcatcgtcattggccttagcaacttccatgatacggttgatttggacaagtggtccctggggtctgtatgtccttcatacagctacatctgtggcattctgaaatgctccgatagtggtacatcaacgattcttttcacacaaggctccgtattttcttcctcaaagtctgacatgacaccactttgttttctagaaatcttctcagtgatcttcatcaactcctcaactttacgttccaagtgttgagccttatcacttgaagattcttttttacaaacacgatcgttgatgtggtttcttatattgttcccacggggcctagttttctctgctttggttctttctttcttagcggtcaatcttctttaaagatcatttgtggaaaggcttcctccactatcatctgatactggatgtacttcatcaatatcctcatcatgattactggaatcattaagaggatgcttatccatccaagactctggcttctaaactccaacatcaatcttttttttttttttttgcgtgactctacctctagattggtctggtcaccatgccctaaagcatagtttcatttcctcctctgttatggttggtcaacaattttagactttttatgctacttagtggaaggagtcttctttggttttttgatggcaatccctttgcctttgtctttacgaacacctgatgttctaggtgttgggttttgtgccctaaataaaaccctttaca

SEQ ID NO: 112377 - DNA, 2685 bp, Cannabis sativa
  modified_base (35)..(51): a, c, t, g, unknown or other
  modified_base (2611)..(2616): a, c, t, g, unknown or other
  modified_base (2650)..(2652): a, c, t, g, unknown or other
agaattcatttttaggatgttaatcaacatacttnnnnnnnnnnnnnnnnnctggtaaaatattcccaacaagatatcccatgaaagactacatagatagggtagatgaaattgttatgagccctagtaattcggagacatcctcaaatactattagggtggatcctttcttgaccatgacattccctaacttcacggaatatggtagattcattggtcaaagaaatataatttcttttgctcgtggggagacttatagatactcactgaatggttgcacccatgcacaagccttcttagtatattttgttgttttacagttgtgtcttcatttgttttgacttggcttgtatcttctagtgctgatattgtggttatgcgtgtagatactccagaatctaggatgttgaagtcattgagctataagatagctgcctttctggccaaggcgggagacacccaagagaaggagaagggtatcgccaagcctccaggacaccaaaaccatgtcctccctaaacttcatcatcattaaatgtctaggaaattgctcctcccacaatggcgaggtctacatctctggtttcctccgcttctgttggggtggacaaaactcataagagtactaggaaggcatctaaggcaccagttgctctgagggagcaagccttgggggaaacttcagtagccgagggatcaacttttgccattctaatgaatgtgggaggtttagatgacagccttcaggggcctgtctttccgaggaagggtgctccacgaagcctaaatgtagagagttaacttcttccctgagcgagggtgccaaaaaggctaaatcttcaatttcaattaatactccatctgatccattatccgcaacaccatcactattgaaacaacaacaacaaaaacaacatcaataacaaaaacaaacttctcaaaaaccacaacaatgacaataaactccaccaccacaataataacaaaaataaattgttctatctcaactaaatttgccacaaacaaagccgtttcccccataaaatccattggagcaacaaatttctaggctaacatcttccagccaggctcccagaataggcactcccttgggcaacatcctaccattggacttttccttccccatgagaccagccattcttagcaacgaagttctaactaagatgggcaagactgttgtcccccaaaggaggcatcatgaaagcgagcagttagtactttagaagagatctgcaaggctttcataagtgaagacagttgagattgtggaggggatccatcagccttcaccatcacgcgtagtctttgacatgatggcagtgagacaaaacttggtgcctagggttgggagagaggtggcaccttttggtgcgatgaggccttcataactaggcacgagcatgagtgaactcacttccgacaagtgggctattagaagtagccgagacccgtacaccctttctgtggtagcagacaacatgcggcaggagtaagttctagttttcgtgcattatccgtgttgtttgtttttttggttaggcactattatgtcattgaatctgttttgtgttagatggccttgatcgtagagaggacatctaaagaggtgggcaccttgaccattgagctagggtagctccattctaggaacaaatctttggtcattgagaatggagctctgcgcacagaggtggaacaagccaagacccaggccgcctaagatgtaaaagaagtctaagatgcatgcacggccaagtttaccctgatgaaaatgaacttagcgctaaatattggaagctatattaggaccacaaattcgtggttgaatggaatatccaatccagtttgacatctcttcatgaggaccttccccaaactagggaagatagtaaaagtgtgtggctaggctggtctcttaaagcgtaactttaaagacccaaatctaagaggttaactccctaaaggaggaaattcacaagaaagacttggtcattcaaggcctgcgcgatgattatgactggctacagcagttgaagaactcattgttagtcaattatgtccacttggatttgcactacaaagctacttatgccaccagcattgcatgcaaatgaaccatcgagaagctaaagaaggaggttcctcaaaactgtgttaacataaatgattctaaaaagcaagtgtcatagtggaatcctgacaactcctcgcaaaactaaatgaatgaactttatggaagaattcaagaatctaaaacctcgctcagtcctaaccctaaagtcctagagatgtgaaaatcctatgcgttgctggttgagataccctaactggctacacgaccgagacactcatagggtaaaaatatttctgcatataacccaccataaaatcctatttttactaataacttataatttaccaaaaccatagtgtgttctgacgtagcttgaacttaacactcatataataaacatgaaatagtaaaaactcaacaatgtattagagaacttactttatgtttggatagagtgtgggaagtcgtcatgtagatgtgcccaagactgttgtgtttgaatttattttaccaggnnnnnngatctactcaaaagtatgttgtttaacatcctannnatgaactttctaaaatgataataaacacatata

SEQ ID NO: 112378 - DNA, 2365 bp, Cannabis sativa
cacacacacaaatgagaagatgatgtcattaattagatattatttcccaatatttctagtattttctgtgacaatttttgccataagttaagtactgagaaaacgcattaatttgataatagcattagaatttagaaggtagaaaacgtaattagaagtcatattaaattcttatggcaaatgacggccttctctttattgcaggctgaggcaaacaactagtgccactcttttgataccagaagtctatgcatgactatatcataaccccataaatttatatatataaatcaaaggctaagtttgctttttgacttttttgaaaaatcaaatttgagcagccaagcaagtagcaactagtaagacaaatacaactcttgcctataattaaaaatgttcgtggcataattcaacttagtggaccactttcgaaagtccaaatccctcttgtttatgctaattaaacaatagttgatgaaatgatcttgtcaaaggtatagtatggatattattttaagggaaacaccatttcagatatatgttaatttcagtcaaatatgtgccccaatgaacaagagggtagttctatattcaactcgagtgggttttatttacaattcacgtgtagtcaattttatcgaatgtatactatcgctaaaatacgtaacaaatactagtatgaattagtcaatttgggttctctagtatttatagttataacttatacattagcctttttttctatgttttttttttattattaaaaaagactcataaatgatagaccacatcataattaatctagtagtactctctacttacaaagagagataccgacttcaattttccttcctcaaagtaattaggtaactatttttttttttttcaaaaaataacctaagaaaaaaccaccaaagagcaaagaacttaaagaggttgaagactacaatgtgaatatccagactaccagactttatttacagttactgataaagcgaacttagaaagtgtattgacaacagtatttacagttctagggcaaaaaataaaattcacaataaaaaaagattataaaaggctttaatatcataaaagactaaccccattgaagaatctaaattggaagaaatgttattaagcttgtcaacgagatctttgcaatcatattcaaacgaatgttgtgaaaactaaaaagattacattgagttactgcatgtagcaaagcaagagcttctactattttgggttgaaaatttccttctagcttccaaataacggtagccaaaaccacaccatggaagtcacgagccaccatgcctaaaccacaagtcatttgcgagatcaatggaaacattgatattgactttatatgattccctcactaggacgtttccatcgcagtgattgagcggtcgagacggcagagacagaatgggaatcaaatacctcgtattgcttcgacatttagactagtaagaagcaaaaatacctaaagcccacgatcctatcaactccggtgaaataatggtattttcatggatttgtttgtttcgatagatacaaatacaccactaagtactaaggatgaactcgaaatcaatgataggaagaggttgaatgatattgcagatgaacccaaagacatcactaacaataccactcgaattttcaagcttaaacttgtaaagtttcctcacatgatcaagattgcggcattcccagagagcatgataagtggtctccaagtcaatagaacaaataggacaaatgttgtcattgagaagcccatgttttggaagattgattatgtagaattccaaattgaagaaaacctccaaacaaaactcttgacattcgaacgaagatttgttagattatttagatatgaaaagaagcatatatgatcgatatgaaaaaatagaataaactataaacatattaaaattgtatatgcgatgaaatgaccgaaatatctccagtcaatgatatttgagcttcaatccccagtgatagcttcagattgggaaatcagatttccaagctctctcaactctctttagatgaaatttgttgttttcacagaatgagtattaagctcgggaactaagaccatatatttatattggtgagacctttcatcaaagtctctcccacaattaattgtcagaatattttgacaattaattgaagaaattaaatcaaaaaaaccaaatatttggtaaattgtaatctgaccatatatagaacatcaaccaattaattttaattcaatgaatataaaataggctaattagcaattttttcccccgaactttgacatgtacttaatcgtgccccctgaactttttggtcgttaaaaattccc

SEQ ID NO: 112379 - DNA, 6950 bp, Cannabis sativa
aaaaaaaaaaaaaaaaagaagggccggtaaaataaattaaactggtggttgacacatatgcccctatctagtttatcaaatttataagttagatataatgctctacccccaacatattttttgtttaaaaatttcaataaaaaaactgttacctactagctagtaaagtgacacaataagaattattacaattatttttagctgagaataaaagacacccctaaaaacagacttattctatatgtacatataaatagatgggtgaattcattgcatttaatttgaaaacaactcataaaataataaggcaaaactgaccggttgatacgtggagaagcatctttagcttgacacatttcatggcaaatttcagaacattcataactcccattgaattgatattgagagcagtatcatatctgccaaacattatatatacttagaacatttcctaaagtattgtcgtgcatacaactatatatctatatctatatgattagtgagtatatacatgtatacatacatgtattccagtacatagtaatgactattttctttttttacaagacggtagtttttgtagatcgatatcataaatttctttctctatgatattttttttagaaaaaaaacaatgcatttaagattaaaaaaaaagatctagataaattttttgtgtacgtttggtgatattagaagtcgaagattatactttcaatactctaaattatttcgtttttaaaaaaatacactaaattattttatttttttaagaaaataaaattttctgtaaaaaattagaaatcttaacttttctacagatctatatgtgtgatttgccatatcagtacacgagaaatatgcaccaccataaatgtgagatagtaagagaggtaggtttaaatggacggggccataaataaaagtaaattggttaaatactattttgaattatttgacaaaagttaccccgctgatactttttgttttattacgttaattgagactgttttttaatataattaaatatatagcatgaatagatacaaaaaaggtaggtataactttattcaaaaaaaaaaaggtaggtataactagtctgctcagaacacttttagcttattaaattttagtccaaacgaaaattaaagttattaggaaatatataagatctgaattgcgatctaattcataaccttaatttttttttaaagcataagatgcaaatagtatttactcaaaaagaaaattaaaaaattgaggagattccatacacaatttatgaaagaattttaatgaaattatatatataaagtatatatacgtatatacctttcatagaagtccgttgtggcagcagagttgacgataacatctatatctttccacatctcttcactgagatttgcatctttgactcccaagttttgcatactaacatctccagctactggaatcaacttttctgatataaacgattcaaactccttaccccattttcccctaatttccttgaacaactccttccctatcaccttcattatataatatatatagtattatatattaaaactcacagtttaattattatatgatcatatgttattgttctacgtactcattaatgtatataaatataaatattcaaacttgtataacgtaatataaatatttatatatatatgttaaacctcagattgcatgcgttggatagctgagtcgtcatctggagctcttaaaagaagatagaacttcttcacatttggttgaatcctcaatattttctccacaagaactgcaaatacatacatatatgtatgttcaaaaaaattatgaatgaaaaacagaaaaataatgtataagatccaaaaaacatgaagagataatatatttatggattgtagtttattaacaaaaataatatacgtacgttttccaagaaagccagtggatcccgttaccaagatagttttactctctagaaaatgttgtatgctttccatctccatatataattattctccttgaaaattacaaaatgaacaagtgatattcgagatcgatgagatgatttccttgccaatatcaactccaacacgtttatgaataggctatattgagatatttctctctctatctctctctctgatatttatataaagatagagtactatagttgtattctgaaaaagggcaatgtatgtatagaaatatatatacactacatgcaatgcaagtagtagttcatttgtttggttcacattagggcggctctattattttacttccctaattcactacatctacaattgacgatcccattaatgaaacgccgtactcttttttaaatgtcttttatttctatttttattatattacatatatatatatatatgtggtttaattaattataagtttgttgtgaaagttatggtttttagttggggaaatatttatgacttttaatggtaggcacacacatatgtatgtatatatgaatgttgtcacacagtgagattgacattcacgatttttttttttttttttgaaacgacgattataaattaaattacgaaaacatatatataaatattatattttaaaaaaaaaaacaaattaatgcctaattataatttgagataataaacattcaaaagcaataatattgtaattatatatcgtatgcaactttttttatttcaaggtgtgttgttcaaaaatttagtactagtactactatatatctcaaacaaaaataataataaaattaaataagtactgttattgttaaaaaaaaattactatttattgtacgtttgtgatcaattaattattttctacagaaattgttataaaactacatgttttgtagagagattttaataaaataaattacatagttttttcttttagagtactgtgttctcgattatatatggtgtggaacagtggaagggtgcataaaaagtttaatacacaactagataatcatataataagtataataaagattggattgtgtgggttctaatagttagattaattttggtacataattcaattatttaatgaaaattcaataattccaaatatccaatcattccaaattcaatccaaattcagtagttagagtattctaataatagttataattgaggtactccacataagtacctgaatatatagtttgttttgttattaatatttctaaaagtttataagactccatattaatttacactaatagttatttattgtgtaatatttagtaccataaaatgttgttttagcatttctcttatcaatattattctagttatgtataccactcaagagtcattgtctataaaccaaacaacccatttttgtttaaaaaaaaacaaaaaaatatctatacacaaaaacagaaagaaagaaatagtcaactaaagacacagcacgtggctagtggcgacaaggaacaatgacaggtgagtcctacttttccgactatatgggtatgtaatatgtatgggtatgcacattgaatctccaacttatgaagagagagtgggtagactatagctttagtcggtcagatcttaacctgctataatttatggatcccttatcaattgccactcctagtaattttatcagactatgaatagatattattataattattaaggtgaccaactcagtatgattgtaattcaacaccaatcgaagtatgattgtaattcaacaccaatcgagatgattgggttgggggggcttcaattcatatttgtatttttcgtccatatataataatataaaaagttaataatggaccacttattaattgttttatttaccggctgtggttaaatattatacatgtctctctttcatgtgtatggcaacaaaatatatatgtatgtatagttttataatcatagcttcatatatagatatatagcagcatatatctctcataatgaataattaagtttttctttttgattaattaaagatcttattagcatttttggtcgaatattatattctaatatatacatatatatataatcaatgcatgggattaattaatctgattaagatatcaatgtagacaaattatagcttatccaacaagtgatccaatggttgtttaatctcttatattttgtatgtttattggtaggttacctatataatatggcatcttaccagatcacttttgttatattcaaaacattaggttttacgtgtgtgtttataaatttatatatatgtgtatgtgtacataaatatatattaacgtgatttatgtcgttgtaggtatataaaaaatctaaggacaggtactgtaggtatctaataaataatatatagtaatatttgtagtcaagagctagataatcagttcccaaaattaagataacctagtacgactttatattattaggtaacaattaggaatgtcaaatatatatacattttctctttatcattttctaattgtcttaaaaaatttgttgctaataagacaggttactagtggtatcaattttattactccaaataaatgtaactatatagtagtcacgatcgaaaaacattaaccgaaggaggaattggatacgctagcttgctctatatagcaccttcaataatattctttattttttgtttaactaaaatagctagaaaattaaaataaagtcacttttcttattattgatccaatcatgctttttattttatttagtatttaattattttaatagtattttataatttgaattttttaaatataaattaattttataaaataataataaaaaaagtaataataattttgaataaaatactattaaaaaagattagtaaaaaaagtagagaactctctacatttagagagctccctatccttttgctattgtagagcatcatttttaggtatggtttgtgttgattttgaatgcatgaaaagttgagttttttgtggaagcaggggttgttgccgcggccacagcaaggctcgccgcagcgagctccaagaggttggagtcgcgtggcaagggcttgggtcgccgcaacgagggcccaattatcccagtttccttggttttctcgtttttgccataacttttgattctgaactctgttttggatgttcttgatatcgctggaaagtttgttttggactctgtgtgttaatctataattagagttcatattatgtgtatatatgaaaatgaatttagaattaaccctatttgtgaaatcccgggaatatgtgactaagattaccggggcttgctcaggaacacctagggatttgaaatctcctcatacttggattatcaggtaagatagtgaattagcacgtagagattagtgcagtggcactcatgtatgttaatttgtatatgttatgcgtaaagaataaaactttgttggaaaaaacagccctaagagctgattgtataatgaagagaatcaagcatgatgtttgtaaaagaatttctattttttttctaaattttttttaatactaatagggattagttgccagctctctttgtatagattttgttgtcttgtttccggtttctttttttcttttttggaggaggggagggagggggacttttgtttcgactggtggttgtaaaagcttttgtggtgcaataatatttctttatttataaaaaaaaattaattaaggttatctttatatattgttctatacaattagttattttttataatttcaattaatttatattaaattattagctatacatgttttttttttttaaataaaaaaataacttttgtttggagtttgattcaaattaattttgtttttatatttttaatgttttatatttttttagtaattattaattgtgtaaaaatgagagttttggtgaccaagttttagaatgtcttggtatttaaattttatatctttataaatatgtgttttttgtgtgaaagagatgtgcagatgagtgtgagagagttaggtaaaagcaaagagtgtattactatttggtactatttgtgtagagacatttgagatatagaaagtatataatttgaaattataagtgttgtgagttttgtagttttagctaagagtgtagaaattctttacttcagaagtatatccttttttcccaacaactttatatttgtgggtatttaagtgtgacaaatggtccatttggttttagctactaaaaaaggtttgagcatttaagtgtgaaaaatgatgtaatttgagttggtttttgttttaattttttttttttgggtgttgaaatggatgtaatttgagtagtttagttgttaatatttttttttttatgtatttaagtgtaacaacataaactttaattgagctaaataatatcattctgctatgaattatatacaggaaagatttttttgtttagagcattgctattaagcactagtggtgcttagcattttctcgacatatcacgttgcgattggctagcgatactccctaaaatctattatattaaactatgtgggacccggtatttagttagaccaatagcgatactgacatataggagggtgctaagcactactgatgccctttagtatttctccttggtttatgatgacatgttttatgcttgtctcttattgggtagtttgtatgttttcgggtggctcaaagcacttgtatgtagtttaaatttggggatttccataattgttattttcttttattttaatttgaataataaaattgtcattattcaatttttattggaaagtttttggctgataaatttaattcgccataaattcattcggggtggaaatttaactacctttcgcattcttttgatgcttttatacttgcgacttattagatatgtaaagtctttttttggcaagttaggtgacaaaataatttttcctttttatggtaagat
